United States Patent Application Publication US 2004/0031072 A1 - sequence listing, part 27

SEQ ID NO: 123921 - DNA, 458 bp, Glycine max
  Clone ID: PAT_MRT3847_82908C.1
aaaaaaaaattctccccttttccccaaaaggggggccccccattacaaaaagggggggggaaaaaaaaaaaaacccaccttttaggacccccctttttttaaccccaaaccctggggccctaaatttggggggggaaaaaaacgggggggaaggggggcacccggccaaaaccattttcccccccccttgaaaaaccgcaaaaaaaaaaaaaaggggaaccctggaaaaaaaaaaaaaacccccccgaaaggttttcaaaaccccggaaaacaaaggggccgtttaaaaaaaacccccctaaaccttggaaccaagggccccccaattttttttaaaaaaaacccggaaggggttttttttcaaagggggacccctttgccccaaagggttgcaaaaaccccaaaaaagggggcaattccccccctggaaggaaaccccttttaaaaccggttttccc

SEQ ID NO: 123922 - DNA, 263 bp, Glycine max
  Clone ID: PAT_MRT3847_82909C.1
gggggggatttattactttgtttcttccatcagcccccacgggtgcaaattgaacacactaaccggcatcagcgaatagtaaagcaagctgcaaaaatttaaccagtattattggtgctgagcgatgcaagcagatgatccagtatcgattgcacaaaagggacacaccacatgaacagtcatgaatcagttggacaaagccactcgacagagcataaagaactctccttactgtaatgtgtgtagggaccatacaggccaac

SEQ ID NO: 123923 - DNA, 388 bp, Glycine max
  Clone ID: PAT_MRT3847_8290C.1
tcgaccctcgcgtccgcccacgcgtccgggtaattgaaatccactttctcttcttttcttgtttcttacacttgttgcgtttgctcaaaattaagcatgtagtgttaaaacctcttactcttttcattttgttattttttgtactaatgctgaaaatgaatactatattagacctggaagctttagagattgaagagggctctcctaggagtcaagggtctgaaaccccaagttcaaggtccagcacttctgattcggagagtcagggatcttttgctgggacacctaataacaataaccagtggcgtggtttctttaaactactcaagacaggatcccacatgcctttccatacttttcacccacttaaaaatgttccaaaactgac

SEQ ID NO: 123924 - DNA, 212 bp, Glycine max
  Clone ID: PAT_MRT3847_82910C.1
aattcggcaccaggtgaagaaaagccaactggacgggaagaagggaagcaaaggaaaaaagagaaaggaatggaaagggcagaataaggcaaagttggtgtaaagaaaggatgatgaatcgtggtgccttggtgggcttctttctcaaccggacacccgatttcttcccatttccccattttcttctgattcccccttctctttctgcccca

SEQ ID NO: 123925 - DNA, 217 bp, Glycine max
  Clone ID: PAT_MRT3847_82911C.1
attcgatcctagtgggaagtgactcacgcctttctctccctccctctaaatatagatgtctgacaacccagagtcaagccaagacaagcgactgaactagaaatagagtgattgttggatgatgcaaaggcctcatgccttgtctctcttttgatggagggtgacaaacgtgtgttatttatgagtattgtagatgagcaagttccctttctttttg

SEQ ID NO: 123926 - DNA, 333 bp, Glycine max
  Clone ID: PAT_MRT3847_82912C.1
atatcctccggttctttttggattgggtctttaccgaccgggccgtatggatccatgggcccacctccctaagatctgtttccggtttaacccacaatgtccaaaaactctctccgcctgtgcccttctgtgaggagtttccttcatgcggaaggcaccccccctccatttgccatcatttggtaattcggaacttagcctgagagcgctacttgtacctggacgattttgggccgcctatactaacctataaatgcgatatgctcttccttgtgaagatcctacttgaggccaaattttgatgggccatccttccgtattaagtcttgcctt

SEQ ID NO: 123927 - DNA, 355 bp, Glycine max
  Clone ID: PAT_MRT3847_82913C.1
ggcttcggctactctctctgtagccaaaccagccccttcagcaaatgggaaaggcttctctgaatcctctggcctccgaagctaatcaggcttccctccctttttctagaaatcttcagaggatttccattctggcatttgcctcccagaccttgccagttggaagcaggggagggttccaaaaaggtgtggaccgaaaccaaactgaaaggtggccaaaaccggttttggaagaattggagggaacctcttagggggcttgaccggtccaaaaaaaccccctttggtttcttttcccaaaaaaacccccggggggggaaaaaaaacccttacccttttaaaaaacaaatccact

SEQ ID NO: 123928 - DNA, 1528 bp, Glycine max
  Clone ID: PAT_MRT3847_82914C.1
gcgtaatcataccgaattcggctcgagctcacggttggtagacctgttgtgacaaacattgtcattcctatttgcataaaaaatgcaatttcaagccaaactgaagaaaatgctttgtctgatgttgaagttctaaggttagcagctgcagtagaaacaaattcagtacatccagttggtaaagcgattgtggatgctgctcaggctgctaattgtcataatgctaaggtaaaagatggaacattcctggaagaacctggatctggtgctgtggcaacaatttatgacaaaaaggtttctgttgggacattagaatggattaccaggcatggagttattaacagtatacatcaagaagtggagaagagtaataatcaatcctttgtctatgttggagttgatgatactttagctggcctaatttattttgaagatgagataagggaagacgcaagagacgttgttgatagattgtcaaagcaaaatataggtgtatacatgctatcaggagacaagaggaatgccggacaggtgggtgcgtcccttgttggaattcccaaagagaaggtgctatctgaagtaaaaccagatgagaaaaagaagttcataaatgaactacagaaagataacaacattgtagcaatggttggtgatggaattaacgatgcagctgccctggcttcttcacatgttggtattgcattaggtggaggtgtcggggctgctagtgaggtgtcttctattgtattaatgcgcaaccagctctcacagatagttgatgccttggagcttagcagactgaccatgaatactataaaacaaaatctttggtgggctttcatatacaacattgtaggaattccaattgcagctggagtgttatttcccataaatgggactgtgctaactccatcaattgcaggggcactcatggggttgagctccattggcgtaatgactaactcgttacttttgagattcaaattttcgtcaaagcagaagcaaatacatagcatatcgccaaagaccaaaatccatgtggcccaaaatcagaaaacaaaccacccttattagatgttggatgcaggcacacagcaacgcaatggaaaggaagttcccctcctgatctcgggtcaggtagaacattacagaagtatacacttttaacctttgatttgaggctatcaatcacccaaggatgaaaagaaatcagtacagatgagaatttagatgtacaaaacagaagtgcaagaatcacaccataaagtgagatggggttcaagtaactgatgtaatgtaagagaataaattagataactcattgctgggggatactttatttgattctcaaaggtctctctttaggagctctcttgctgtcttctttaatcataagctctgtggcagcttttcacttatgacaagcccatttttccgttggccttttattgtttataaattagatcttaaagtcttgattcatgttttaaatgtctttctagtacatgaatctttgaattctagagga

SEQ ID NO: 123929 - DNA, 383 bp, Glycine max
  Clone ID: PAT_MRT3847_82915C.1
acattggcgaacttaaaatttttccctgaataatttaaggtatttggcttacctggaccacttaagactaatccaaaattcccggctttttaaaggccccatttaccaaaaatgggttaacaaattgggcgggccttatcccagaaaaaaggaaggtcccaaagttaatttttaaaattggttggttaaatcccccttttaaattttcgctaagggaaaaatgggagcaaaaaagccccgttttcccttgcagaggggaaaaaattggaaaggccctaaatttagggtttttgggcctaaaattcccccgggccttaaggggaaaaatttcttttttttaaagtggcaattaaggcttaaaggggggggatcttgggaatccc

SEQ ID NO: 123930 - DNA, 546 bp, Glycine max
  Clone ID: PAT_MRT3847_82916C.1
gaacaaggggaactttattacaaatttctattatctccatttcaattaaaatacaacatccataatcaacttaaactaaaagaaaaagaaattttcactgcaacaataaagaaattccagtcaataacaacccccaaaggtccaaaccacgtatgtatacatagcaatagcatcaaggaacatatacaagtaactcatcataaaggttttcgtccatcccaaataatgattaaatgagaagtgatgaaattgcttcaaggatcttttggagatagagtagagagaaaaaaagaaggtaggtttacaaaacaatgctataatgtttccaaaacacccaaacctgactaaatataacttggatctatgaatgtctaccacctctctgttgtgaaacctcagattttacgaatgttcttactgcttctgctgcatttggtgagtacaataatgcctttgaagagcagatcttcaaaactcatatccacaaaaacatatctttaaaatccagatgtccaatccttggataaaggccctggggaagttggg

SEQ ID NO: 123931 - DNA, 391 bp, Glycine max
  unsure (1)..(391): unsure at all n locations
  Clone ID: PAT_MRT3847_82917C.1
ttttttttttttttttttttaccaggatccctcctcaaaaggaaatattgtggagggcccattgggcccttaattggggccacttttaaagggggtattaatttaaccggccagnnnncccagtcttatggcgattaaattggagccttaaatggctttttttaaggcttgggttccaattccggggcaccctttttttaaaaagcccacctttatttattggagcttttccttggaaaaattcaaaagacccctaaattaattatttggattctaacctacctttaaaggtccaccccggctggatctttttttccttttaaaaccccactggtgtgggaccaccattaaatttcccattcccacccccccagggcaaaattggtttttg

SEQ ID NO: 123932 - DNA, 387 bp, Glycine max
  Clone ID: PAT_MRT3847_82918C.1
attgacaggagtgatacgagagcgaggaagaaaatctgagccaaaccagaccccaccgtccccgaaacgggtcgtctagccctacttcgagaccctccctttcgagcagctaatgatgatccagcctccgaaactgattctcaggataccgaacaccattgatccgccaagaacctcctatatcggatctgagcgaaacgaatcgaaacgaaaccaaacgatacacggctaatggcggatctggaccggcatatcaagcatctgatggagcgcaaacctctgccggacaccggtgtgaaggcgctgtgcgatcaagccagagcgattctcgtggaagaatggaaccgacacccagcgaagagccccggcaccatctgaggcgacatt

SEQ ID NO: 123933 - DNA, 1781 bp, Glycine max
  unsure (1)..(1781): unsure at all n locations
  Clone ID: PAT_MRT3847_82919C.1
cggaattcccccgcgtccgccgcaaatactctttctcttgtccttatctttcatatacaacaatttctctttcattcatccatctcacagctattgaagatcatatatatatggctccgatgggagacaatgttgttgtatccaatatggaactggagaagttgcttagcatgaaaggaggtaaaggagaagccagctatgccaacaattcccaagcacaggccatacatgcgaggtccatgcttcatcttctgagagagacactagacagagttgaggttgttgagggacgtgaggtggcatttgtggtggctgacttggggtgttcgtgtgggagcaacagcataaacgtggtggatgtgatgataaagcacatgatgaaaaggtacgaggcattggggtggcagccaccagagttctcggctttcttctcagaccttcccagcaatgacttcaacactctattccagctccttcctcctctcgccaactacggcgttagcatggaggaatgcctcgctgccaacaaccaccgctcctacttcgccgccggagttcccggttccttctaccggaggctttttccggcaaggtccgttgatgtttttcactcagccttctctttgcactggctatctcaggtgccagaaagtgtagaggacaagaggtcaagtgcatataacaaaggaagggtgtttatccatggggctggtgagagcacagcaaatgcctacaagaaacaattccaaacagacttggcaggctttctgagggcaaggtcagtggagatgaagagagaggggtccatgttcttagtttgcttggccagaacttcagtggaccccacagaccaaggtggggctggccttctttttgggacccattttcaggatgcttgggatgatcttgtccaagagggattgattagccaagaaaaacgagacaattttaatattccagtctatgcagcaagcctgcaagacttcaaggaggtggttgaggctaatggttcatttgccatagacaagcttgaggtattcaaaggaggaagtccacttgtggtgaaccaaccagatgatgcaagtgaagtaggaagggctctagccaacagctgcaggactgtgtctggagtccttgttgatgcccacattggtgacaaactaagtgaggaactttttctaagagtggaacgtcgagccactagtcatgccaaagaactattagagcaactacagttctttcacatagttgcatcactttcttttgctcaaatgattagagactgagagaaaaagggtcacttgaagataactagacgacaaagactttttctctacccctacccctttttttctttgtgtgttgtgttactgcataggaggagtcagaaagaatacacaaaagaaagagaaaagagaggttgaaaacacttccaacctactgttttttctccctcttttgcgtgttgtttgtgtgtcatattgctgactctagttacttgctgcgcattatgcgctttctgacttgtgttcccttgaatctgaactaattttgctctctacatagcatacatattatagtgtccatatcttgtgagagttgtatgaatggaacttgtacctaacaagctgggttgttggatatgccccttgatttagtcccattttgctttcttccttgtcctcctcaatcgaacaccttttttttttagnntttcannagcaaatccgactggtagacaaatgattaattcnnnnnnntataannaaagnngacagcgg

SEQ ID NO: 123934 - DNA, 224 bp, Glycine max
  Clone ID: PAT_MRT3847_8291C.1
agccttccagcaagaaaagataatgatgtgctagaagcaagaatttgttgttttcaaagaaacacattttaacgtaatttctctctcagtttctttgaaaacaacaaattctatttaggttgttatgaaagaaactgagagagaaattacgttaaaatgtgtttctgaatttgatttacttcttgcttctagtatatcattattttttcttgctggaaggctaa

SEQ ID NO: 123935 - DNA, 275 bp, Glycine max
  Clone ID: PAT_MRT3847_82920C.1
acggctgcgagaagacgacagaagggaagaaggaagctgaagtcatagaagagattaaggaagtggaagtgacggaggacaatagggaaattgaaggggcacacgagaggaaggaagctgaagtcatagaagataagaaggaagtgcaagtgacggaagagaagaaggaaattgaattaacagaagagaagaaggaagcagtagtgcaagaagagaagaatgatggggaagcgactgacgagaagaaggaagttgaagtgtcggacgaaaagaac

SEQ ID NO: 123936 - DNA, 170 bp, Glycine max
  Clone ID: PAT_MRT3847_82921C.1
tctcataaaggatgtatgtagtattgtagtcttgtaccaaaaaaaaaaatcagtaaataaatgcatgtgttcaatgtttttttttgctcaatgtaagttcaggttgttgaacttgtgtattcataggatcttccaagtttgaattcagattgtgttcaggccgtcttggt

SEQ ID NO: 123937 - DNA, 494 bp, Glycine max
  Clone ID: PAT_MRT3847_82922C.1
gaaactaattaaggggattaataaaaagagacaggagaagggcattagacaacaacagctttctttctttcaaacaggaattgctttttacagtggctaggttcagttcactatgcaagttaaaaacaagggactaaaatcaaagtctttttaaacatagaattaacctaaaagaaggcaaaaaaagagtaattaaaatcccctcccttcctcacccccaccccccgccctcctaacatgtccacaaaaaacagttcacgtgaaccaccatgaaaagctaccaaccacataataatgtccacctttagattctttaatcagttctggttgatccactgcttgtggcccggaacccattttggacatttgggactaaaatacttctccaccacccttgagttcaagagctccaccacaggtgcaaacttaacacaccttggagtcttgtactgatttattgaagcccctaggcttatggcataggccatgagctt

SEQ ID NO: 123938 - DNA, 562 bp, Glycine max
  Clone ID: PAT_MRT3847_82923C.1
gagctcatcgaccctgccatcacaaaacaatggattgttacgttacaaaagctctattcactatacggacatcctcactttgtccagaaggaaaatggcctccacattgaaggatacctctcgagtcgacccgtgttctaaatgcgatataactatctctatgaccattctgtctgcatactttgaaaaataggaacagcaagacaacgcaaaagactagctctgttgatactgaatccacttggatatgatgcatggtactatcgtctctcttattacaattatacctcttgatgttgatgcagagctccctgtcacagatcttgctttggatctacaccagaagagtggtgagcctgaacacttgataccagattgcatttaggcacgatcctatatacacagtgtgcattgagaacaatcttactccatacatgtgcatcgaacagataatcacgtgattagtactggagctatagcaggattagactatatagtcagactcctcctgagtgccttacaatatatccttaatatgttcaattctgtctcaataattacc

SEQ ID NO: 123939 - DNA, 289 bp, Glycine max
  Clone ID: PAT_MRT3847_82924C.1
gggtgggaaacacagggaacaagggagagagcaattaggaaatgtccaaaatatcaatccaaaagtaaaacctgaaggcacatcgtaccttgagggtacaaatggcgtttaagtcacaactccctcattgggtttaccccctgtactaatgttcacaatggtggctgccttgcacagtccaaatgtcacatatcccatggctgagatcttccggaggcaaggactgaatccaccagcggtgatttgggaactgaagttgcctgcttcctggagccggtcgatccgagcc

SEQ ID NO: 123940 - DNA, 368 bp, Glycine max
  Clone ID: PAT_MRT3847_82925C.1
gatcctttttttggtggaatgcagttattttgccactcccatgccgccccttgatgaagaaatactatctaaggttgcacaagatatggttgaggaatggtttgattgtgttgatgaggaggactcctttgaggaagtttctttaagtgcagcactcaatggtgcagagggtttggactttatggaaagaattccttttgccacatttgagggttttccccatgtgctttcacgcaaaattggtcaaaaaggtaaaaggagattcgtgtctggggatggtgaaaagattacatcgttttcgggtaccagtgttgaagaggcttacaataagcttatcttttgaacttgagaaaagcgttcctacattg

SEQ ID NO: 123941 - DNA, 412 bp, Glycine max
  Clone ID: PAT_MRT3847_82926C.1
ggctcgaggttctacaaaatttttttttgtatttttatgattagtccttttggctgggggtgcgtgagaaaccgtgatatcaaatcgcccggtttcactattgaagctttcgtaacttgtgagttagcactatgggctatagctttgatgtctcatctctgcgtgcagatagggcctctgttgactacgcatggatcactagaagctccacagagaatgatggctaaaccggtgagatgctgtatcctctctctcgctgacgatgactactcaatatgcttgaacgtgtcagctagtctccttcgcaactgacaaccttatgtcacttcctataattgtgcattgcaaccgctctagaggatccagattcacatatgcaactttggatatgactatatctgtcatactatgc

SEQ ID NO: 123942 - DNA, 435 bp, Glycine max
  Clone ID: PAT_MRT3847_82927C.1
atatactaaacggataactacagcaccattacaaacggggaaccttaacaaatgataaccctaaccccgggcatgacataaaatccgcgggcgaatgacaattgagaggaactcaatccaaggggtactgctcacctgcttaaagcacaacgttgacaacaataatcacgactgcagatacctctgaaaaatcataaaagtaaacgcatggacaggcaaaccgctagcacggctacggggaccaatctccgtagctatatagaagcccataagcatgacaattgagtgtgacaaattgctgacactggaaccttatgcagggaggcctcatgggaaacgtgaagcacacatggaaggagctgaaatcagggacacattcggcacccaagggagattgaccagcccaggggagccaagggttggggccatggagca

SEQ ID NO: 123943 - DNA, 473 bp, Glycine max
  Clone ID: PAT_MRT3847_82928C.1
aagcgatggtcattagctctgatgatgaacctgaagcagttaagggataaaacgtaagggaaaagtctgctgggaaaaatgcaaaggcattcagtggagtcctctctgctcgaagcaagctgggaaaaagatcatttctataacacaatctccacaggtcatgccattggggcaaatcctgcaattcctagaatgtttccaaatatgtttccactggttacaagtcagagaaagttggcaaacagaaggctgattgcagtcatgaaattgtctcttgacaagtctgcccaaggagaaagaatttctggcacaagcaagaatgatcatatttcttcctacaggaatgatacattggaagaccaccctattcttggataacatctcattgcaacttgtctcctgacattgctccacactgtcgagagatcttcatgctgaacaaagtcttgtgcactcctatagtagttaattga

SEQ ID NO: 123944 - DNA, 1236 bp, Glycine max
  Clone ID: PAT_MRT3847_82929C.1
ggctcgagatttggttctgaagtagaagttacttaatttgtgcctttttctactctattgtattttgaatacaaagaatttagaagcttggaagttctacgtttattttcatgtattaggcttgcgaagagtaaaaaaaagtgagtgtgttctgagatacaatgtagcggtgtttgcaggtcatgccattggggcaaaggctgcaattcctagaatgtttccaaatatgtttccactggttataagtcagagaaagtcacaaacagaaggctgattgcagtcatgaaattgtctcttgacaagtctgcccaaggagaaagaatttctgacataagcaagaatgatcatattgcttcctacaggttaatgactttgtgtgcttatcacattgcttatgttagtgaaaagtttgatgatggaaacaattcgcttgaatacttacaatgtcttacttattgtagacatttttcttggattgatgcattatcctactgcaatcctgtatcgcccttctctgatcgctgctgctgccgtgtttgcggctcgatgtacccttggaaggagccctttctggacaagcactttgaagcactacacaggctactctgaggagcaactgagggattgcgccaaaatcatggtcaaccttcatgctgccgctccaggaagtaagcttagggcagtttacaagaaattctgtaactcggatctttctgctgttgctcttctttctccagcaaaggagaactgtcttgaacaagcttaggtttttttagggagagatcatgactgttatgatctatatagtattcgtttatatttttcagagtgatacacaaaagtttgtgtttggaatttgttaggggattgcttgaagcctcaagcaaagtttggtgatttttttttttttttttgtgtaaagcagaatttgatgaaacattgctgggaaatattcttataatgaatattgatacattggaagaccaccctattcttggataacatctcattgcaacttgtctccggacattgctccacactgtcgaaagatgttcatgctgaacaaagtcttgtgcactcctatagtagttaattgaaaagttgacttgtaaactatagaatgagaacggatagcctcctaaaaccacttgcagaccaatctcatgagaaatctcatcgagctctgtagttctcttctccttctcgtaactaagtggggatagacctgattttctc

SEQ ID NO: 123945 - DNA, 2931 bp, Glycine max
  Clone ID: PAT_MRT3847_8292C.1
aaaggaatattaggccaccttaggtagaggtaaaactgagctttaagaagaaaactaacccacgagggaaggtcgtaaacaatacatcagcacatataacagaaagaaaaaccggaactgaataaaaaaaaagctatctaccaaggaaagaccatgtttggataaagcatcagtttttttttttttttttttttttttttgcaccctaagtttgaaatgtgattcatttgcgagtgacgatcatgagaaaacagcagaaaaggttaaggattctaagtcaataataacagaatacggtaacaacttggattcaagaactggaacaagaataagcttctccacagtcttgagaaacttggtcgacatgcaccgattgcaaaccatggtgcaataatcaaactgttcagagaggctatatcttattctgtaaacaaaaccgctatgcaactgtctagatacttactaccaacatcagggttcaacaaaattattcccaataagcaaccatgatactaaacagtcacaagggaaagttcaaagaagcctcggctacattaatcatcacaacttattgttgtaccaaaatacacctttgctctcggtactttgatctggctccacataaatacactctcttgcctctctccacattgccttgacaaatggagtctcatcaaaccgataatactctcccaaaatgggttttattgcctttgtagcctccattgcatgataatgtggcattgtggagaacaagtgatgtgctacatgagtgtctgtaatattatggaagaccttgttcaggattccataatctctatccactgttgctaaagctcctctcaaccagtcccactcagaggaagtgtaatgtggcaatgcagggtgagtatgctgcaagaatgtaatcaacaccaaaaatccattgaccactagcaatggaactccataaacacacaccacccaggcaagtccttttgccatggcaagacggaaaaggccatagcatactgcaagtactcctgcatctgatatatatatttgaagtcgttcacgatcagagtaaatgggaccatatgggtcatagtggcaagcaaatctatcataaggccttccagaaacatttaaagccaagtacaagggccaaccaagtgtgagggtgacagcaagagtgaggactctgcctggaggattgttaaggtatttagagtaccacttgatacaggacttctgctttggcacaaatacttcatcccgctcaagagaaccagtgttggagtggtgacggcgatggctgtatttccatgaaaagtatgggactaggagaccggagtggaggacaaggccaacaatatcatcaagcaactggtagtcactgaatgcatggtggccacactcatgggcaatgacccaaactccagtaaggatgcaaccttggacagcccagtagattggccatgccaagaaagagagagggctgggaaggaggtggaagtaatgggtggcaacataatagaggcagaaggctatggtgaggtcgtaaacaacataggagaatgagcggaaaacagaacgctggaaacagtgaggtggaatgaccttcttgatttggctgagactaaatggaggtttttcaaatggcacccgcttcaaagggtcaacctctgacttcctgttggcaggaggaacatcagttcggccacccgcccccatcttcacacaatctgaaagtgtgaacgagaatgtttgttagagcgcacagaaaatgtgtgaagaggagggtgagagcgagcgggcttccctcgttcgacttggtcctgcgacccgacctgcaccgctacttggttggcctctctgaataatacgtgattccaagaaagaacagatttgactagtcgggcggactcaggtgggtgtctaagcagccatcctttatcatcttaatgactaaaagagtgagattctaccatcagagattgattcctcttgaaccagccaggttgagccaaaccaataatactgacttccatccttgtgcaaaccaatttttaactaatgtataaatactatgttacactgaaaactaataagaaaaataaacatggaagtcaatatatatcaatactacaaaaatatattacactaaagaaacacaggtagccttcctcgactatcagcttcaattttcggttcttggctttatgccccaagatacaccaatagcagcaccaccaacaaacatcgcaaaacaaacttgaatgtggaacttcattctgcattgttatgagctgaattgcgttccaaaactgagagcatgacaatcaaggtccctcagatttagcataacagcaactccagtttcactgtggaacacatatgagtcttcaccaactgcccttctgatccctttatgacacgagtttcaaatttatcttgatttccaataaagtaaacatgaggacagctctcaatgaagaaaggatccttatcagtataaggatagcatccaagagtattaggagcagtgggtgccaaatgcctccatcttaatgtcctttccatgaattcaagtttatcttttgcctctgaatacttctcaagatcatctacattttgacccgatgtcccaagaaacctgacattatcaacctcaaaacaatgaggatttgtacaagatctaaaagtattatacgttgacgacccagggaaaaggcatctatgcaatgactgctgtggtaatgagaaattagcagggtcactgggtcctggcatgatatccaaaggcaagccagcagctatctgactcaacagaatatctagctcctttattggctcagccattcttgagagatcctttgaagccaaattctgtccattaagaagtctgtgaggtatctcaattaaatttccagcaaagacaacttgagcaca

SEQ ID NO: 123946 - DNA, 540 bp, Glycine max
  Clone ID: PAT_MRT3847_82930C.1
cgacgcgttttaacgagcacttgtacgcggagggcaccaaggtgacggagtgcctgcttgaggagctgtgcaacgatgccgagaactgtgacatggtaccacagaagcatgcgtgtctgaacctcaatgctgaagctggctctgcgcagaacacgcatgctattcttaatatgatagacgaataccatgacagggtgaaacggatcttgctagcgagtgcttcccataactgctctgatgatcgggggtaagcgcattataacgatacatctttatgttgatccaccaaagtggaaggctgatgagagcatggggatgaacaaagacgagactgtacactggatgcatcctactctaacaaagatcgatcatcactctgaagactgcaacaacatgatcaccttacagcatgatggcttgatacagagatgtgaattaatacctgagaaggacagctctgaactgatgacagtgatcggacatatcgatacctatcctggttggcacttcataatgggctgatactaagacctgaactaa

SEQ ID NO: 123947 - DNA, 550 bp, Glycine max
  Clone ID: PAT_MRT3847_82931C.1
ggctcgagcaaatattgatcatgggtagaagcttagaaaaacccacaaagatggaaattgatctctctttgaagatagatactgatgatgagcataaagaagaagaagatgagcgagtgaaagaggatgaggagcaagaaatggcacagattcaggataataataaggaagaaatccctgaagccacagctggtgaaatagaagatgatgcatcagtcatagaaacatctttgcaagataacacaaaaacaaaagagttaagtgtcttacaaatggagatggagagcatgaaagaggaaaacaaagttctgaggaaagttgtagaacaaacaatgaaagactattatgatctgcaaatgaaattctcagccatccaggaaaacaataaaagaaaggatcatgaaatttctctctcacttcaagacattgcgaccaccagcggtgaaaggccatcgagaattcttgagatctttaacaaacaaatgcaaagtgctccatcttctccacaccctgatcatgatgatgatagtttaagcgagagtgaattggg

SEQ ID NO: 123948 - DNA, 523 bp, Glycine max
  Clone ID: PAT_MRT3847_82932C.1
cgtaatctcctcattcggctcgagtacggctgcgagaagacgacagaaggggccctgtctaatttagaggtcacgactttagtttaatcaagtaataagaactaagacgttactaattgtgctacacgacctacctgacaaaggctaacatgaaccacttatggaccacctttctaatccgtcaaattcatcttatccatacagtcatatgatgcaccctctccattatatttttttcttatttctccctctccctcctcctttctccaaccagtgacggcaaccctttttctaacccgccaccacaaacgccatcactcgccgttacagaagtttatttccaacaatggtgattgtgatgacgagcctcccttttttcttcttgcttccctttttccttctcaaacaacggagtgtagtcgcaacattttaatcttcaacaaatctaagtccaacttcaacgtctataccaacagcaaaccaatcatcgtcatgagcctctagatcagtctatagggacatg

SEQ ID NO: 123949 - DNA, 301 bp, Glycine max
  Clone ID: PAT_MRT3847_82933C.1
ttcattcgtccgcccacgcgtccgggagatgaccgggatggtagggagtctcatcgagggaatgaccaggatgaaaagcgaggggagacagagagtcacagattgcatcatggtgatagatggcgtggaggtgatgaggacaggcagaaaattaatgatcgtcgtgggcgacatgattcggaggaagaggattacagggagctggccaggaaatcggaaagggatagagataataatagggatagggataggagacagagagtcgccaagggtggtgacaatgtgtgggatttgtcgcttg

SEQ ID NO: 123950 - DNA, 723 bp, Glycine max
  Clone ID: PAT_MRT3847_82934C.1
ggtgcctcattattatattataacaacaactaaggtggctaggcctaggctctagctatattgtacttgtcaaatctagatacaaaggttgcatattcttgattgctagctcaagctccaattccaatatattgatattatcccctaagaaattaagaatgagacagagaatggacaggcttgtcattcttcctttctctgctggttgcatctctgaggccagtgttgctgttggtgttccacatccaagaagatcaaaaccagacaccaatgcatcacctcctacaataaaacggtctaaaagcgtcgaggattcagagattttgtctggtgaaagcatgaagaactcgttgaggctgctagacgttgttccaaagtctaacctatcctacggcttcaatagactggtcaagggtttcaagaatttttctcaattgtttgtggaaaaagatgagtttgaagaagtggaaatagacatggaaatagggtgcccaacagatgtgcagcatgtgacacacattggttgggatggcattgcaacttctgctgctgaccccatgaagggatgggatgcccttattcctcatgagctcctctctctatcttcctctcaatctttacagcaccaccaagaccttcctaatttggacgcaaaacatgatgattctcctaattaattccaccatttattcttatacagatttgatcaaactagaaatgtga

SEQ ID NO: 123951 - DNA, 648 bp, Glycine max
  Clone ID: PAT_MRT3847_82935C.1
ttccttttttttttttttttttttttttttttttttttttttttttttttttttaaaagaaacaagccttttttttataagccctttcacctcataagcaatagccccctggaaaaggggcacaagcttgcataactcacggcacgggcagttcggggaagggaaaaattcccctcccgtttaacagaaacaaaccaaaccctgaaaattaaacccagtttatagaagccacccaagaaatagtagggggaaacaaaccctggggagcacatcagaaaaaccccaagctaattaaaagcttcaatattcaattaattatccccaccattggggaaccggaactcctttatccctaacccttccatacaaagccaagcacccccaaaaaggtctttcgttctttttcattggcttccccctttgccaccacttatttttacactttaaaaagaggtcatccaccaaccttattggcctgggtttaataatctcctccaccacccctggttttgccttaataaaaagggactcttcctccttcacatttttagacaaccaagcaaaaacggggaaatggtcttccggcacaaccgggacgctgggagcccaaaacttaaaattcttctggggataggtccccttaaacca

SEQ ID NO: 123952 - DNA, 571 bp, Glycine max
  Clone ID: PAT_MRT3847_82936C.1
ggatggcatgccttcttacaaggatgaaattaattactcttcacatttctaagacccttgaaaagtcgaatctcgtctgcctagaatcatgaattaatttcataacacttacacatggattggaaccatcaacttaaccttatcctttttttttatttcatttggaaatttaaattgatattcccctaataaaacatactccctataagtataactataccacatacagttgaataactgctacacaactgtcctacaatattacttccccatcatatacaattagataactctcctacaactagacatatttctatttctggcctgcaattttcttatttctccaagagtacacaatccacgttttggcttgttctttgcataacctggcaaatatcttgacttcgggcacttacagaatttgtctgtagatgttttctgagttaggttcaccatgtttgctgaaatgttgagtatattaacagtatgttgctttcaaataagttgatcatgttttcactgatcctgtctttttcaatgatgtttctagattctaataaaaataggcttg

SEQ ID NO: 123953 - DNA, 2572 bp, Glycine max
  Clone ID: PAT_MRT3847_82937C.1
ccacgcgtccgcgtacggctcgcttccaaagcactttttattttcttctctctgcgatggccgtggatttctccaaagcggtcgacgacgggctgaagctctccaagcgcatatacttcgtgaaggacagggcggtgtccccgcccaagcctccgccgccgatggcgcgctgggccaccgcgttcctcccctcggcgccgatggtctacgcggtgatctccgatccagggatcgtggacaaccccgacatctcgagctaccaaccgcacgtgtacggaaggtgtgatcctccagcgctgattccgcttcagatgaacgcgattgagatggaagctgattgttaccacgaaaccgctttcgtcacagtctccggcacttggagactccactgcgtcatgggaagccgctcctgcgattgccgcatcgctgttcccgtgagccaccagggttcaattctaggtgttgaggtcagcgtttctagaaaatcatattctactcaactggttgtcatgggagatgagaatgggaaccaaaattccgcgccaccacaaaacggagggtttctcatcccgaatatatttactttaacaataccgcaggttgatggaggttccaatttgtcaattaaagttcggtggtctcagaaaatagtgtactccaaaggccagttctctttgaatgtgccgtttacctttccagattttgttaaccctgcggggaagagaatatctaaaagagaaaagatacaaattaatgtggatgctgttactggagttgagcttctgtgcaagacaataagccacccactgaaggaagtgaggcgtcatgctgggagtatgggcttcttatatgattccgatgttctctcatggtctaaagtcgattttagcttttcatatgctgtttcttcaagtcatataaatggtggtgttcttttggaatctgcatctgtgcaagattttgatgaaagagagatgttctacatgtatctttctcctggagatattcagagtcacaaggtattcaaaaaggacatcatattcattattgacatcagtggtagtatgcggggaaagctaattgaagacacaaagaatgcactattgactgctctctctaagcttaatcacgatgattcatttaatattttagcctttaatggagagacttatctattttccaaagcgatggatttggcttccggggatgctgttgaaagggccactgagtggattaacacgaactttattgctgggggtggtactaatatttctcatccgttaaacacggcaatagagatgctatccaatattcaaagttcagttccaatagttttcctagttacagatggaacagttgaagatgagagacaaatttgtgctatggtaaagaatcgaatgatcaatggagagtcaatatgccctcgaatttacacttttggcattggttcattctgcaatcattatttcttgcgaatgcttgcaatgattggtaggggccaatatgatgctgcattggatgtagatttgattgaacctcgaatgctgacattgtttgacaaagcttcatctctcattcttgcaaatatcaaaatggacacattggatgatcttgatgaccttgaggtataccctcctcatattcccgatctttcatcagagggtccattgattttatctggaagatacaggggaaattttcccaaaactcttaaagtcaaaggtatcttggctgatttcagtaattttgtagtagatatgaagatacaaaatgctaaggacattcctgtgcaaaagatttctgcaagagatcaaatagagcatcttactgctcaagcatggctcatggaaaataaacaactagaacaaaaggttgcaaaactgagcctgcagactggctttacgtctgagtatacacgaatgatgatacatgagactgatcatctaaagaaagtcaaggaatcatctggaccgaaagaagcgtcaaaaaagagcaatcctctattcgaggcacccgtccaaggccagagaatgattttactaccacatttaggtatcggcttcggcaacttaactgcaactgctgaaaatactcctccaggatttgaatcgaaattgcctgaagtgcccgaaatcttcaaggcagccacaaattgttttgaaaccttgtgcagttactgctgttgcatgtgctgcatccagtgctgtacccggataaacagccaatgtgcaaccgcattggcacaactctgcattggtctaggatgcttcggctgcatctcatgttgttcagatatatgctgttctggaaacgaaggctgaaatatcaattttgttgtatgattgttgtattttactgcatatagaaatcactgtttatatagtgttgtcattttgggaatgtatattgtgtttaatggggtgatttccttagttataaaaaaaaattgtatagtttttttttttttttattctgatgatagtcgtgcaagtttaaactcgcaatagataaattataccattgtattaacaaagaagaaagtgaactatacaaaaaccaagttttatctgcc

SEQ ID NO: 123954 - DNA, 309 bp, Glycine max
  Clone ID: PAT_MRT3847_82938C.1
caccccaaagagaccggtctcattattttctctcctattgataaagaaacagagagagagagaaaaaaatgccctgcggtaggagggcttaacaacgaccgggggcaaaggagtacccctggaagcctcactcctctttgagacggaaacatggattgttttcttcaaggggggggtaatcttcgggtaccatatcggaatttcaagtggggtgacatccatgggtgcgggggtgctcatgtttttcccagggggggtccggaagaagaattgcgacaaacgggggatccagtactgtgattacgacag

SEQ ID NO: 123955 - DNA, 2261 bp, Glycine max
  Clone ID: PAT_MRT3847_82939C.1
cgaattatatctacaatttctcgtttgtgacgaacgagaacgagagctatttcacatactccatgtataactcgtccatcatatcgcggttcgtgatggatgtctcggggcaggtcaagcaattcacgtggttggaaaattgctcagcagtggaacttgttttggtcgcagccgagacaacagtgtgaggtttatgcgttttgtggcgcgtttgggagctgcactgaaaattcaatgccgtattgtaactgtttacctggttttgagccgaaatcaccgtctgattggaatctggttgattactcaggtgggtgtgaaaggaaaaccatgttgcaatgcgagaatttgaatccctctaacggggataaggacgggtttgtagcaattccaaacattgcattacctaaacatgaacaatctgtgggatcagggaatgcaggggaatgtgaatcaatttgcttgaacaactgctcctgcaaagcttatgcatttgacagtaacgggtgttcaatttggtttgacaaccttctgaatttacaacagttatctcaagatgatagtagcggacaaactttgtatgtcaaacttgcagcatctgagtttcatgatgataaaagcaaaattgggatgatcattggtgtggttgtgggtgtggttggaggctatctattccctgagtggacttcaggtgtggctatcactggccaggactgatgtctacagctatggaatgatgcttttgggagtttgtgtcgggtaggagtacagagatttgcaaaatgcaacgaagaatttctctgagaaattgggaggaggagggtttggttctgttttcaaaggaacattgggtgattccagtggggtggcagtgaagaaattggaaagtattagccaaggagagaaacagttccgaacagaagttagcacaatagggacagtgcaacatgttaatctcgttaggctccgcggattctgctccgaaggtgccaaaaggttactagtttatgattacatgccaaatggctccttggatttccatttgttccataacaagaactctaaggtgttggactggaaaatgagataccaaattgcgttgggaactgcaaggggattgacttatcttcacgagaagtgtagagattgtatcatacactgtgatgtgaagccagaaaacattctcctagatgctgaattttgtcccaaggttgcagattttggcctggctaagcttgttggaagggatttcagcagggtcctcacaaccatgagaggaacaagaggctatcttgctccagagtggatttctggggtggctatcacagccaaagctgatgtgtacagctatggaatgatgctttttgagtttgtatcaggtaggaggaactctgagccatcagaagatggcaaagttaccttcttcccttcctttgcagcaaatgttgttgtccaaggtgacagtgttgctggcctgttggaccctagtttggagggtaatgctgagatcgaggaagtgactagaataataaaagttgcttcatggtgtattcaagacaatgaggctcaacggccaagcatgggtcaagtggttcaaatccttgaggggatcttggaggtgaatttgcctccaattccaaggtcccttcaagtgtttgttgataaccaggagagtttagttttctacactgaatcagactccacccaaagttcccaggtgaagagcaacgtctcaaagacctcctcttctcatgccataagtaacatctcttcagcaagctccaagtccttgggaggagaaaattagagggcatgtttatgtctttttttcttattcggtttttaccaatgtaattgtaatgtatggtgcaaatcactagattttattttccatgttagtttatttttcaatcaatatataatttgatatagctgttactgtattcaatgatatgatcaagatctggagaggtgtttggtgagatcagacaagatgttatcttggttatccagaggcctctccatctctggaattttctaacaggagaaagacacaaagtagatatgagtgcgaattttttaatttttctcattagaaatttccggttcaagaaaggagtatgctgtgaggaggggagtggtttgtgctacctattgtatcaaaatatgataggtttggtttctctctggtattttattatcttttattctgtaatgccatgctaaatgcctaaatttatgcaccccattttattttggtcttc

SEQ ID NO: 123956 - DNA, 1628 bp, Glycine max
  Clone ID: PAT_MRT3847_8293C.1
aatgcatggtgaccacactcatgggcaatgacccaaacaccagtaagaatgcaaccttggtcagcccaatagattggccatgccacgaaagagagaggaccgggaaggaggtgtaagtaatgggtggcaacataatagaggcacaaggctatggtgaggtcatacacaacatagtagaatgagcggagaacagagcgctggaaagccgtcaccactccaacacaggttctcttgagcgagatgaagtatttgtgccaaagcagaagtccagtatcatgtggtactctaaataccttaacaatccaccaggcagagtcctcactcttgccgtcaccctcacgcttggttggcccttgtacttggcttttaatgtttctggaaggccttatgatagatttgcttgccactatgacccttatggtcccatttactctgaccgagaacgacttcaaatatatatatcagatgcaggagtacttgcagtatgctatggccttttctgtcttgccatggcaaaagggcttgcctgggtggtgtgtgtttatggagttccattgcttgtggtcaatggatttttggtgttgattacatttttgcagcacactcaccctgcattgccacactacacttcctctgagtgggactggttgagaggagctttagcaacagtggatagagattatggaatcctgaacaaggtcttccataatattacagacactcatgtagctcatcacttgttctccacaatgccacattatcatgcaatggaggcgacaaaggcaataaagcccatcttgggagagtattatcggtttgatgggactccatttgtcaaggcaatgtggagagaggcaagagagtgtatttatgtggagccagatcaaagtactcagagcaaaggtgtattttggtacaacaataagttgtgatgattaatgtagccgggggcttcttgtccgtcaggtgggatggtttgaactttcctttgtgactgtttagtatcatgcttgcttattgggaataattttgttgaaccctgatgttggtagtagtatctagaaagtagcatagcgtttttgtttgcagaataagatatagcatctctgaacagtttgattattgcaccatgttttgcaatcagtgcatgtcgactaagtttctcaagattgtggggatgcttattcttgttccagttcttgaatccaagttgttatcatattctgttattgactcagaatctttaaccctttctgcttctttctcacgatcgtttgaagtcattactcgcaagccctttacctttctgcgcctctagtcaaatctgttctttcttggaataagtagctgatgctttatccaagcatggtctttccttagtagatagattgttttttattcagttccggtttttctttatgtaagacgtgctgatgtgttgtctacgaccttccctcgtgggttagttttcttcttaaagcttagttctacctcctttgaaggtggcctaatattccttactgatgttgtagcttaaacaatttcgttcttctaatagggaaaataaaataatgcttcaatgtgttgaaagtcaaaaggaataaagctactttgatcaatttttcctt

SEQ ID NO: 123957 - DNA, 292 bp, Glycine max
  Clone ID: PAT_MRT3847_82940C.1
gggccaaaagaaagggttttccccgatggaaattggggggttacaaattcccacaccgttttgaaacccccccgccccaccggctttttggccatttaattatggggaatgggacttggttaaaaaataattccccccacctttaccacaggaaaaaatctaacaatttttatattaaaggggtcctaatcaatggtggaccttgggggaaagggcgaacaaaaaaaaagcccccgcccaatattgcatcaaaaccccaggttactgggaaggggcaaattgggggagggga

SEQ ID NO: 123958 - DNA, 249 bp, Glycine max
  unsure (1)..(249): unsure at all n locations
  Clone ID: PAT_MRT3847_82941C.1
caaaaagaaagaatcccaggcgaggagaaagatggaggggaaggagcaggatgtgtcgttgggagcgaacaagttccccgagagacagccgttgggacngcagcgcaaaaccaagacgangcnaggataacaagagccggcccggcnccncngttgacccacgattacntanggtntttnaganagggtannagattgtgcantttcctgttnctctacatcaccgtcttaccgttatggagtccnggg

SEQ ID NO: 123959 - DNA, 158 bp, Glycine max
  Clone ID: PAT_MRT3847_82942C.1
ggtttttgttggtttactacacatttataatataattacaagaacaaccatggatgacctgtgtcaaacagtaataactggaatcaatgcatttaacagcagtcaaataatcaaaaaggattactggtggtagtgctcggaaatccaattgggggggg

SEQ ID NO: 123960 - DNA, 146 bp, Glycine max
  Clone ID: PAT_MRT3847_82943C.1
ggtaggcgtagctgctcacagattcgatgcgcatgcaccttgttttcgacatgcaggtctccggccaggtcccctgtggggatcacgtcagtctccacgtcgctgagtcagttgtgagtgacgctctatctggaggggcacgagcc

SEQ ID NO: 123961 - DNA, 402 bp, Glycine max
  Clone ID: PAT_MRT3847_82944C.1
cctaaacaagagatatgtgatatacgtgtgattgatgatgcacgcactgctgatcggatgcttaattggctcaacaagcaattatgcagtttatttggtctggatgatcagaaattgcaaaatgagcttttttcattcaatgtatcagaccctgggccgattgctagaactatatatgatgtcaaagaggcaacttctacagcttttgacatcatcttatagcacaagatgatgaaaccgggaactggtgcttcacttataaagattattcatcttttaacagctcatcatacttgtaagaaatgcccgaagggtactgctgaatttgttctgagccttgatgacttgtgccctacaaatgttcggtcaactaataaactggcatatgattataggtgaatt

SEQ ID NO: 123962 - DNA, 138 bp, Glycine max
  unsure (1)..(138): unsure at all n locations
  Clone ID: PAT_MRT3847_82945C.1
ccgggccgaccgcacgcgtccgaccacgcgtncnncacacatncggtttctgtttgaggatccaacttcataacaggtcatgcgtcctactttataagatcacttgcttganataatcttgtgttgctcacaaataaa

SEQ ID NO: 123963 - DNA, 770 bp, Glycine max
  unsure (1)..(770): unsure at all n locations
  Clone ID: PAT_MRT3847_82946C.1
cttgcatgcctgcataatcatgtttaactctgtcatacaacatgatttgttgcaactatatatggactcgttatattattcccaaaggatttcagctgaatgatttgaatggcatctgggtaatcttattactacggaatctaggagtatgattaaataattattatatatctaattatgtatactagaaaatataaattataataaggtacccccgctccctccctagcctcccaaataattcattaaaataaaaaataaaaatccactgacaacaaatgggtttcacaaactgattggtttggaaattgaaaacgaactcataaatcttcatgcatgatcttgaagaagctagcaaaacaaagtgaaaagaaaaagctgaatagaaaaagatggaggagaagctgaggcacacaaacacaaaaaccagaaaataaacatacatgaatagtgaattatatagttatatgtgtgttgtgtaccttgcaacttcttcccaaagtggacccttaagacttgaatctcgaaacacaacatccatatcggaccttatcttcaagagagccaaagtttcttggcggggccatctgtttccaccgcatgagttgttgatcttattgtcaccttcttcttcttctccaccaccctcttctaattttcctttattattatgattattattctcttcttcaccggaattcgcatccatcataatcacctcgccaccgccatgcgccgccacagcctcaccgnacgacgtttccatcact

SEQ ID NO: 123964 - DNA, 1077 bp, Glycine max
  Clone ID: PAT_MRT3847_82947C.1
cttaattttctcacataatgaatatttgttacagatactaaactagaaaaggttttgagttggtctgatcgtcacaaaatcataggaggaattgctcgaggaattttatatttacatgaacattctagacttaaagttatacatcgtgatcttaaacctagcaatgtattgttggacgaaaatatgaatccaaaaatttcagattttggtcttgctagaattgttgaaatagatcaacaggaaggaagtacaaatagaattattggaacatagtaagttttcaatactcattcctatgattttcatcccttgtaagatatatttaagcttatttgtcactttttcggttttcccataattttgcagtggctatatgtctccagagtatgctatgtttggacaattttcagacaaatcagatgtttatagctttggagttatgattctcgagattattagtggaaaaaagaatataggctcctacgaaccacatcgtgttgctgatggtcttctaaattttgtgagtgcaataatcttggaattttttattacttatgcttaatgtacaataaaatcaatataaaagtaggaaaatataatgatttggccaaatttacaaattgttacaggtttggagacattggaaggatgaaacaccattgaacacattggaccccaaattaagagataattattctaacattgaagtcatcaaatgcattcgaattggtttattatgtgttcaagaaaatccggatgctagacctacaatgttgacaattgtctcatatctcagtagtcactcaatagagttgccatctccacaagagccaacatttttcttataccatagaatggatccaactgttgcacatgaatcaagttcgaggcaatctaccaataattccataccatcatctataaatgaaatgtctataagtaaattttatcctcgatagtttattttttaatatcattatttaatcatgttttaatatattataaaatattattggacacttaattatgatgtagaggtcaaattatgaagtatataaatgtgttttgagttttctc

SEQ ID NO: 123965 - DNA, 128 bp, Glycine max
  Clone ID: PAT_MRT3847_82948C.1
ttttcttttataaaaagagggccacattcctaaaaggaaccatctcctttctttaataacccttaaaggttcataaaaaatggacctatgggaggttcaatgtgtccctaataactacattaagtggc

SEQ ID NO: 123966 - DNA, 201 bp, Glycine max
  Clone ID: PAT_MRT3847_82949C.1
tcggctcgaggtggtacatgagtggtttttgagcggaagagttaacagggcctgggattcatcgacgatgacatcggttggtgtggcaccaactatcgggttcttgagaatcaagtgggctcgattcagcatgtgctgctagattgactctggtgatcaacgatatgataattaggggtcatacagagatgtcagccacat

SEQ ID NO: 123967 - DNA, 558 bp, Glycine max
  Clone ID: PAT_MRT3847_8294C.1
tgtttgttggtggtgcagctattggtgtattgtggggcataaagccaagaaccgaaaattgaagctgatagtcgaggaaggctacctgtgtttctttagtgtaatatatttttgtagtattgatatatattggcttccatgtttatttttcttattagttttcagtgtaacatagtatttatacattagttaaaaattggtttgcacaaggatggaagtcagtattattggtttggtctcaacctggctggttcaagaggaatcaatcatctgatggtagaatctcactcttttagtcattaagatgataaaggatggctgcttagacacccacctgagtccgcccgactagtcaaatctgttctttcttggaatcacgtattattcagagaggccaaccaagtagctgatgctttatccaaacatggtctttccttggtactactgatagcattgttttttttttattcagttccgtcttttctttctgttaatatatgtgctgatgtatattgtctacgaccttccctcgtgggttttaataacagttttcttctt

SEQ ID NO: 123968 - DNA, 226 bp, Glycine max
  Clone ID: PAT_MRT3847_82950C.1
aggagcatatgatatacattattggaagggtatagttttttaactgggtcggcacaccaaagatcttattgattaatagggatctatagatgcttcacaaccacgcgccacttttttggtatttctggaacacgtatttaacccatatttcttggggggggggcgcttcatacttttttttaatgcacaaactttgcccggggaggggtgaaaaccacctggggcc

SEQ ID NO: 123969 - DNA, 172 bp, Glycine max
  Clone ID: PAT_MRT3847_82951C.1
aaacagtacgcactgcaaatgctgactaataacatagtgagctaggttatacgctctagagacagaagtccatgaatcgttataagatcatgaatggagacaatgttgcaacaacaagaaaagaattggaatagcaaacccctggagaagaaactaatttttctattgggag

SEQ ID NO: 123970 - DNA, 535 bp, Glycine max
  Clone ID: PAT_MRT3847_82952C.1
atgtacttgggatagaaattaaatttatcagcaggtgtgtggggtgcagccattagttactgttccctgttgttgatagaaatgcagagaacataagagcaaaacctcaaaagtctgacatctatactctgtgtatgtttatacaatgcataaactttataccagtaacatcattaaaaatcttcttgttagaattagaaaaaaatagtctcagtaagataaaatgttgatcacattagctccccttataatgtaggaaattttgtttgagatcttgaacaagcatttaattggccaaatttgcctctggaagtctatcctatgtcaaattagtttgcaatccttggggttaatttgtcttaacgaaattctatcaatggacctcagactacagtggaattttcggcaacccgagattaatattctgtacctttctaattattggaaacgaatagagaaaggtcgtgttaaactgaaattctatctggcgattgctttctttactgtctctttgcaactatttctttccttattg

SEQ ID NO: 123971 - DNA, 366 bp, Glycine max
  Clone ID: PAT_MRT3847_82953C.1
ggggttgttaacggagcatatttttgtttactttgtagaaaatgacgaagaagtgttatacacccactattatacagcatattatagagtcttggacacccccatataattctatctattatatcatgcgtattacacataccaagtcgcatataatgagtggtgtgtgataaaatctcactctttattattatgagatttagaacataacacaccctctgggattttctttgtgaatggagacatataaactctgagaatactgtgaggtgttatgatattaaagggggtatggggcatatggatttataggggcacgggctttttgcgtgggtcacaattttctttgtatatttcttccggctg

SEQ ID NO: 123972 - DNA, 944 bp, Glycine max
  Clone ID: PAT_MRT3847_82954C.1
aacttcttatccatttcagcacaaattctcttggttttaccccagagtttttgggacgtgtcaagcttgttacctcaattgcatctctgctcggtgttggtctttataatggatttctgaagaatgtgcctttacggaaaatattttttgcaactacccttttaggttcaactcttgggatgactcaggttttccttgttactggactaaaccgtaagtttggcattagtgatgagtggtttgcaattggtgattcattaattctcactgttttgagtcaggcttctttcatgcctgttcttgtgctagcagcaagattatgtcccgaaggaatggaggcaactcttttcgcaactctcatgtctgtatctaatggagggagtgttgttgggggattgttaggggcgggattgactcaactatttggaattaccaaggacagatttgataacttggcagctttgataatcctttgcaatcttagctcattattgcctctgcctcttcttggccttctccctgggggcaatcctgatgtgaatgaggaggacaattccgatattgagatgaaataaattctttgtatatatatggtatgatgctaaagttgctaccaaggccttgttttatcatgccatccagttcacttcaaactaaaacagactgattttgtgaagaaagaaccttctacacaatatgctttggagcaactcaagacagtgctaaccatcaacgaaagtatcagtctcgtcagaactcagaattatcattcacggggttgttttgtagtgtactttctcctttttgtttaatcatgtacccctttacttctttgtaagaactcgggctttgtatttattagccaataattgtcattcgacaatgggaaccgagttttaggcctcggacgagtttgtataagctattgttattggcaatttcct

SEQ ID NO: 123973 - DNA, 2318 bp, Glycine max
  Clone ID: PAT_MRT3847_82955C.1
tcttgatttttgttccgctgaattaacattaacatgattgaaatttgaatattttgttttgattcattggagatttgatttttgaatttctgtggctcgttaatttattaacggcaataaatattattactactaccttatagtaaaatgaattgtgtgtatattttgtctttaataccatatttaccctccaatttttccaactattatccttctcttccacgccgcacgccaattgtcactcattcagcgcgattccgccggagaacgcgtcggaatccgccggaaatggaaatctccggcactgttccgagctcggggtcctctttccgactcagcagcgatgatggcgaccctttgttaggttctcgtatcggagctggaacagatgatggtgatgctttaacaacggaaacagatccagaggtttcgtcctctagtagaattgctgccagaaagaacaaatatcgtacgagcagcatcaaattgtttggggtagaattatcccctgataatgttgctgttgcgatggtgtattttgttcaaggtgttttagggcttgcaagactggctgtgaacttttacttaaaagatgatttgcatttggaccctgctgaggcagctgtgctttctggtttttctgcattgccgtggcttgtcaaacctctttacgggtttattagtgattctgtcccgctctttggttatcgaagaaggtcatacctagttttgtcagggctgcttggtgcgctctcatggagtctgatggctacttctgatgacaacaggtatagagctggtttctgcatacttctcgtatctctctctgttgcctgtgcggatcatcaacgaaagtatcagtctcgtcagaactcggaattatcattcatggggttgttttgtagtgtactttctcctttttgtttaatcatgtaccccttgtgagctcctacttcagtggatctttgttggatgcatacagaataaggtttgtttttggtgtcacatcattgcttccgttgataacatctgtagttgccgttcttgtaaaagaacaacctatgattggtacagcaagagggctaaatcttcttttttccgggccagagtttttggaaagttcaaaacagcgcattattcagctgtggggttctgtacgacagcgtagtgtttttcttcctactttgtttattttcttgtggcaagcaaccccgcagtctgactctgctatgttctactttaccacaaattctcttggttttactcctgagtttttgggacgtgtcaagcttgttacctcaattgcgtctctgcttggtgttggtctttataatggatttctgaagaatgtgcctttacgaaaagtattttttgcaactacacttttaggttcaacgcttgggatgactcaggttttcctcgttactggactaaaccggaagtttggcattagtgatgagtggtttgcaattggtgattcattaattctcactgttttgagtcaggcttctttcatgcctgttcttgtgctagcagcaagattatgtcctgaaggaatggaggcaactctttttgcaactctcatgtctgtatctaatggagggagtgttgttgggggattgttaggggcgggcttgactcaactatttggaattaccaaggacagatttgataacttagcagctttgataatcctttgcaatcttagctcattattgcctctgcctcttcttggccttctccctgggggcaatcctgatatgaatgaggaggacaattccgatattgagatgaaatgtaattgattttggttgtttgcccctggcttttcgtggacttgtctgtctttgtccagctatacccaagttttgctctcattgctttgcaaatctaacagacatcacttacacatgcagaaaattttgtatatatgtagtatgatgctaaagttgctaccaaggccttattttatcatgacatccagttcacttcaaaactaaaacggactgattttatggagaaagaaccttgtgcacaatatgctctggagtaactcaagacagtgctaacttatcgatgacagaatatcagtctcggcagaactcagaactatcacaggttcttttgtaacgtactttctcctttttgtttaatcatgtacctctttacttctttgcaagaactcgggctttgtacttattagccaataattgtcatttggcaatgggaaccgagttttaggcctcggacgtgtttgtataagctattgtcattggcaatttcctatatcagacaacaggcaatttgtttttcttgtt

SEQ ID NO: 123974 - DNA, 1018 bp, Glycine max
  Clone ID: PAT_MRT3847_82956C.1
cacttggggaggctgcacacccaagcaaaagcggagaaacttcgagcagctgcaaaatcatgttatctgctattgcctttggattctcagcgaattggtggttgcgctgtcacgggcgaacgcctcctcctttatcttttccggtttcagtgtcttattcttcctctttcaactccaactcaactaagttcaactatattcatagagcatcctctgaaggacttcctaatgagttggttgaagactcaaaatttgttcctttgaatgaggaggatcctatatatggtccacctgccttattgttgttgggctttgaagcagatgaagctttgaagattcgacagcttttgaaagagttggatggtgaattcctaaaggtcatctattgtactgaagacatgattatgcgttcgctttgggaggcaatgcatacaacacaacccaatgtagaagatgtcaagatagccaagtcacttcctcggatatgcttcttatctggtttaagtggagaggagatgatgatgttcatagattctttccccgaaactggactaaaaccagctgcatttgcggcacttgttccgaacagtgctaataaaccactggaggagttgatagatgaaataatgggagaccatgagatgttgactggagaacagctatgaagagattggaaaagagatctgatctgattgaaaccaacaattttttgcagtatcagggcatcaaactatgcattataaaatataaatcccaatctactgaggattttaagtatatgaaatactgtcttttgtgacgcaagttagcaactgattgttcctaactgtttaattagtacttaattggatattcttttgttactgcctacttgaaaacatggaaggaatcataaaatataaatcccaatctactgaggattttaagtatatgaaatactgtcttttgtgacgcaagttagcaactgattgttcctaactgtttaattagtacttaattggatattcttttgttactg

SEQ ID NO: 123975 - DNA, 522 bp, Glycine max
  Clone ID: PAT_MRT3847_82957C.1
tgccgggagatttgccgtgctgcatgtgatgacgtcctccttgctttgggggggggggggggggggggggggggggggggggtaactcacctagaatgtgcgttgtacgggagagagagagagagagagagagccgtgtcgcacgtagttcagtagatgggtttgggtaggggagacgatagagaagtagagattagcgggccaaagccaaaaaaaagaaacaaaagtacaacttgaaaaggtaaaggggataaaacggagacgaaacataaagttacgaagccatagtaaaacatacgactgcccaataacgttgtaaggtggcccctgcctgaggccgaaagaaaaacacaacttaaagttataaaacttgcagagttagcatgttgctggtgacgcacacaacggtacgaagtggtaggcggtgagccctactagcactacctacctataaaattacgagacgatgccgtaaggtcaggagggagtgggcgagagaacgggtatgtacccacagttgga

SEQ ID NO: 123976 - DNA, 527 bp, Glycine max
  Clone ID: PAT_MRT3847_82958C.1
ggggaaaaaatgaggggctttgatgttgcatatgtttatgttatgttgcagggtcataaagtagtttgtttaggtttaaatatttcacgtgatgtcctattttgatatcgggcattttagcttttggcctttgaaatgtgaaaattttacaagtattttcataattaaattaataaaaattttaaatgaatttaaaaaactctttcgcttgagttagttcctagttccatgtaacaggggggggtcgttacaataaacacaaaacctaaatttgtagataaacaaacattctcctttgtctgctcatcatccccaaaagaacatcaaacaatttcccacataggagaaacatgtttgattaggtggttaaggtttaataacacccaaaaataatcttttcaaatttaggcatactagaggaggagtgattcataaatttgaaaaagaagatgaaaaaattattaaaatatgagaagaggaagagacaaacgttgagatgaaagagaaatgacaacaataagaagaaa

SEQ ID NO: 123977 - DNA, 435 bp, Glycine max
  Clone ID: PAT_MRT3847_82959C.1
ccccatgataaaaaaaaaaaaaaaggggtccaatcaaaaataaaccggccaattaacctcccttttttttgaacccaattaaccaattttccttccgatgaatcggggggagcgggatgaaaataaaaccttaatttgattgacttacatatttgtttacctttggacaaggccttaacgtatttttgggagcccctttttttttccccccgatggatttaggatcatgatctttggggcagtgacaagacgttttataacttcaacttgggctcgcagggattgtatataatctagggtttcttcaaccaaaaacacagcgcccatggattctcctcctggaaagaaacttttgagccttcgcgttcttttttggaccagcctttttgaaacaaaactcgccgccaccaccctatcctttgttctgcaggggac

SEQ ID NO: 123978 - DNA, 228 bp, Glycine max
  Clone ID: PAT_MRT3847_8295C.1
cgttacaaaaaaaaaaaaaccacctcaacacataaaaatgactgaacagaattttttcctcgccatgggcgggggggggaagcaaaagcaccgcacaaaaggggggggtaaaaaaccccaaccccatgacatgctttacagtggcatatccatgcggaaattgccccccccggggtattaaaaaaatgccacacctttgtttccaaatttttaaacaccctttgttct

SEQ ID NO: 123979 - DNA, 444 bp, Glycine max
  Clone ID: PAT_MRT3847_82960C.1
cttctgtctatacactctatcttctcttcacgagctcttgagattttaaaaacccattaaggggggatctcaccgcgagtttttgcgcaatgccgttactatgaatctagcaccgaattagatttgatacactatctacaaccacatcgctagagataaaaacccttacttcttcaaatggagtcggtgccgtcaactccgcacaggggtggcacatactctcccaagacggcagagtatctgatctgaactttcttcggcgacacgcccttcccactctcatcgaagttctggcagacattgctggagctttatctcaatgatcaatggtccactcagcgtcgttaacacgcttgctagctattaaccaaaaacaattgtcacaccatgcatcttgcgaagattttgttacatctagcgtgctgcttgcaaaagtacatgtct

SEQ ID NO: 123980 - DNA, 464 bp, Glycine max
  Clone ID: PAT_MRT3847_82961C.1
tttggacttcccacttgtccgataagaccggcggacgagaaggggaggagccatagggagtcagcacgcggcagggacaaagccgcacgggcaaagagcacaccgccccgagcacaaaccaccagcgagagcaaggcgcaacacaagaagcaaccacaaaccggcacaagcaacgggacacgggacaccaccacactgcaaacaaccctaaaggagaagaagctacccataagagaaggaagagatgcacacaagatgctggctaggaatgaaccaactagtagcacactggtaactctggagctgatggcaaactcacaagtcctgggaaagcatagggagaaaaagaccgagtagttaatcgatcgtttggtaaacaaacgaggaaagggttgcttgtcaggaccttttccattaacaaccaccctgacactgttactatagaatcgaatttattaaaactt

SEQ ID NO: 123981 - DNA, 1234 bp, Glycine max
  Clone ID: PAT_MRT3847_82962C.1
ctggtcccgtcgaggaagaacgagtgagtgtgtagttgaaagaatgctatgttgatgatgacacatggatgatggatcatggatcatggatcatggatggatgattaagatttttcttcaacacaagggaaggtagcaaatagaaaaaagcacctcaatttgtgaaagcattgcttgcagtacataagcactaacaacacagtgtgtggatatatctattacatataaactaggtagcgtagtagtactattattactaaacttgttacatcaaaaaaacaaatggagacacacgctgagataagggtgtcaaagttcaagagggtttgtgtcttctgtggtagtagccctggcaaaaagagaagctaccaagatgctgccattgaacttggcaatgaattggtctcaaggaacattgatctggtctatggaggaggaagcattggtttgatgggtttggtttcccaagctgttcatgatggtggtaggcatgtcataggagttattcccaagacactcatgcctcgagagctaactggtgaaacagtgggagaagtaaaagctgtagctgatatgcaccaaaggaaggcagagatggctaagcattcagatgcctttattgccttaccaggtggttatgggactctagaggagcttcttgaagtcataacctgggctcaacttgggatccatgacaaaccggtgggattggtaaatgttgatggatacttcaattcattgctatcatttattgacaaagctgtagaggagggatttattagtcctaatgcccgccacattattgtgtcagcaccaacatcaaaagagttagtaaagaaattggaggattacgttccgtgtcatgaaagtgttgcttctaagttgagctggcagatagaacaacaactcacttaccctgaagagtatgacatctcgaggtagctgaatttgcttcaagggcacggaagatgacactagatagaattttggaggtggaagaagctaggctggaatatcagtattctgtttttgtttttacttttaaagaaaaaaaaagaaaagaaatttcttttgtaaagtactgggattgatctggatatgtgaaattactttgttcccttgtgaaactgatttccttttaagttgtaagtattaggggcttctcaacttattactctacctacctcaactaattttaattttaaatgatatttaatgtactttgactttaaaa

SEQ ID NO: 123982 - DNA, 227 bp, Glycine max
  Clone ID: PAT_MRT3847_82963C.1
aaagagaactttttgatcatcaaccatccagggatttaagacgaaaggaacaagtccaacccttgaaagtgattttggaagaaaacacacggaaggaaaaccttccacagaagaagattccagagaaatttaataatacacaattttttttttttttattttcatttccccccctttagaaaccaggggggggaagcctcttaagggtgtggctgataaaaacaacc

SEQ ID NO: 123983 - DNA, 248 bp, Glycine max
  Clone ID: PAT_MRT3847_82964C.1
ctgaagtattctcgtcctacccaaagcatatttataggaagctatagaactttgctgagtctttgcttcttttatggggggaaaaggggtgtgtacctttatttgggggtggtcttaattattcttaataatgccattcttcgacccctttttttcttttggtttggcattgctactatttatttttacccttttattaagatatgcatatatcactcaataaccaagttgtccagtaattttttcca

SEQ ID NO: 123984 - DNA, 258 bp, Glycine max
  Clone ID: PAT_MRT3847_82965C.1
tttttttttttttttttttctttttcttttttttttttttttttttttttttttttttttttttttcaaaaaaaaaaataataaaaatgaccaattttgttaaaagcaaattactggccactgaccttttatttcttgttttatttggcccccctaagataaaaaacaaagcctaaagggctttcctccatttaaaaaagcctttagtttttttagccatctttggacttgcaaggtgtgtaacaaaaatctttggtg

SEQ ID NO: 123985 - DNA, 299 bp, Glycine max
  Clone ID: PAT_MRT3847_82966C.1
ggctcgagagaaccctgatcacgccccacatacggaccgttacagccgttcatgtcaatctgtgggcacagaggtgtctgtgctttccaagagctgtttgctatggacgtgcatgatagaacaccacgttcagccgaagccgtggcactcgacgggcctgctaccgaggaagcaagaaaggttgccgttcagaacctcagcgatcccgccccgcgcaaagcatgggaactagcgccccatgctcattactagatgtctcaggctgattaggctctggatctacagacggtgctggactg

SEQ ID NO: 123986 - DNA, 330 bp, Glycine max
  unsure (1)..(330): unsure at all n locations
  Clone ID: PAT_MRT3847_82967C.1
aaacaagttcctcttgtctttggttttgcttgcattgatcattttctgccaagggttccactccattgagggaaggtatctcaagtctggtgaaaccatcaaacatcaaatgcatagtggcatttcaacaacaaatgtagctgacgtgtctccaccaacgccaccctccgcggcggttccaggtcgtgacgttgataattttagacccaccgcaccgggtcacagccccggagttggacacaccgttcacaataaatttatatataatgcctcaagctttagtgcgtgagtgttatatatgtangtcattggatantaaggtggatttca

SEQ ID NO: 123987 - DNA, 490 bp, Glycine max
  Clone ID: PAT_MRT3847_82968C.1
cagttaggtttgaatgtgtataatcttctgcaagctatctaaaccccttgctgctagccaacttatagtggcttccctctttccctgttagtgcacatgtacaacggcagtttattagtttgtcagatttttatatcaacattttaactgctaacactttccaggtcaagttacagatcatgttatgcttcactcaatttaatgttaagaatttaaatatcaatctaagttcctaattggtttactttgtttctaagacatgaaatcatgtaaatattactgaaatttcagagcatcaggggtccaagctggaaaatatggttcaaaataagatgtctactgaggactaatgactgtgtttcagatatcttgctagtgaagcgtccatttggtgttttctgtagtttttgattattggataacatatatgaccatagaatataaatacaattcctctagcgcccaatacttacctgtatgtgaatttcag

SEQ ID NO: 123988 - DNA, 322 bp, Glycine max
  Clone ID: PAT_MRT3847_82969C.1
cccccacgcatagggcgacgcgtgggggcttgtttacgggttgctctgcattttctcactcagacagaggaaaaactgtcaaatctgatataggtggggctggtacacattatgcagaagactctcctgaaaaggaagatcaagagaaacccataaagattgatgccagattgagactatgtagagatcctcaatacattgaggttcaggctcagatggcaacataatcgattaaattgtacattgaagatgttggaactcctaaaggtcgcatggtggatcctaaaatttttcaatctaaaatcgcacttcccaagaacac

SEQ ID NO: 123989 - DNA, 487 bp, Glycine max
  Clone ID: PAT_MRT3847_8296C.1
agggcccaaaaaaaaaaaccttaagggaatggggtttcaagggggcccaacttaaatggtttttttcaacaacaacaaaaaaatcttaattgggggggcaaaacccctagttttttttgcctccccccctaccgaaaaaaacaaaatcatccccgggggtttcaaattaaaaatgattgacttgggcattttgggccccaatttgatttttagcaaaaccttcaaaaattggggggcaaaaacccttttcctttccatggaattcgccaaatcgggaaaacaacttttggggtcgggggagcttcttttcaaaacggggatttataaaaacccaaggcccttggaaaagaatggggggcaaaaggaacttgcccaattgccaagttttataaagctggaaacaatgttctacccattggtgcaacaacttttcggcccccggggggggggaagcttaaatggccacccgcaacttttgagtccccgg

SEQ ID NO: 123990 - DNA, 668 bp, Glycine max
  unsure (1)..(668): unsure at all n locations
  Clone ID: PAT_MRT3847_82970C.1
ggtggagaatgggtggagtttgcgccggggagggcgtgagagtatggagtggagcatttggcaaataccaactggcaacaacaaaacgaagtgtgaactgaactctgaagtcaatctcagttatgctcttttttttggaaaacagccatggttgatgccgtcacaaatttagtctttaaaaaatcaaattagtcttgtttgtgagaataatttatcattaaggtgtatagttgaatgattaatttgataataagtttattttttaaagattaatgtgttacgactaatttgtcgaacgttttgtgcatcctgaaattaaatttgtattctttcatttttaaggaactattctgtcaaactaaatatttattgaaagaaaagctactggcacaacatgcccttttcattacggttgcatttattgggagattttgtagttgctaatagagcatcaatattgtaattcacaaaaatcgagcgtgctgcatcagggatcaataatttttttttacaaacttaagaagaaactaacaaatcaattatacagttagttatataacaattgaatcacttgatcaaggggacacttcgtgctgcatggatcttancctcttactatctatagactgtagaacccatgtcatacaagtgaataagatgatctcccc

SEQ ID NO: 123991 - DNA, 386 bp, Glycine max
  Clone ID: PAT_MRT3847_82971C.1
cccacgcgtttattcactctgccgtatacaaaccttgtgaaaatggtgctgtttcaaaagacgactgattccttgactgcaaaaagcgtgtccctatatctgatcctctctgatgactaagcaaaatggaagcataggaagagtgagaatattatctgagatagggctgtcacaaagattcaaatgatccaaagatgtctaccgattatatgcaactattccggagagaaaaaccgacaatgtctgagaaaagtgatgacgctccttctaaggcacgaattctaggtaacatgcaatactttcatgagactgtgaataaggcacaaatggttgtctatgttcaagacactctggagcctaaagaactcgcttagctcgacccagat

SEQ ID NO: 123992 - DNA, 380 bp, Glycine max
  Clone ID: PAT_MRT3847_82972C.1
aattcggctcgagtacggctgcgagaagacgacagaaggggggtcaacacaactcactagagtatgatccatttttcccctttaattgattatttgttagattaatagcaatggctgggactatagcaaccactagtgtcaggtggattcagcaaggaaacaaatgatctccattatttgtcttcctcatatttgtcatttgcagaggtttcaacatgtctcacatgcatattacttgaccgtgtcccatacatattccttagagaaagcagaatgattatgtcctttttgtgcaaatgggaattttattagacaaaacacatgaatgtgaatggtgttatcagaggacacgtcgtttgattttgtctcttctacacaaa

SEQ ID NO: 123993 - DNA, 454 bp, Glycine max
  unsure (1)..(454): unsure at all n locations
  Clone ID: PAT_MRT3847_82973C.1
tgttgaactcccattttactatgatcctatttgatactttatgccatgtaaatccctgatcaagttagcaatggatttaggatgataaattaatgtgtaaatttgcaaaaattatacaaattagtgtttaggctatctgtcatgaaaacatacattcaaaaatgaaatctacacatgtttctaatttctctttgatttttgtttttcctcttcgcatggtgggatatacaggttttgttgatgtttgttttgtttttcttctcgtgagagtttgtatatcacaatatgcttttggattgattactgaaagctgtgtgattcaaatgatggcataagtagaaaaattggtggaaagatgtcattttatttaagtctgatttttgcccttgctcaagtaatccatttttctatttaatttctgatcattattcttaanatgatttcaattgataat

SEQ ID NO: 123994 - DNA, 511 bp, Glycine max
  Clone ID: PAT_MRT3847_82974C.1
ggctcgagcaaattttgtaaccttgtcatgaatgattctctttttgatcaactctctagcattcaaagtctttatccagcttatacagtttgttacctcaccaataggttattggcttatattaataaaaaggaacaggaaaaatataagaaccctgagaacaatagttgttggagacgtccacctgtagaggaggttgaataactggccctttcattttcaaattacaaggaataggtcatgttttaaatttttaccttcttgttcaaacatgtctatcatttttgttttaaattgccctgtaggttctggcaaaactaacgactaatttcaacaaagtacactccaggcagtgtgcagatgaggctgaactggctgaacatgttgtcggtttgacatgtagcctagcatcttgtcagtttagaaagaagttatcccgattgtctgtaaatgcaaatggagcccttattccaaaggactacgttgaccggaatttgataaagaaatcttt

SEQ ID NO: 123995 - DNA, 569 bp, Glycine max
  Clone ID: PAT_MRT3847_82975C.1
tttcacctcaacttttatgtttttttactagaattcagactgtacaaccggccccagggcctgaatcactctgtgccttgtctcaaaccaactatggtgaaacaaacatggcggatagtggtctcacctaccatatgcctgttccacagaaaacgttcagtagatgtcaccaccgagtgaacctctttcccatcttaccagaagaacaatatggcctctgagtctcccgtgctgaacgaagagattctgtaccaatatcagaacaaacactgataaattgaacgaggccttgctcatcatactgacagagtgagaactgaagtggaggaacaaaaaatgaagcaatcaaagatgttggtgagcgctatccaagatgcaatggcgaataaactgaaggaaaaagacgaaaagattcagcgtatggagaacctgaaacgggccctcaaagaaagaatataaagcatgtgcttggaaaaccaaattagtggggaattgccacaaacgaacgaagccacacccaactacctcagaagcaatgaggaacaagtcttggcacatgttggcgagga

SEQ ID NO: 123996 - DNA, 264 bp, Glycine max
  Clone ID: PAT_MRT3847_82976C.1
gggtctacaagaggctggctgggcaaggcattcttccggtctggaaggaagaggagggggaggaggaggcctcgaagtagtagattgcgcaggcgcatacgcatacacatacacacagggtgctgccgtgaacatacacatgtaacgctgtaaagttcatctgctagtaaaagttcatctgctgtgaacatacacatgtaacacagatacttcagtttcagcagttaaaaacctaccgtcggtattcttctggtgtgagatgcg

SEQ ID NO: 123997 - DNA, 346 bp, Glycine max
  Clone ID: PAT_MRT3847_82977C.1
ccacgcgtccggtcaccgttgcaactacgcctactcaactctctctgctgtatttctactttacaggacattaacgagatacgacggattatacttttctatttaccctacagcaactgtacgatggacaccctgacgggccctgcctctaattcgcgcttgcatgttcttgtatcattgccttgaacaagacctgaactggacggtgggctgggcttcatgcacgacgaccactacgccgatggttcttgatgaagatcaccacgcaaggctcacacctggtgttccagaagatcgatcgtgtcatcttgagagaacgtgggcttccagacacactatgtaggac

SEQ ID NO: 123998 - DNA, 396 bp, Glycine max
  Clone ID: PAT_MRT3847_82978C.1
tctctttctttattttttttttttttttttttcactcacttttctttacttcttcttcttctctataccttgctcttagccggcttccacaccttaaccttaaggaaaagacagctttctatgacaaaacacatgcttttcgggaaaaacaattaactccccccctttttctcaggccctacaacacctaccaaaaaacaaacggagcgcaattaaacaacctctccgccgaaaaaaagcatcgaacaaaacaaaaaagccgggtggtttcctcaaacccgttaaataaaaaaacgtgttggggcaccaaaacttccttacaaaaaaaaaactttttgggggaaaaagatccttttaaaaaaaatttttttaaaaagaaaaagcctctggggaaaa

SEQ ID NO: 123999 - DNA, 157 bp, Glycine max
  Clone ID: PAT_MRT3847_82979C.1
gtcatgtatggatatccaccacgccacttcggtatcaccactcaaacagctatctcagtacctgatctagcatcttggattcaggagcgcgagttgatgcaaaagctaatcaaacagcatctactccgggctcaagaccgcatgaagaaccaggctg

SEQ ID NO: 124000 - DNA, 150 bp, Glycine max
  Clone ID: PAT_MRT3847_8297C.1
ctcacacttactgctagctaagctctttaatctaaaaaatccagagctgactatgacgtggacggtttcaatggaagggggagcaccatagtcaccatggccatgccatatgtcaactctacaaatgtcatgtcatcaaaagaaaaccct

SEQ ID NO: 124001 - DNA, 351 bp, Glycine max
  Clone ID: PAT_MRT3847_82980C.1
cccacgcgtacgaggaagaccaataaagtttttacctacattgtttgcaacggtggacggggacaatgcatgcaggtgtgggctcaaattggcacgaagaaaagcgagactctatgctacttgccagacctagaagatgccaagttgtcaaaggaagtcgaataccttcaacggacaggatggacttcttgcttggaattcaagctggagcactgttacgtgcaccgggagtacaacaggtcacctggatactatgatggacgctactggaccatgtggaatctgtctatgtcgggctacactaatgcttcataagtgttgaaggaccttaaagaagctacgactgcatac

SEQ ID NO: 124002 - DNA, 374 bp, Glycine max
  unsure (1)..(374): unsure at all n locations
  Clone ID: PAT_MRT3847_82981C.1
ccagcatacacccacctcggattcatccaacctccgcgtcttgcgactgccttggcatcactgggcttcaacaacagaggtactctgccgcggcagttacatgcacactgccacaaactactcccggagcatctgtgcagcggtctggttctccattgtgagaactgccctcacagcgttgcttcgcggcggtcggtcgcggctagtgctgtgaactttgctcggctggtttcagcggctggtctgcttgccatcgcgactgaaaggcccttggaaatttcctgctttggcttgtcagaacttggcgctcacatctgctcctggttggtctctgcagcgggctgttctccaacgcgagtactcccctncgagcc

SEQ ID NO: 124003 - DNA, 1211 bp, Glycine max
  Clone ID: PAT_MRT3847_82982C.1
aattcggctcgagctgaggtgcaataaggttatgagtgctgttttctcttcttgaacttctctttaatcctcagatcctggattaaaggaaaaacataaacatcagccagaaaattcctgagccttgttttacatctttcttcaggaaggaaaagaagaagcaaaatgtcattcacaggaactacagataaatgcaaggcttgtgataagactgtttatgtggttgacatgttaactcttgaaggtataccttaccataaaaactgcttcagatgcagtcactgcaagggatacctaacgatgaacacctactcctcaatggatggtgtcctctattgcaagccacactttgaacagcttttcaaggaatctggcaatttcagcaagaactttcaaacagcaaagtcttctgataaacaaaatgagacgaataaggcccccaacagactgtcatccatgttcagtggaactctagacaaatgctcagtttgttcaaaacagtctatcctctggaaaagatgacactggaaggggaatgctatcacaagaattgctttaggtgtgctcatgcaggttgccacctcacacattcctcttatgctgccctggatggtgtcctctactgtaggcaccatttccaacagcttttcatggagaaagggaactatcatcatgtactccaatctgctaaccacaagaagaatgtcactcctgaacctgctgaacctgcagctgaaggagatgaagagccaccaaagccagaagaatctgattctgaggaacacacagaagaaaagcctcaaaatgaagcataggacatgagctgcttcctccctttctttcaggatcctactatatataaaaaggtgtcttttgttagagtgttgttggcacactcttttgtctggttgaattccactgtctaacatttctttttacaaattagtttaattgtaagctaatttgagaggtttattatgtatttaaacaaagagttgttaaatacaatatattttttacccttttgttggaggtttttctcctgcagtgatatgatatcatatcactactgtgtaataacataagggacacagtctcatattgttcaccaatttgtctgccgatttgcacttcaacccaatatataatatatattagtattttagtttaaaaaaaaaaaacaaaacaaaaaaaaaaaaaacccacccaaa

SEQ ID NO: 124004 - DNA, 255 bp, Glycine max
  Clone ID: PAT_MRT3847_82983C.1
aaaaaaatcagatcatgttactttggtcatttcacactctgctaagcaccagggcagaggaccatatatatggacacatactaaaaattggaccatcactcttgaatctcctcaaagacgatccaaccccatgattcctaaaagattgcaatcttctcactacaagattcctaacaaaactgtttcctaacacaatattacaaattaaggtcgatacatatccaaatatacaaatcattccgctctattcataaa

SEQ ID NO: 124005 - DNA, 158 bp, Glycine max
  unsure (1)..(158): unsure at all n locations
  Clone ID: PAT_MRT3847_82984C.1
ttaatgaaattgtattgtatgcaatcagngaatatttttttctggttactctttgatgagtagatatttttaactttgctcataatgatagagacacattggcttccattttcatgtccttgatctaactgtttgattaaattatttacctcccacac

SEQ ID NO: 124006 - DNA, 418 bp, Glycine max
  Clone ID: PAT_MRT3847_82985C.1
ctctagttaaatttgggttctaaattaagacatgaagaaacaaaacttttacaaaccatctggttttgtttactaaatgcttctgtgattgctcgttaagggcttgagtagttagcagctcaaaagtccataaaatgttgacaacaaaatttgatttacgctttcttaatttctaatgagttttagagcagctggatgcatgagtgactccaaaaaggttctttctttcaaataaccggggagttatttgtcagtggagtagaagttatattttttccagagataagcccctcttcttttgtatttggttcttattaataatttgaagttaaatttatatttgaagtagaaaattcgagtaaattgaactacacagcatgctaattttgtatgtcaacactattattgcatgcgtagt

SEQ ID NO: 124007 - DNA, 1784 bp, Glycine max
  Clone ID: PAT_MRT3847_82986C.1
gtttgagtattgcagtaagaaagcattgatattttatctttgcttgtgttctctttttcgtggggatacgcaaatactgatccttttttgcttgaaaggactctatatccatccatcggattgcaacttcatcccatccagaacagaacagaacagaactggtggttgcattgaatctcccttggtaagttgtgaagacgggtcgtgttttgtagctttcccttccctctctcttttcccctccgaacaacccgcacaagacgtcaacctgattggatggaaaaagcatgtgaatttcaaagtcgggctgaattgattccttttgtctgtagtgtagtcaggaaggacatctatccctccgttccttgctttgtcttttccctccagatacacaaatacggagcttcttttgcttgaacgggctctatacccatccatacgattgctacttcatcgcgttcagatccgaactttttctttctgttggattccgtgtctctgcagtggttattgtcacaacgtgtttgtttcattaaatcggcgagcccaggttggtgggcaggcgtgacttgttgtgttacgttccaactggctctatctttctttcccggcgcgtgtgccggattagacgccacctgcttccgtaattcacctcctccaacctaccaacacaagattttccctctggattggatggaggaagcatgtgaatttcgaagttgggctgaattgattcctgatgcgctcggggtaatcttcaccaatctttctcttcaggagagggtaacaggaaccccctggatgattccattgtggaacagattgctgggaggctttctatgatttctttcttggatgtgagctactgtattaaaattggtccctatgcgcttgagatgattggcaagaactgcaagcttctagaagggttgtgtcgaaacatgcacccattggatactgcggagaagccgcatcaagacgatgaagcatatgcaattgcctccacaatgcctaagctcaagcatcttgaaatggcttatcatcttatcagcacttcgggtgtccttcaaatacttgcaaactgccctaagcttgaatttttggatcaaagggggtgttggggtgtgacacttgaccacatgtttttaaagcagaaatttccaaaactgaaggttttggggcctttggttcttgacacttatgagagtgatggctgggatgatttctcagatgtgtctgattcatcagagtacttggcctgggactttgtggctggtggcatgggagaatactatgttgatgatagtgatagttacgatggaatgtgggatgatgaagcgaggctagatgagcttcagttcgggttttatgaagggatagaagatgcaggaatgtattggcctccatctccataagaagctatagctgctgcattacttgtgatcaattgtatgcttttctactcttgtaactaatgcttctacttttcttttatgtgctctttgaatgatgtgttttttttttccttcaagtaatgtttggcttgctctgcctagcatatgcataatcgagtgagattgttattgacctaccttagatttcttacttaagtaggaaaaggaagggaaagagaaagctcccttgtttctcacatgttagaggtctacatgttgtaattggaacatctggcttattacgatgttgtaccttcttgaaaaaatatctgtttgatgaggttgtcaaaaaaaaaacaaaaaaaaaatgttgtaataaattaactgttg

SEQ ID NO: 124008 - DNA, 1195 bp, Glycine max
  Clone ID: PAT_MRT3847_82987C.1
ccacgcgtccgctttcttttggcttgaaaggactccatccatccatccatcggtttgcaacttcatcccatccatccagaaacagaagtactttggcccttttcacttggtggttgcattgaatcggagagggtaggtaggtgggaagacgtgtcttgttttgtagctttccccttcgctctctctctctttcccggcgcatgtgccggattagacgccaactgcttccataattcacctcctccaaccaaccaacacaagatttccctctggattggatggaggaagcatgtgaatttcgaagttgggctgaattgattcctgatgcgctcggggtaatcttcaccaatctttctcttcaggagagggtaacagtgatccccagggtgtgcaaatcatgggctaatgcagtaactggcccacgcgtccgcaaggatatctgactctctgttgattgcttggactatgcgtgattcttagcattctcccaagcttgcagtggctttgctttggaaaagcaaaaaaaaaaaaaaaatattggatggaggaagcatgtgaatttcgaagttgggctgaattgattcctgatgcgctcggggtaatcttcaccaatctttctcttcaggagagggtaacagtgatccccagggtgtgcaaatcatgggctaatgcagtaactggaccttactgctggcaagagatagacatcaaggattggagcaaccgatgccagcccgaccaactcgatcggctacttgagatgcttatcacaagaagttgtggaaccctccgcaaactcagtgtttctggcctccaaactgagagcatcttcactttcattgctgaaaatgcctgttccctccatacattgcgactgccaaggagcagtatgaatgattccattgtggaacagattgctgggaggctttctatgatttctttcttggatgtgagctactgtattaaaattggtccctatgcgcttgagatgattggcaagaactgcaagcttctagaagggttgtgtcgaaacatgcacccattggatactgcggagaagccgcatcaagacgatgaagcatatgcaattgcctccacaatgcctaagctcaagcatcttgaaatggcttatcatcttatcagcacttcggggtgtccttcaaatacttgcaaactgccctaagcttgaattttt

SEQ ID NO: 124009 - DNA, 954 bp, Glycine max
  Clone ID: PAT_MRT3847_82988C.1
gggtatcgcgcaataataatcatgggaggagtattagcaaaataaaaaaataaaagctcaatgggatggcacattgattggtatcaattacagttataaacattgaatccaagcccaataaaaaaactcaaaagtattagacatcccatgaaacaaattcctgctataattttagccatcaagatgtcctaaaccagaaaacatgaacataaagccaatgtgtctcagaagagaaccaaaaaacaaaaccagataatattcacccctgcatccacaagacacccaaaaagcatcaagccttattggctatgttgttggaaagccagtccaaaccctcatagagaccctccccagaggttgcacaggtgctctggatgtaccagtggcgctgtctgagagagtggagtcccagcttgtcagtaatttcagcagcattcattgcattgggaagatcttgtttgttagcaaatacaagcaatactgcatctctcagttcatcctcattcaacatcctgtgcaactcatctctggcctcaacaactctgtccctgtcattgctgtcaacaacaaaaatgagaccctgtgtattttggaagtagtgcctccacaagggacgaatcttgtcctggccaccaacatcccagacagtgaaactaatgttcttgtattccacagtctccacattgaacccaatggtgggaattgtggtaacgatctctccaagtttgagcttgtacaggatggtggtcttaccagctgcatcgagacccaccatcagaattcgcatttccttcttggcgaaaagccggctgaaaagcttggtgaatgtcaaccccatttctccttcagttagtggatcccttgagggatctcgaacgagaaagcgtagagagagacagagagagagtaaaaagaagagagagaaaggcgaagaatgctttacaatcgcgtggg

SEQ ID NO: 124010 - DNA, 265 bp, Glycine max
  Clone ID: PAT_MRT3847_82989C.1
acagcgcgtaacaggagctctttaaagtagctgtcagatgaccagcctgatggtgagccgatggatttgactacggacaatactggtgccactgaaggcgctacagaagcccatacagtagcaggcatagttgaatgcatacgtggctacacacatagctccactacaaggcctattacagagctaagtgaggattacatggaatcttacggcgagactcctgctaagtgaactgctgaggctgatcatcaatagtcatacatat

SEQ ID NO: 124011 - DNA, 340 bp, Glycine max
  Clone ID: PAT_MRT3847_8298C.1
gttgtgtttcttgaaccacagtctaagaggctttttgtcttctattggtggctaagcgattcagtctcgctaagccacccatcttctattggttgaataagcctgggataagcgagtcagtctcgcgaagcccaaagcatttttaatttctgagtttttgttcatgcgctaagcgcaatttcttctctgttttgttttattttggaattgagcttagtgatcctgctcgctaagccaattaagttccagtagttattttgggctaagtgcttgctggcgctaagcctgtttagtgtgttgcgctaagcaagtcagtctcgctaagtgaaattagctctct

SEQ ID NO: 124012 - DNA, 378 bp, Glycine max
  Clone ID: PAT_MRT3847_82990C.1
ccctccgtccgatgccagaagacggcagcagggggggaaactcaaagtgatgggggggtgtgatcggagtccacttgatctaatcataatgggcagcgccaatcgtagaagatgccgatccgaaacatcgccaggagaaggcctgaagaggccactcaccccgacacgtaaaaggcggactcggctgacttcatctaaaccttcatcctcgagttcgccggctcaggctccggtctcgcctacaacatgctcaccgacaacgaggctgacacccgtggcggcctcatctactactacatcgaccatgcattaaccctctacgtcgccctctgcgtcggcggcaacatgtacagcggccacatgaaccccagccgcacc

SEQ ID NO: 124013 - DNA, 1452 bp, Glycine max
  Clone ID: PAT_MRT3847_82991C.1
tgctcccttggcattgttcccttcatcaatgcacagattgttttccagcttcttgcacaagtatatcccaaattgcaagatcttcaaaagagagaaggtgaggctggaagaaagaaagttctgcagtacactcgatatgcttcagttggatttgccattgtgcaggcaattggccaagttcttttcctacgtccctatgtcaatgacttttctacagagtgggttatttcttctgttatcttattgactcttggctctgtgtttacaatgtacatcggagaacgaattacagacctaaaacttgggaatggcacctctcttttgatattcacaaacattatctcgtacttgccagcttcttttggtaggacaattgctcaagcatttaatgatgcaaactacattggacttggtaccattgttttgtccttctttttgttggtagttggtattgtttatgttcaggaagcagagagaaaaatcccgcttaactatgcttctagattcaccagcagaagcactggtcttgaaaagtccgcttacctaccctttaaggtaaatagttctggagtaatgcctatcatattttctacatcatcattagctcttcctggtactttagcgcgcttcactggtttaactgcactaaagaaggctgcagtggcgttaaatccaggaggttctttctaccttccatttaacatacttttgatagccttcttcaactactattacactttcctacaactggaccctgatgatgtgagtgaacaattgaaacgtcaaggtgcttcaattccacttgtcagaccaggcagaactacagctacatttatcaaaacagttcttagtagaatatcagttctgggttcaacatttttggctatcttggctgctggtccagcagttgttgaacagatcactcacttgaccgcattccggggatttgcaggaacatctattcttattcttgttggttgtgcaacagacacagcaagaaaagttcaagctgagattatatcccagaaatacaagaacatagagttctatgattttgataaatactaaccgttaaaggaatggtggtttacaaaacctgaattacgcagcttctacataattctccaaaagaggaaatgttggaatgtaagccaatagtctccagcgtgtacaacagtgtaccattacattagtatcggcttgtaaataatgctgtatatagcagcgatttgcttttatttgtagttgaagagattattctgaaaatgcatccagtttgcgtagtatctggatatcaatcaaaggaaatggatacagagaactgggcctcaggcattacaatgatgttttaagcattttccctcgttaaatattctaaatatttgtctttgtagtaaaaaaaaaataaagatcctgaaataaaattgtgaatatggcacaaaaatttgtgtt

SEQ ID NO: 124014 - DNA, 218 bp, Glycine max
  Clone ID: PAT_MRT3847_82992C.1
acggattgatacacctggaaaataaataaataaataaatgtgaacaaattctgtgtacaatcacagtctcttctaaatatgactaaattcgaacttaagtcctgaacacataatttatattttgtaggctcggcattaccagagatctctgtcagcgggcgactaacataagacgcgactataccgacgtgctaataaagcgtgctgataaatgatga

SEQ ID NO: 124015 - DNA, 296 bp, Glycine max
  Clone ID: PAT_MRT3847_82993C.1
ctcgagctcgcgccctccccttcccgccgcctcactgatgtcgtcgctgcctctcgttcgtcgccctgtgctctccactctgcaaccatgtcgcgtcgtagtaactacgacagatacggcccagcgtttactcacccactatctcgccccagtcatgccgagacgtacgacgaaatggttcagtgtatgaagatagtagcacaacttgatcttggtctgactgtggatggcaggttacttctctcagtgggatacgttactgtgattggttcacgacgggcctcttggcgcgtaat

SEQ ID NO: 124016 - DNA, 457 bp, Glycine max
  Clone ID: PAT_MRT3847_82994C.1
cctttgcgtccgagtacgcccaatgaggtctgtctgaaatgattggtcttctacatcttcgctctgtgctctgaacgaatgggggtctcatggacaaatgggggcgacttactcttagattcctcttgctgacagtggcctccatcattaccttccaactataatatgaagcttcctctgctcggatccgccacaaccctcagactcgcctgcagagtagaacaagaggaccgtgaagatgttaggaaacttcacttctaatccgattgacacagacctacacctcctccttcttacaatcactacggtaagcccaacatcgtgcagaaagcaatcgatgaaccacctctgaacattaagactgtgctactacagcttattgttaacaccgggagtggccaatttacactgaatgacttggatttatctaatgcaaaaaataagcgagacacaatca

SEQ ID NO: 124017 - DNA, 255 bp, Glycine max
  Clone ID: PAT_MRT3847_82995C.1
gacgacttcccctccctgcaagccatcgccagggtcatcacgtagctcccgccagcgtggccagagctgtcgcaccgtgagcgtccttcctccttcctctccgggctgccaggcagccaggtaaggcctggtgaggccacttggcctcttggttggccaggcccaccaggaagtcaccaggcagtccacccgccctgttggcacactcaagcgggagtccacccctgcctcagtggtgggccagtctcggtttgc

SEQ ID NO: 124018 - DNA, 196 bp, Glycine max
  Clone ID: PAT_MRT3847_82996C.1
ctttaggggggtggacaagcttgcggttttgtaaacccccccttcccttcttaagctgggacagtatattttccatggtaaaccttcgttgccattttgaaagagaacccatattttttgtttcaacccttccagttctatgattaacacggtggtatgttgtgtctggaatgaaaccgaccacttgggggttttc

SEQ ID NO: 124019 - DNA, 263 bp, Glycine max
  Clone ID: PAT_MRT3847_82997C.1
ttcggctcgagaaaaaacagaggtggttttgtgtcaaacttcccaggtatgacattttcgaatgtaagataataattttgcatacatcttaatattgcacaatgtcatgggtgcttaattttagctctattagcatatggttcttagcttgttcttatcttcttgataatattaggcttaaatatgttttagtttcttgatatggttctaatcttcttgatgttagcttttagtcccaagaaaaacagtggtcttctttaggt

SEQ ID NO: 124020 - DNA, 245 bp, Glycine max
  Clone ID: PAT_MRT3847_82998C.1
atttttctacgcagcccggcgcgagagacgacagaaggggactgataaaaaccaccttaacattaacaacacccctacccccacaagagagaacagggaaaaaggacatcaaaacacaaaggctccaacatcgggacaggagacaaacggcaaactcccactgagaaaaggcctcaggccaaacaggcacgcgagcaaaaacccccacaaaaagaaggcaaatgcccaaagaaataccggcagaa

SEQ ID NO: 124021 - DNA, 235 bp, Glycine max
  Clone ID: PAT_MRT3847_82999C.1
ctcgagcgaattaataagataaatgctaaccaatacttaacgaatatgttgtctaaaaaaaatagcattatttgacaccaagagaaatgaaaaaagaaagagagataaaaaaaaaatagtgaaaatgtaggaatatacaataatacaaatcgtaacgttgttctatttaactcaaagacccatctcttcctactttggctttcattctttccgattcacagaaacaactcctctc

SEQ ID NO: 124022 - DNA, 481 bp, Glycine max
  Clone ID: PAT_MRT3847_8299C.1
aatcaacactatggtatctgctgtactgtcactttaaccacagccctcacctacatagaattatgctcataatcacatatgcactcacaagatatctaaataaatatttgtcaaactatgggacgtgtgctgagtatacccatggacacgggctctctagtctttcaaaatgcttgcatctcttctgtgaggactcttatttttaaaagctatcttctaacaacacaaatatatctacgtgacgaactggtgatgatatagcattggatgtctgagaatacatcgcctaatagagggaactaggtgaagtataacatatctgcatgatgacaacatagcagataatgtcgagagctccggggaaaagtttgagtaccaagccgaggtgagtcgattattggatttgattgttcacagtctgtacagccacaagggcgctcccccttctgaacttgtcagcaatgctagagatactttggac

SEQ ID NO: 124023 - DNA, 231 bp, Glycine max
  unsure (1)..(231): unsure at all n locations
  Clone ID: PAT_MRT3847_829C.1
agcttgtgcatcaaaggaattgttctcttctgcttttttcatttattgttgctggaccttttancagctatttgggttattcaataaagggatttgggggtagatatccaacacattgaggaagcaatgcataatattttggtatgtctagagattgttatcttttctggtgtttaacaatattcttattatccttcaccatataataatagaaatttttaaaattcttaa

SEQ ID NO: 124024 - DNA, 386 bp, Glycine max
  Clone ID: PAT_MRT3847_82C.1
cacaaacttctatcccatctccgtttcagctctttcctgaagaacatgggcgaatcttttggggttgatattgctgaatcactgctggggaaacttgcttcttatgcttatgaagaggcttctcgagcctacggtgtgtatgaggatctgaaggggatcaaagacacattgtcaattgtgaaaggggtgctgttggatgctgaggagaagaaggagcacaagcatgggttgcgcgaatggctcaggcagattcaaaatgtttgcttcgatgctgaagatgtgttggatgaatttgagtgccaaggctcgcaaaagcaagttgttaaagcttcaagcagcgtcagggttaaggtaggccacttcttttcttcatctaattcgcttgg

SEQ ID NO: 124025 - DNA, 499 bp, Glycine max
  Clone ID: PAT_MRT3847_83000C.1
cgagggccatagggatgccagtcatagctccagttttggtagagaatctttgagaagcttggatgatgactgggatgatgaaaaggcaagtcccatgactcccatccacatgggggctgctaacagtaataacagcattgaagaggttgaatctgatgacaatgtcgaagcaatggaatctgatgacaatgttcaagcaatggagtctgatgacaaagtccaagcaatggaatccgatgacaatgtccaagcagcagaatctgatgacaatggccaagctgtggaatatgatcaaggaaactgggaaataggttttaatggtgcccccagcagatggagtagggatttggtaggaggaattagcgatgaggatgaggatgaggatgcggaagcttctgaagatgacaatgacaatggcattggcattgaaaacaatgaggaggtggattcagaggcagatgctatgagtgaggagggttcagatggtactgcaaacaga

SEQ ID NO: 124026 - DNA, 455 bp, Glycine max
  Clone ID: PAT_MRT3847_83001C.1
gcaccagagatagtgattcaatgggtaattctggtattagctgttaaaatcatataaggttctgggtatattgatatctcaattatgcttctttacagtcacttgcacatactgaaacattgagaatttgagactcagtaagttagtatcgtaagcccaggaagagctatatgtttttcattcagggttcggtatgtgcttttcatttttcaaatattggttcagtatttttcattttcctttcatgtttgaatattttattgctgtgggataagatttttgttgttgttgttgtttgaatattttggtcctacattttagtgtaataacagtaaacctgtctacgtgctctaacatattggcagatatataaaagttcctttctcgagttatgtgctatgtgataatacaattatgcagagactggactgtgatacactcaatttgatttcttt

SEQ ID NO: 124027 - DNA, 231 bp, Glycine max
  Clone ID: PAT_MRT3847_83002C.1
cacaagagaacacaggataccgtgtttcatagtctctcacacacaaacctccttcggatacagttaaatctcaggatgtataactacgattttacgctttttttcgaaataaaaaatagattagaacatttgccatgggaacccagattttgcgacatcaggatctgtagggcgaacgaatcagggctccttcggttaacttttcccggcggacaagtcccgataattact

SEQ ID NO: 124028 - DNA, 413 bp, Glycine max
  unsure (1)..(413): unsure at all n locations
  Clone ID: PAT_MRT3847_83003C.1
attcngctcgagctcgagccgattcngctcgagtgaatttcctgatgcggcccatatcttttgtttactccgacagggaaaaatcttcttcttcttcaacggcgggggggacgggtccaactacgactccccacccatacagcgcctacttttttgatagactcattttccaccacccgtacaaccgagcctaccctactgacaaagacttgctactcgaaaactgcgctcagagctccttaaacgacgctcccgttctggcctaacacgtggatgattcctaaaacaaagggcggatcaccatttcttacttggaaattccatacaacaggaagcttgttgctcaaagctgaccaccctccctgaaaacttgtagcctgctcaaacgtgcgctcacgttgacttaacaccaa

SEQ ID NO: 124029 - DNA, 456 bp, Glycine max
  Clone ID: PAT_MRT3847_83004C.1
cggaaaggaacgaccggaataacagcctgcgacctcagcacaatatgggtaacggatgagagccagatgccacaccaacatggagatgggacatatctatcgaagaagacactatatgggaaactataattactgtgaatcctatcaacacaccccaatatcagttagcctacacttgtatcccgattgatgacagcccacaaccaacttgatcgtacacctgcatcactgaaaccctggcattcacaggatggagggtctacaagcgcgagacccaaaccgccaatgatggcgacgccttcaatcttttcccacactcatacaaccattatatctgaacgacaccatcttctgcagagaactacccgatagctaggccacgattgcttctatctctgctacattgccaaacaaccatttcactggcttgaactttacatccagcgagccattcac

SEQ ID NO: 124030 - DNA, 255 bp, Glycine max
  Clone ID: PAT_MRT3847_83005C.1
gatgcccctaatgttagagggggtgttaaaaccataaaagaagagagggacccccaccacaattaaaaacaaaaagacgacttcggaacttaaaattaagaaaagcctacatcaaacaaaaaggggtaaaacccatccaacactaaaaatgtttaaaaacatggggacacttaaaaggataaactaataggggggcttaaaccataaaaaaaaaatagcacgagcaaatctttacttaaatacacttaaaccggg

SEQ ID NO: 124031 - DNA, 411 bp, Glycine max
  Clone ID: PAT_MRT3847_83006C.1
tcgtccatctcactagtatatgcggccgccaccttaaagagggggggcttattaaacttataaagtgtctgggtctgattgatggatagaaggcactgttacaaggatttgctgcctttgggggagcttgttgccatgaatgcttctccccaggcttgtctactctcttccaattttcacactgcgagggatgattaactgtgtctttgtcacctatgcctatactgatgcctttgttgtgctacttcctgtcacttttttctaccgagggctttgctgccgaccttctatccttggagcactgctcctgtgttctcttttccgccgctgccccttccctaatgttggtctaacctggctctttcttcattaagactggtcccttctcttcctttttccattctgtcctac

SEQ ID NO: 124032 - DNA, 553 bp, Glycine max
  Clone ID: PAT_MRT3847_83007C.1
tacggctgcgagaagacgacagaaggggacacagcatcatcttctaccttgtgttgtgtctgtttgtgtgagtggcataggcataaccaatggacgccatgaaggtagtgacgctgaaagcaatcgaagcaactccgtcaaccttcaaagactacggtcaggtcatcgaggcttcgccggacggccaggaatttggttcccacgatgctcaactcgacctttctcaaggaactccaaggttctacattatgcatattgaaaatcgcccgcttaagttttctagtattacacatcatgcaagcgtgactcagtgcctcgggtctattggtggccatgtttggtatcttggagtggccaagtcatccattgttgattcaaatgaaatcaaggatggcacaagcaagaagattgtgcagtcaccttccggtcattcatatgtgcctccagccattgaggatgtccaagttttcaggttgcaggttccaaatttcttaagcttaaccggggaacatggcatgctggccctctattaaggcagctgcaatcgactttt

SEQ ID NO: 124033 - DNA, 584 bp, Glycine max
  Clone ID: PAT_MRT3847_83008C.1
ggactaagattaagactgttaaatccaaacaatgtctaggagacagcaaattaaaaaaactggttttagggcctttgtaaaaccagtaggagcccctacagttgcacctgtggctccatttgggacttgctttgcaaccaaagacattcagtctacaagaatgggccctgctgtgcctgacataaatctagtgctgcagaatgaagtggtgtggagcatcattggtgcgaattcaatggtgtatactaatgatgtaatttgcttgggttttgtggatgctggatcagacccaagtacggcccaagttggatttgtggtgggttattctcaaccaattacttcaatcacaattggagcacatcagttggagaacaacatgctacaatttgacttggctacctcaaggcttggcttccgctccctcttcttggagcacgccaactgtgccaactttaactttacctcttctgcttagaatttgattattctactataatcaaaatttgcattttaattaagatccatgtgtgtagacaaggtgatgaataagtgatattatacttatgcatagcctccatagattt

SEQ ID NO: 124034 - DNA, 422 bp, Glycine max
  Clone ID: PAT_MRT3847_83009C.1
aaacgacacgaagcacctaacaacattcaagcacgttcgggcccgatactcatacccgaaacaccgacttcatcttcgcgttccggttagggttagggaattagggtttcgaacttcgacgcaatgtcgttcattaacccttcaccctcttccacctcacgtgcaatcgctccctccggcttcgccacgcgccggccatgggaggagttcttcgcgctccactcgttcacgcgcccctacaccctcggcgaggccacgctccgcgtgaagcgcaacctcggccacttccgcgtgaactacgccatggtcgtgctcctcgtcgtgttcctcagcctcctctggcaccctatctccctcatcgtgttcctcgccgtcttcaccgcgtggttcttcctctacttcttccgcgacggccccgtcgt

SEQ ID NO: 124035 - DNA, 250 bp, Glycine max
  Clone ID: PAT_MRT3847_8300C.1
cttaacgaaaaaaaaaattattttaataagtacaatcctatatatggggcggaaatactaactacttttaattagcctcttttaataaaatctcaaaaatgatccatttatccttaatctaaccacaatcctttacgtgagccaatatatctctaaaaataaaaacgcttctttaaaagcagaccacactgatttcaaccaatttattacttctgctactacaactatatgcttaacttatactccacat

SEQ ID NO: 124036 - DNA, 303 bp, Glycine max
  Clone ID: PAT_MRT3847_83010C.1
aaaaaaaaaaaagaaaattccataattgagaacatacaaaaatggagggaaaacgggaaagataccaaagctaaacgcgctagagtagtagatacgaaagactaaaaattcggcacgcacttgcagtacacgggtggatgggggaacaagtgtgctctgccaaaacttggaggagtgtgaagtaaactgcgttgcgaagccagctgctatagccagcggactgggctatgaaacggactatactattcgacctgcctagcaggggaacggcctgattgagcaattgggacgcaccgtgtagcg

SEQ ID NO: 124037 - DNA, 237 bp, Glycine max
  unsure (1)..(237): unsure at all n locations
  Clone ID: PAT_MRT3847_83011C.1
caanncaaanngttcactcntcgtncgtntnnctnanctcnncncgnnnncgnccnntgntncnnccncnnnccccntntatngnccnctctngcanctgnncctgactgctcncccccnncntcngctnntngntgtcnngnnnngcctctgctcgtgcncgnncttnnntntnctncccntngntcgngngctgnagaggnacntgnnncngntccctncgccccgctcttnnnc

SEQ ID NO: 124038 - DNA, 452 bp, Glycine max
  Clone ID: PAT_MRT3847_83012C.1
atttgctcttgctgatgtgcagctacttcgtagctgcatcttgtgtgtttaggtttcaatttttgcttaatattttacttgaatatgcaatagatcatttatccgcttggattggaattttcctagcctgcaatgttcacacgaacggtgggaataggggtgaaccatatgcctattaatttatatttatttatgtccttttcttttatggaagtctttttttctactaggatcgagtgaagggaatctgctagtctagttgtagcagtggattgttggctctgttttaggttttgcttatgtttctttagtggcttacctctccctggagtttcatttagatggggttgcatagttattagttcgtctcctttggattttagcccctcaattacaatattacaattaataaaattatttattaaaaaaattgccaacaaaaacttttgtag

SEQ ID NO: 124039 - DNA, 408 bp, Glycine max
  Clone ID: PAT_MRT3847_83013C.1
ttcgaatcccaattccatattttcaagaaataaagaaccacaaatgtgcatgtttcaattccaatcatttggtctcttattacgcctatcctaaatccaacacaaatgagatcggaattcctccatgaatcccaattccacattttcaacaaatttcctagcataaatcctcctatatcaattacaataatctgccatcttattacacctatcctacaaccacttgaaactcagatctccataccaactactaactccaattctacattttcaggaacttacctaccactctttaatagtatgcaaatcaaacttgtcaagtaaataattctgtccatgaaggatgctgtactaatccaagtgctagaacttgtgatggaacttgcgtgtaacattcttagcattctc

SEQ ID NO: 124040 - DNA, 2184 bp, Glycine max
  Clone ID: PAT_MRT3847_83014C.1
atcgagagtcttttccgggtaaatcaccttgaatgcaggagatggactacaataatgaagcaagcaatggtatcaagttcaggaacttatatggttctataccagatgtggtggttccattaatgtatacggaatacactactcgcaaggtcctagttatggaatggattgagggggaaaagttgtctgaagtgaaggatctctacctgattgaggtcatttatgaaactagtttcaagcaagttattctaaatttttaatctgtagaattcttggattttgtatcatgatgctaaatatgtttcctatttcctgatgctgattaggtaggagtttactgctcattcaatcaacttcttgagtgtgggttctatcatgcagatccacaccctggaaatcttcttcggacatatgatggaaaattggcttatttagattttggtatgactggtgagttcaaacaagaattacgcgacggattcatcgaagcttgtctacatcttgtaaaccgtgattttgatgcattggccaaggactttgtcactcttgggcttcttccaccaactgcagacaaagaagctgttacaaaggctttgacaggggtcttccaaaatgctgttgccaaaggagttagcaatatcagctttggagaccttttaggaaacttaggaaccaccatgtataaattcaaatttaggataccatcatacttctctctggtcattagaagccttgctgtactggaaggaattgcaatcagctttaaccctgagtacaaagttttgggtagtacttacccttggattgctcgaaaagtacttactgacaactctcctcagcttaaatcttctttagagacccttctttataaggatggagtttttagaatagaccgtctagagtctttggtgacagagtctctccgtgccaaaacagaaaaggccatagtaaaacaaactgaaggcactgattcgacaatggttatgaaggaaattctttcttttacactaacagaaaagggtgaatttgtaagggaaataattgttcaagaatttgctaaaggtttagatgcacttggtctagcaaccatggagacagctgctgccagagttcctttcagtagtttcttttattcccctttaatgactaaagaagatataatcaacttgagaaacttccgacgccttatgctattgctgttgggggccagaagaaaagaagaatccagtacagaaagcaaacaggcgagtcctgacaagaatcaaatactgtacatggaggagttgtcgttagttttaaatcaagttgaatccattcaagacattcttcctataatttctgtcattcttgagctcccaccagaatcccagcagcaattgcttcaattgccagttaacttggttagaaagttaatatctcgtgctgctgcaagaactgtaaggagggcctttttataacatggatgaagtagctgaagctgaaatctttttgtacttctcaacaagtgaccggagaacattgaaaaataaataaggctttatgacaaggcctttaatccttaatgcttcaatacactgttgattcaacaacatattcttcgctttcaatttcattttttttttattaattttatcttcgttgtaagtatttataggtttgctttttcaaatggttgtaaggtagttaggactatagaaaactaaagtttaatataagaattcatattttgttccaaatagtaattaaaatttctcaaggactaaaatgctactccttcccgtgctttctctctctccctccttcccctctctggcttcgaaccgttatctccaatttcgacctcgtcggagccgccgcgtcgtccgatgcgccgccccggagtccggtggcgatgagttcacggcgaagtcggggtacctgttcgagctgagcgccacggaggcggattcgctgggggaataccggataccgaaaatcgcggccgtatactcgcggaagcctctgctcgtggctcgccgcttggtgcagaccggcgtcgcgttcgggaagtggttcggtctccgctacatcgatactctcttggaccgctccgagtcaatgtttcaggttagagctgcagagctgaggaagatattggtggagcttgggcacgcatatatcaaaattggccaggctatattatcc

SEQ ID NO: 124041 - DNA, 393 bp, Glycine max
  Clone ID: PAT_MRT3847_83015C.1
cggtgtatcacattttattccaggcaatcaagcagaataaaaggaagtcggttccttaattggtttgccatgttctcatcgtcgaaggcggcaaaagttgcaaaaaatactcaaggcgaacaacagcttcaaaccagcgtacagaagcagccaaaacgaccaaaaagtgcgtcaacagcaagcactgctttctatcactccctgttctctccagtcactatacacgcgcaattcacagccaaatgtccgtctctcctctgctatgcaaaaggcacgagacctttggcacccctcgcccaatgtccacgcacgtcccacttatctgttggccttcgccacacgctcaatctcgtccttcttcttaatagcgtaactgttggacgaacccttgga

SEQ ID NO: 124042 - DNA, 280 bp, Glycine max
  Clone ID: PAT_MRT3847_83016C.1
gaaagccggtccgcctgctagtaccggtcctgattaacttggccgacccatctcctttgcgatcacaggttgccgcaccataaaaccggttacaaaagcaatcgctacttgatttcatgaatcttccaaattcttcctacttcttggagtacagattgtttaagggaaagaaaatcactctctgtgctggccacagactacgtgaatcattttctattccactctgagtttatttgctgaacactctcctttttgacataggactacgtgtcagatttaa

SEQ ID NO: 124043 - DNA, 114 bp, Glycine max
  Clone ID: PAT_MRT3847_83017C.1
caagtctggaccggtccctgccggcgtaccagccttccctagagtgagtcgtagtacagcgtggcgtcgtcatggtgatagctgtctcctgtgtcaatgtgtgaccctctcacg

SEQ ID NO: 124044 - DNA, 177 bp, Glycine max
  Clone ID: PAT_MRT3847_83018C.1
ctgctcgaggaaagttgacaaaaagaaatctcaatttgatgtatgacacactggtgtaagtagcacttgaggtgatgctaccccaggatgaagaacatgtcactaactgcttgatcgagctgagaactaatccggaaaggctcatcgataaagtttacattgcgtttcggaaatggg

SEQ ID NO: 124045 - DNA, 261 bp, Glycine max
  Clone ID: PAT_MRT3847_83019C.1
ctattccacttcattgaaagctagtcccacttgagctctctttccacaaatctgtctttgcatatctccaatggaaacctgagggtcaccaactccatctttcaagttgatctctcacacatacacactttaaaaaccacttctggttacagtgcttatgatgcaaaccaccaccatgcacaaaaatcatattgcagccgcgttctgtttgttagtttgtactttactaatcttcagaacaagtgagactttggatgaggg

SEQ ID NO: 124046 - DNA, 263 bp, Glycine max
  Clone ID: PAT_MRT3847_8301C.1
gttagtcctgctgacaccaatgctgaagacacattgcacactctgaagtatgctaaccgtgctcgcaacattcagaacaaggcagttatcaatcgtgatccagtgggagctcagatgcagagaatgcgaagtcagattgagcaattgcagtctgagcttctgttatacagaggtgatgctggtggggcatttgaggaacttcagattcttaaacaaaaaatatccttacttgaagcaagcaatgaagagctacagcaggagct

SEQ ID NO: 124047 - DNA, 327 bp, Glycine max
  Clone ID: PAT_MRT3847_83020C.1
ttcttttaaacccaggctcttttgggcaggcattttaagttaggggaccatctattactaccaatttaccatctaaatacaattcacatacacctttttttccttataaaagatattcttttcatcctcatcttcctttttctccctatcaatctcacacacacttgcattactttttatcttccttaactcctttccatacctatcaacaaccatgctctcttaacacaaaacataaaattttctctccttaacaacttctttcttaacagcctattcatctccctcctccttttctatctcaccccccttttccatctatttttc

SEQ ID NO: 124048 - DNA, 268 bp, Glycine max
  Clone ID: PAT_MRT3847_83021C.1
ctctagagcggccggcgttcgttttttttttttttaacagagattttttttttatcaccaaatcttaaacctaattgcactctttcaattccgaagacaacaatttatgcacacaaacaagtaactagcgatgaattagcatgtgtggattataatttggaaaccccgggggggggcaaacgtgttttttttttggatgaaaccggggcccaaacacgtgcaacacacactgactttgaagcagcttcggattgagaccaggagcact

SEQ ID NO: 124049 - DNA, 315 bp, Glycine max
  Clone ID: PAT_MRT3847_83022C.1
cagacgcgtgagtagtcctaagtctctggagaataaggctaaagatgactacagggcacggggagagtttcccgtaaaggagagactggaagcccaagcgagtgaagggatcatattgccatcaagtcagaagggagctcaaaacaaacactagcaggaaagtttgaggaaaaagagtgaacctgcttaacaaatccaacccagttcacaagaaggttccagcgaggattaacaaagagaagcccatagcagagtctattgtgacagttgaacacattgataggacatagaagaacaaccccatcttgcctactg

SEQ ID NO: 124050 - DNA, 498 bp, Glycine max
  Clone ID: PAT_MRT3847_83023C.1
taaaggaggataatgagagaagaatttagtgttcacagagcaatgtaaggcaggagagttttggttctactgtgaaaatattgtttgtaaagtgtaaacatgaaacatagaaaatgtgtttttatgcttactggcagctgcaaatgttgtagctaattttctgagaaacgcatggatatggcaaagatgatgtctaggatttgaatacaaagtgagagctcttacattgtagcatgcaatttgggctttgcttggtgaatgtgcagggagaggaagtgagggacttcattcaacagaaaagtttgatgtacaaaaatgctaaattaaaaagaaaaaaatcctgtaaatttattaggctgaaatacatatttgaatgttatagtttgtttatctctctttttaaatgcatggtttctttatcttaagctggttttgttttagtaaaattgttttttaatgtgttaggaaagggctaaatctctgaagttacctacccat

SEQ ID NO: 124051 - DNA, 427 bp, Glycine max
  Clone ID: PAT_MRT3847_83024C.1
cacaacttcttttttttaaatatatcgggggttactttacatttaatccaaggtttcccccccgtccccttaattaattttccccttgttcccccctggaaatcataggtttaaactggaactttaattaattttatcccttttaaaactagttaaaaaggggacttcatttcaaaaacattgattttttaaaagcttgcaacaacaaacaataagttgccagttgagaaaaaagaccttttgtttctaaaattatgacttgggaaaaaaaacccatttttttttgcttgtaaaaaaaaacctttacaggaacaatagggtcttttttgggctgaattatgggggaagctggcacacaaacttggggaaaaacacatttgggggcccttaaaaaccctgttttagcaacacttaggggcacttttgg

SEQ ID NO: 124052 - DNA, 361 bp, Glycine max
  Clone ID: PAT_MRT3847_83025C.1
ggagggccccaaaaaggtctttcacgtaaaattggggagaaaaaggaatcccttccccataaaaaaaaaaattaaggaaagaccccaaaatggggttttacaaaaaaaaaaaaagccgcccaactaacccccaaaaagggaaaaaaaggttcgaacccaagcccccctaaaaaaccccctcttgaccatccccaaggggaaggcccctttttgaaaaaacgaccacttccccccccccgaggcccttggcccggaattcccccttttaatgggtagcccctccacccctgagctttggcctctgaaaacccttttcctgggggacccgcttccattcgtaaacccacttgccccacttttt

SEQ ID NO: 124053 - DNA, 115 bp, Glycine max
  Clone ID: PAT_MRT3847_83026C.1
gtgtgctcgggattgggctcgagcagtatttgataatgccaccagagttgagccagaacgacctcatcaatggggtgttgatgctgctgaagtagattgttttccacacgacata

SEQ ID NO: 124054 - DNA, 524 bp, Glycine max
  Clone ID: PAT_MRT3847_83027C.1
cttatcaaagcagtgtgatagggcattgggtatcaaacccaacttggagttccctgcactccaagtctgaaaggatatgatggtaaacctctactgctagttcatggatacctctgacttcttaacaacatgcgttcgaagtcaagggtttgcatgccctgggagatgagtttaccttgatcttttggtattggagtgaagggagctccagagggtattctcaagccctggccttattttgttatagccatgctcacacaaccctttctctatctctctttcagtttatataccttagttatatattttgtggatttttttgtgatatatatatatatatatatatatatatatatatatatataactaatatcttgtcttcacatttgtgtctgaaaaagttgttgctgtcgatgggtgctgatttttatttatcaattacaaatatggaggaactcatctaatgcatgatgctattttaatcctgatataacccagagaagaatcttatcctttttctcctt

SEQ ID NO: 124055 - DNA, 644 bp, Glycine max
  Clone ID: PAT_MRT3847_83028C.1
aaaatacatttatcatcatattgggcttataattctttttctaatatttgcattagggttggcttttaagtttttgcttttttctttttcccatttgcacacttgattgacatttatttattaaacaacgttcacatttcatcaacaacttttgtacactttttttttgttttttttataccttttttttatcacagcctttatttttttttcttctcgtattctctctcttccatatgtagaagttattataaaattttgttgtgtatctaacattttctagtaatggaagaagaaactatttttaatattttttaaaataaaattttcaatctaataatcgaatcacatcatatcgtctttgataattaagtaatttttttcgtataatttagacatttataaatagctaatcacttgataattatctgcttatattttaaacaatatattttgttaaaatcaagtgaataagtatcaaataattttaaaaaaaaattaacatctactttctacaaatttttatttcaaatatttcattattaaaatcaagaatatccaaattttgatttcaaatatttcattattgaaatcaacaaaatcagctcaattaattgagtaaaatacatgatttattttaaaca

SEQ ID NO: 124056 - DNA, 397 bp, Glycine max
  Clone ID: PAT_MRT3847_83029C.1
ggagggggcaaatccaaatattgctgctgcattgtcccataatctacaaaaccttgaaaactaacagcaaacaaatatgttcgccctttggaatttgaattcaaaaacagtgccttgataattttaccctatttacagagcccatgtctgactgaaattttatacaaaacattatctattttggattataataaaatggggaagaactttatgttacctgccgcattttgtgaagaagggggaagtgcctccacccggggctttaaaccctcggcttcccttttactttataaatgggtccttttgtaccttcacaattccttaaactggttaagcactggtgaccttgtttttaccccccaagggcccatggggttttcctggggtaccccttaat

SEQ ID NO: 124057 - DNA, 307 bp, Glycine max
  unsure (1)..(307): unsure at all n locations
  Clone ID: PAT_MRT3847_8302C.1
ctgcacgagaagactccatttttttaatacggaaaggaagtataaacttgaattgagattattctgccaacattagagaatgttgattcagaaggaattaatacatgagtacgagaaaattatttttcaaaaaagacatgttagtgtataaaattttaaattatcaacaaattaggaaatcatagaatttgaaggggaaaatttttttttcaaaaaacccccttttttttttttttttnaaaaaaaaaagggccggggggcgattattattaaattcaattaatgtatttttttgatnaattggaag

SEQ ID NO: 124058 - DNA, 392 bp, Glycine max
  Clone ID: PAT_MRT3847_83030C.1
tgacgatgacgcacactgccctcatactgagagctcggaatcgagcttcgagctcgagccgaattttgctcgagctcaatgacttgtggcagatttgctgaaccgatcaatactgtctttctatgcatgtacacatgcctgtaccatgattctaatgtggaaaagaattagttcggtttcagcaggtgagggtgaatgttgatgtggacctcctctagacctacaccctcggtactgagatggaggaacatgaaggagttatcttcgcctgagaacaagatcaacatgaggtcgctggacctcagcacattgcgatagcactatcagtcagtgagaatggctacgacgactagagagatacgcctttctggacatgagacgcacttgattct

SEQ ID NO: 124059 - DNA, 369 bp, Glycine max
  unsure (1)..(369): unsure at all n locations
  Clone ID: PAT_MRT3847_83031C.1
ttttggataaaaaaaggcttctaatacctaaaattgatatatgaataaaaaatatacctctagttttctgataaaggggtctatcaaatgatcaccttnaaaacatgaaaacagaaattccacagagaagaacacaaatttgatcccagataggctagataagctatgcactaatataggagctacaaagacttatctcatcaaatattacaccttccaccactatagaggaattgtgatatgaccttgccatggaaacttaagtacctcattgaccttgtgaactctgcttataatgcatggactacttgaaaaggtgggttttgcaacatatgtaaatgctatacataaattgaaacacgctgatac

SEQ ID NO: 124060 - DNA, 372 bp, Glycine max
  Clone ID: PAT_MRT3847_83032C.1
ccggaggaccggccggaaacccggacacccaccgccggatatgcacacgccgccgcccaagcgaagaaagccacagaggagacacatcagccggggggacaaaaccacgccccccggggcggccgcgaagggcatcaaactctctagaacacagacagggagcgagagctcaaccacacggcgaggccacccgaagccgccgccgcacacaaaaagaagactggagccaacgggacaccacaaagcgaaccaaagccacaagaacctacaaaacaccagtaagagtgggatgctgcaaccccagccaatgcacggcgaaaagaaggacccacaggggaagacaaactcaacatagagtgcaaccatgccacc

SEQ ID NO: 124061 - DNA, 304 bp, Glycine max
  unsure (1)..(304): unsure at all n locations
  Clone ID: PAT_MRT3847_83033C.1
ccgcgtcgtagctcnaatttcctcgagagaaaaaaaaaaacccttagccaacacatccatcatggccacctctgctattcagcaatcagcattcactggtcaaactgctctgaagcagctcaatgagttcgtccgcaggaccgggggcgccggcaaaggtggacctaccttccccgcacccgcaagagtggttcttaaagcctttggtgttggcccgtccgcgccaagtgcctgggtgcacatctctgggcgcattttcacaatacctgtgcgcggaatttcctgtggactccacatggggcac

SEQ ID NO: 124062 - DNA, 113 bp, Glycine max
  Clone ID: PAT_MRT3847_83034C.1
ctcaagagctactggatgctttttatttatcaccacaagatttactagcaattttgggcgttattgccctggcgtgacttacagaactgccgaagtatgacaacctgtcaaca

SEQ ID NO: 124063 - DNA, 202 bp, Glycine max
  Clone ID: PAT_MRT3847_83035C.1
tgtgacggcccactgccgcactgcgctccttttcttcaccggacttggctcggagacctgcttgaagctgctagcggaagccttctcttaaaaggaccaccggaaccggagcggctgtcttggagctttgcacatggcggcggcgtacgtaacgcccttcgtggcgaaggttttcttggatctctctgctgatccccaggtg

SEQ ID NO: 124064 - DNA, 531 bp, Glycine max
  Clone ID: PAT_MRT3847_83036C.1
gctcatctaagtccagatttgaagtttgtcattcacattggggttcaagccaaatagaatctcatgaatgttttttgctggtaaaaggataatctcaaaaaatcttattgcttgattataaaattacagtgcaaaagagtttttagaaccttatcattctggtaatgcaaattaaccatacaattagaaaaaaatttacaaagtactacagtagtcacacaaatctgtagaattctttcagcatcatccattccaaaattttgcagaagtatgaaggccaatatcatctaattgactgtcatgggaaaatctgaaagtcttcaatgctaagtgaaaaatgaagaataacaaggggccattaattttcaagtaaccctcatctagagtgatgacaaatggtattgctcggtgcgcacgtaaagatttgtagagcttcttggaggacagtggatttagatggcttcaaccctcctctgactcatgtatggcttccatgttattatccttgtaaacacctagaggtgatccatg

SEQ ID NO: 124065 - DNA, 1822 bp, Glycine max
  Clone ID: PAT_MRT3847_83037C.1
acggtccgaatgttcccgtaatcgaccaccgaaagaaagagagagatagagaaaaaaaagcaaagcaaagaaggttcacgttcacgttctgttctgttctggttcacactttcacgagcctatcaccgactctctgcacctgcaactgcaacttccaacttcaacttcaaccactgcaagcttagctctgaaagaaaagaaaagaaaaagaaaatatctccatttggtttggttggtgaaagttgaaaccttttcacgagctcaagttggtagtaacttttttaacttggcggtctctttttttctacatcgactctcgttgtgttttgcaaagatctgatctgggtcgtggatatttcaatgtgaaagttaaggttttttttgttgcatagtaataattgaaagaaacaaaaaaaggtgggatttttaaagggggtggtggagatggatcgttctgctatgactgttgggccaggaatggatatgccgatcatgcatgacagtgacaggtatgagctggtccgtgatattgggtctgggaattttggggtggcaaggctcatgagagacaagcacactgaggagcttgttgctgtcaagtatattgagagaggtgataagatagatgaaaatgtacgaagggaaattataaatcacagatcactgaggcatcccaatattgtcaggttcaaggaggtaatattgacccctacacatttggctattgtgatggaatacgcttctggaggagagttatttgagcggatatgcaatgcaggacggtttagtgaggatgaggcacgcttcttcttccaacaacttatatcaggggttagctactgtcatgcaatgcaagtatgccatcgtgacttgaagttggagaacacattgctggatggtagtccagctcctcgtttgaagatttgtgattttgggtattcgaagtcctctgtgctacattcacaacctaaatctactgttggtacccctgcatacattgctcctgaagttttgcttaagaaggaatatgacggcaagattgcagatgtgtggtcttgtggggtgaccttatatgtcatgttggtgggtgcatatccttttgaggatccagaagaacctaaaaatttccggaagacaattcataggattttgaaagtccagtactcaattcctgattatgttcatatatctcccgagtgccgtcatctaatctcaaggatctttgtggcagaccctgcacagagaataagtattcccgagattcgaaatcacgagtggtttttgaggaacctgccggctgatcttatggtcgagaacacaatgaacaaccagtttgaggagcctgatcaaccaatgcagagcattgaagaaatcatgcagataatcagtgaggctacaattcctgcagccggaactcagtctctcaaccagtatcttaccggtagcttggacattgatgatgacgacatggatgaggacctagagacggatcccgacctcgacattgatagcagtggagaaatagtttatgcaatgtaagctgctggcaaacaatgcaaactgacttctctgatcaatttataaatagtatagcatgggttgttcagtgggtttggaatatgtgggaaaaaaaagatttcacatctgaagggaaggattctgtgaaaaagtttgtttttttttttttatgttgcgaggatcattcctgcttatatttttatggtcctttcatgattacatgctgctttgtattgatagttgtggtggtgttatattatgaagtggttgtctttccctttccaaaaaaaaaaaaaaaggacaa

SEQ ID NO: 124066 - DNA, 778 bp, Glycine max
  Clone ID: PAT_MRT3847_83038C.1
ctgcaactgcaacttcaaacttctacttcaacttcaaccactgcaagctctgaaagaagaagaaaaaaaaaatatccccatttggtttggttggtgaaagttgcaaccttttttcacgggctcaagctgaagtaactttttaacttggcagtctctttttttcagcatcgaccatcgttttgttttgcaaagatctgatctgggtcgtggatatttcaatgtgaaagttaaggttttttttgttggggtgttggtgtttttgttgcataatagtataatagaaagaaaaaaaaggtgggatttttaaaaggggtggtggatatggattgttctgctagacgcgtgggcggacgcgtgggcggacgcgtggggcatgacagtgacaagtatgagctggtccgtgatattgggtctgggaattttggggtggcaaggctcatgagagacaagcacactgaggagcttgttgctgttaagtatattgagagaggtgacaagatagatgaaaatgtacgaagggaaattataaatcaccgatcactgaggcatcccaatattgtcaggttcaaggagatcatattaacccctacacatttggctattgtgatggagtacgcttctgggggagagttatttgagcggatatgcaatgcacgacgggttagtgaagatgaggcacgcttatttttacaacaacttatatgaggggttagctactgtcatgcaatgcaagtatgccatcgtgacttgaagttggagaacacattggtggatggta

SEQ ID NO: 124067 - DNA, 388 bp, Glycine max
  Clone ID: PAT_MRT3847_83039C.1
gtgtcgtcgtcgttggctcagtgctggaaacgaatcgaggtctgaagaggagactagaaggagggaagactttgacatcgaggtcgtcatcggtgttggctccggtggcgccgacgattggaggaggattgtgaaagagaaagcggtggtgtttgttgactgtttttttgtttttgtttttgtgtttaaatttggctgtcattgttgaacggaggaggtggggtgttgttcgtaatttccaggtgggagagatgaggacagggccagagttaaattggaaaagacaaaaagataaagaaaatggaaaatgaaaataaaaatttccaaccattcatttaaaatttaatggaaaaaaaaaaaaaaaaaaaaaaaaaaaaaaaaaaaaaaa

SEQ ID NO: 124068 - DNA, 152 bp, Glycine max
  Clone ID: PAT_MRT3847_8303C.1
catgctcctatcaccacccaggtcctacggcacgcaccggataacttcacggagcaagatcatcttcggcagggcgaagtgtggcagttgcaaattttcgggctttgcttgacggtacactgattgctgtcaagagtctggaatctggctca

SEQ ID NO: 124069 - DNA, 334 bp, Glycine max
  unsure (1)..(334): unsure at all n locations
  Clone ID: PAT_MRT3847_83040C.1
cacaaatgggcttagagaaagtttaggggaaggaggtcacggaggagagtacaaaggaatgctcactagagaaatcctggttgctgtgaagatactcaaagacacagagggagatgggaaggatttcataaaagaagtgggaagcagagggaaaattcatcacgcaaacgcggcncgcttgtttttttttagagaggaggggcaccaaagagaacacgattatgatttcttcccaaacgggacacgagagagatgcttggctcgaccagacaagaaagaggcatctcatgggtgggagaaagtggaacaaaatgatcgtggcggtggcagagga

SEQ ID NO: 124070 - DNA, 102 bp, Glycine max
  Clone ID: PAT_MRT3847_83041C.1
cgccttccggtctaactcataactcagatgagagccctctctaagtagtctagtagtagccacggcaattcctgcctccagatgcaccccatcaagtttacc

SEQ ID NO: 124071 - DNA, 210 bp, Glycine max
  Clone ID: PAT_MRT3847_83042C.1
gcagggaggggagggcacagggtaagacccaaccgaaaacctgagttcagggccagcagagaaagcgggcaccagaagggcgcgagagcaaaaggaatgagggggaagggcgaacaatggggggatgaaacaagaaataggcctcgaggaagggaagaaggaacgcaagaagaaaagcagaaagacatagggaggaaccgctaaaggaga

SEQ ID NO: 124072 - DNA, 571 bp, Glycine max
  Clone ID: PAT_MRT3847_83043C.1
ggggggtaaatgtctgtatgtcacatgaaaaatgttcaacatttgtcattgtaacttgtaagtgtggggatattaccgtcttcggagtattcaattcacattacttgaattgaaagttgcagttgattattttttctgacaggtttccttctcaaactagaaaacagtttatggcactgctctagtgttactataaaagtaaacttttcagagaattagggacatattatctgtccaaattatgtaataatacacttaatatttgacataaaagagaggttttaatgtttttaaaagaattttgtcaacaaacgtatcaggatttgatttataggttattaactgtatttgtacataataaatgcaaactttaaggtgtgaattattgagtctcttacatgtccctttccactagtaaaacaccaaaaccttttggattgaagcataaataatgtaaatgctcacctaccttgttttgaaattctactttttattagaaaaatgggggtaacaatgatcaaactctagaccacttagtgcccgtttggtttggtgttcattgttgggaatg

SEQ ID NO: 124073 - DNA, 185 bp, Glycine max
  unsure (1)..(185): unsure at all n locations
  Clone ID: PAT_MRT3847_83044C.1
gcatatctcatttganttaattaatttgtngtagtttagtactgaaaaatgggttcgaagatagcaacantacctaccctaggcctgttggccatgctccttttgatctcctcggaggtcttagccgctagtggtggtgcgggtaactttggtggtggtaaccctagtgttngtggtggattacc

SEQ ID NO: 124074 - DNA, 492 bp, Glycine max
  Clone ID: PAT_MRT3847_83045C.1
ccacattcattttaatcctaattctgctctttttgatcattcgatttttctcctcaagatgcagatattcgtaaaaactttgaccggcaagaccatcacccttgaagtggaatcctccgacaccattgacaccgtaaaagctaatattcaatacaaggaagggatcctacctgaccaccagagacttatctttgcgggtaaacaacttgaggatggtcgaacccttgtcgattacaacatccaaaaggaatcaaccctccatcttgtgcttcggctgatgggtgtcatgccaatcttcgtcaagactttgaccgtgaagaccatcacccttgaggtggaatccttgaacaccattgataatgttaaggccaagatccaggacaaagagggcatccccccagatcagcagaggctgatttttgccggtaaacaacttgaggatggaagaacccttgctgattacacattcagaaggaatccacccttcacttg

SEQ ID NO: 124075 - DNA, 124 bp, Glycine max
  Clone ID: PAT_MRT3847_83046C.1
gatgactaattgattttcctggggggggtagaatatcaatcttacaaaaagctaccactacatacaaatcacactttaaattagaaagcttgcctaccctactaagctcttgcggagagtggca

SEQ ID NO: 124076 - DNA, 269 bp, Glycine max
  unsure (1)..(269): unsure at all n locations
  Clone ID: PAT_MRT3847_83047C.1
cgcgtnacgtaaggctcggnnaattcggcttcgagctcggagccgatacattttgggtttcgctcacaaagacttcatttaattacactcggtttattgtttctttttctccccaacataataagggagtgggagcgtgcgatttgaccttttcaagcctcgaggtggcctagagaaatgagcccaaaatatataactcatgttttacaaagggggacaacatgaatacggtaatactatgcgctaatggcagagtgacaattattcct

SEQ ID NO: 124077 - DNA, 1004 bp, Glycine max
  unsure (1)..(1004): unsure at all n locations
  Clone ID: PAT_MRT3847_83048C.1
cctttccctcgcccaattcctaattgtttaaacctaattctcatttcttcatcgttcgattcttctcctcctaaaggtacgtctctggtttcctctctctcttgttcattcttttcgtaatagcaaccttattagccttcgtttattgatttttctcctaattacacttcaattttttcgatttgtgtttgttacgtcaatctgtatatcttttttgttgtcgtcgaatccgaaacttttcattcgcctttctgattccgtaaatcgtttgttaagtgcaacatctttccctgttcttaggtatctgattgatttctctctttctttttttttttatcagttttgaggaattagggttcgtgatctgatttgtttctttaaaatttccccggttcttaattaggctctgcgatttaatttcttttatcatatttgaagaatcatggttctttcttggtttgatttattgtgcactcagtttctgatatgcaaaatctttccctgttttaattaaggtttagggtttgcgagttgtcattttggaaaatagggtttgtggtttattgattgtgtaatccgtttggttgtaagcagaaacttctctgttttaaatcattgtttgtgatttagctctattttttatggttctgtttgtgattgaacagatgcagatcttcgtgaaaactttgaccggtaagaccatcacccttgaggtggagtcctccgacaccatcgataacgtgaaagctaagattcaagacaaggaagggatcccacctgaccagcagagacttatctttgcgggtaaacagcttgaggatggtcgaacccttgccgactacaacatccaaaaggaatccactctccacctcgtgcttcgcctcaggggtggcatgcaaatctttgtcaagactttgactggcaagaccatcaccctcgaggtcgaatcctcggacaccattgataatgtcaaggccaagatccaggacaaggagggtatcccn

SEQ ID NO: 124078 - DNA, 946 bp, Glycine max
  Clone ID: PAT_MRT3847_83049C.1
tgctcggaattcggctcggcaaaaaaccaattcaagatgaagataaagtctcatttttccttctccctaatgtttcttataggcatagccattagccacacacatgtttctttagcagaatgtgacaatgtgaaggactattgccctacaattcctccccaaaagcaaaccatattcctcaatggcttcccctgcgagaacccaaataacacaattgcacatgatttcaagagcatggaactaagcaagccaggttcaagagacaagttaggttcattagttaaaattgttacagcttccaagtttccggggctcaacgcactcggcctcgcgattggtagaagtgacattgaagtggatggccttgtgaacctccacaatcatccaagagccactgagatgatctatgtcagccaaggtgatgtagtcgctgcgtttcttgacactcggaaccagctcttccagaagattctcagggctggtgatgtgtttgtgatccccaaagggttgtttcacttcttgctgaatcgtggtgcacaagttgcaactgtgttctctgtgtttaacagccaaaatcctgggtcaggaccactcacttccataccttctgacacgttggaatcggttcagaagatcaagaggaaggttgtctcactttctgagtcagaacttgatggtgttagtgatttgacttctgcagtgttggatatcatttacagttaactattaattaaagagtattatatcatgattcatgactttctgtaatttgttgcacggtactactatttatatcatgtgtttgtggtcttgtggctaatgtaatatcacaattgcatttcactttatagtttctagttttatgacaatgtaaggcactttattgtgtaggccattgcatcaattacattctggagagtcataccatcttggaaggactttaacc

SEQ ID NO: 124079 - DNA, 2784 bp, Glycine max
  Clone ID: PAT_MRT3847_8304C.1
actatacggctgcgagaacgcgacagaaagggatgatttcttaattttcttgattgcgagagtcactagcgaaatccccccgaaatgatgaagggtctttctttacattgattgtcagtttgccactttctactttccatcatcgccttgggacttatccttcttaaacccatttccttcacttccatttcatgcgaaaaagccttacttgattcttcgaaaaggaaggaacttgggacttgtttctctcagagatggcgttgcctaaggttgatttcgaggttggagctgatggggttgctgtcatcactatgtgcaacccacccgtcaatgctttggccattccaattatcatggggttgaagaacagatttgatgaggcagctaggaggaatgatgtgaaagctatagttttgactggcaaaggtgggagattttctggtggatttgatatcagtgttatgcagaaggttcaccggactggggattcctcgcatctccctgatgtctcagtggaactagtagttaattcaattgaagattcgaagaagcctgttgttgcagcagtagcagggcttgctcttggaggtggcttagaactggctatgggatgccatgcccgtgttgcggctccaagagctcaattgggtctaccagagctgactcttggtattattcctggatttggaggaacacagcgtcttccaaggcttattgggctgtctaaagctgttgaaatgatgctgacatctaaaccaatcacatcggaagaagggaggaaattaggacttattgatgctattgtgtcttctgaggagttactaaatgcatctaggttgtgggcacttgaaattggagagaggtgcaaaccttgggttcgttcacttcataggacggacaaaattggttctctgtctgaagcacgtgaggtgttgagaactgccaggcaacaagtaaagaagactgttccacatttgcctcagcagctggcttgtgtagatgtgattgaacatggaatagtccatggaggctacagtggtgttctaaaggaggcagaagtattcaaacaattggttgtatctgacaccgcaaaaggtttaattaatgtcttcttttctcagcgggcgatatcaaaggtgcctggcgtaaccgatatcgcaattaagcccggaatgtgaaaaaggctgcagttgacgaaacagaatggcaaatgcttcactgccatctgcttacaggtgttctggattactcacatgttatagatgtggacttcggtccttgaggctgtaattgaaaatatcagtctcaaacaaactatatttggtgatcttgagaagatttgtcctccacactgcattttagcatcaaacacatcaactattgaccttgatgttgttggtaaaacgaccagctctcaagatcgcattgcgggtgcccattttttacagtcctgcccacattatgccacttttggagattatacgaactggaagatttgtcctccacactgcatttgatcatcaaacacatcaactattgaccatgatgttgttggtaatacggccagctctcaaaatcgcattgcgggtgctcattttttcagtcctgcccacattatgcctcttttggagattatacgaaccgataaaacatctgcacaagtgattcttgatctgataacagttggtaaaatcataaagaagacacctgttgtggtgggtaattgtactggctttgcagtgaataaaacattcttcccatattcacaaggtgcccatttgttggtcaacttgggcgtggatgttttcagaattgacacattgatacgcaactttggctttccgattggtcctttccagcttcaagacttggctggctatggagttgccgttgctacctcaaaagtatttgctgatgctttttctgatcgcatatttaaatctccactgcttgatcttctgatcaaatctgggcgaaatggcaaaaacaatgggaaagggtactacatttatgaaaaggctggcaagccaaaacctgatccttcaatactaccaatcattgaggagtctagaagactttgcaatattatgcccaatggaaagcctatatctgttactgaccaagagatcgtggagatgatactcttcccagtagttaatgaggcatgccgtgttctagaagatggagttgttattcgagcatcagaccttgacattgcatctgttcttggaatgagcttcccaaattaccggggtggcattgttttctgggcagacttggttggggccaatcatatatataccagcctaaaaaaatgggcacaattatatggtaacttctataaaccctcaaggtatttggaagaaagagcactcaaaggcattcccttgagtgcacctgcttcatctactccaaagtcaatggcacgtctatgagaaagccaagtgttgagcatatatgttggatgttctacaatagaaaatgtaacaaccaatgtttgcttccttcctagattaaagaataaattattaaatttggtttcacaaagagaaaaatcgaaggaaaataattgtttcttggggtgacgagttgctactttaatcttaagtgattgggatttcgttgagtccccgttgtcgagctcttctgaaaagtttgccttcaagtttggtatgcgttttaattttacttgatttaacatgtttgcttagcatgaaattacgttccaagcgaaacgattcaatttcagtaacaacgaatgttccagtaattttttcagttgtt

SEQ ID NO: 124080 - DNA, 651 bp, Glycine max
  Clone ID: PAT_MRT3847_83050C.1
cgcagttccttgatctctcctctcaagatgcagatattcgtgaaaactttgaccggcaagaccatcacccttgaggtggaatcctccgacaccattgacaacgtaaaagctaagattcaagacaaggaagggatcccacctgaccagcagagacttatctttgcgggtaaacaacttgaggatggtcgcacccttgccgattacaacatccaaaaggaatcaaccctccatctcgtgcttcgcctcaggggtggcatgcaaatctttgtcaagactttgaccgggaagaccatcacccttgaggtggaatcctcggacaccattgataatgttaaggccaagatccaggacaaagagggcatccctccagatcagcagaggctgattttcgctggtaaacaacttgaggatggaagaacccttgctgattacaacattcagaaggaatccacccttcacttggtgcttcgtttgagaggtggcatgcagattttcgtcaagactttgacaggaaagaccatcaccttggaggtggaaagttctgatacaattgataatgtgaaaggccagattcatgataaggaggggtattccaccagaccacagatgctgatctttggctggaagcagcttgaagacggagaacccttg

SEQ ID NO: 124081 - DNA, 552 bp, Glycine max
  Clone ID: PAT_MRT3847_83051C.1
gtcccccgtatatatccgttcttttttcttccttccggccttccttccttcaacgctcagcactcaaatcctctgagagaaaaaaaaattagggttttgcatttcgggtcagacagactcagacatgggaggaggcaatgcccagaagtcaaagatggctcgcgagaagaacctcgagaagcagagggctgccgctaagggaagccagttggattcaaacaagaaagccatgtctattcaggtaaaatttccgctgttttgttctttgtgttatattataaccccgtgttcgtatcaaagattgtaaaatagagcaatatgatggcttggaaataaagctttgaaaattatgttaagttcatgcgaggacactgttaatgcttaaatacttagctgaaagtcttttatttacttctctttccgagagaaatatctctcataaagccaccttgctgctgttgctggtggtggtgctgacttttattcagcaattggtgcatgttgaaattcatcgaattttgcttggctactaatatatgcttattactaaga

SEQ ID NO: 124082 - DNA, 1806 bp, Glycine max
  Clone ID: PAT_MRT3847_83052C.1
attcggctcgtgaaattcattttaatcctaattctgcacttcttgatcattcgatttttctcctcaaggttcgtctctgtttcatctcttttcatcatcgcagcctaattagccttagtttattgatttagctttggtctttcaccatggttacatttttacgtttctatctttcgatttgtgattttttacgttaatatgtgtataccggttttgtcgttgttgaatccgaaactttccattcgactttctgattccgtatctcgtttgtcacatgcaaaatctttcccgatttttaatctggctatctgatttgatttgattttgaggaattagggttcgtggtttgatttgattctgtgattcgcttgttatatgtaaaatattcccggttcctaattttagggtctgcgatttattttcttttatcacttttgaggaatcagggatcgtggtctgacttattgtgcattatttagttgtatgctgcaaaatctttccttattttttaattagggtttagggtttgcgatttgtcatttttgggaattatggtttgtggtttattgattatgcaattcgggtttgctttctttccggtttttaatcagagttcctgactttgatgtttcttttttgtgattgaacagatgcagatattcgtaaaaactttgaccggcaagaccatcacccttgaggtggaatcctccgacaccattgacaacgtaaaagctaagattcaagacaaggaagggatcccacctgaccagcagagacttatctttgcgggtaaacaacttgaggatggtcgcacccttgccgattacaacatccaaaaggaatcaaccctccatctcgtgcttcgcctcaggggtggcatgcaaatctttgtcaagactttgaccgggaagaccatcacccttgaggtggaatcctcggacaccattgataatgttaaggccaagatccaggacaaagagggcatccctccagatcagcagaggctgattttcgctggtaaacaacttgaggatggaagaacccttgctgattacaacattcagaaggaatccacccttcacttggtgcttcgtttgagaggtggtatgcagattttcgttaaaactttgaccggaaagaccatcaccttggaggtggagagttcagataccatagacaatgtgaaagctaagattcaggacaaggaaggtatcccaccagaccaacagaggcttatctttgccgggaaacagcttgaagatggaagaacccttgctgactataacatccagaaggaatctaccctgcacttggtgttgcggcttcgtggtggcatgcaaatctttgttaagactttgactggaaaaaccataactttggaggttgaaagttctgataccattgataatgtgaaggcaaagattcaggacaaggagggcattccacctgatcagcagaggcttatttttgctgggaagcaactggaagatggtcgtaccttggcagattacaatattcagaaggaatccaccttgcatctcgtccttcgccttcgcggtggtttttaagcgtgttttttttcaagtgttcttgttttaagcgtgtcttttttcaagtgttcttgtatgtcatgtctgttatgttcaatttctcccttgaacttgtttgctgttctggtttaggtgctgctttttatgttttaatatgatgtattgagctcgtttcgccaaaagaattaaatatcaatatcgtatcatagttaaattcatatttcgtattattacttcaaatatatagttttttatt

SEQ ID NO: 124083 - DNA, 1611 bp, Glycine max
  Clone ID: PAT_MRT3847_83053C.1
cacatctgtctcgtctatataagatgactacttcgttcttgtatatactcttcaatattatcatctcttcctcttcttctagttccacccatactatactccctgccgggggtagcgagtaacactctctactcttcctcatcttcattattcttcaccctttctcatcatgtttaaacctaattctcatttcttcatcgttcgattcttctcctcctaaagatgcagatcttcgtgaaaactttgaccggtaagaccatcacccttgaggtggagtcctccgacaccatcgataacgtgaaagctaagattcaagacaaggaagggatcccacctgaccagcagagacttatctttgcgggtaaacagcttgaggatggtcgaacccttgccgactacaacatccaaaaggaatccactctccacctcgtgcttcgcctcaggggtggcatgcaaatctttgtcaagactttgactggcaagaccatcaccctcgaggtcgaatcctcggacaccattgataatgtcaaggccaagatccaggacaaggagggtatccctccagatcagcagaggttgatatttgctggtaaacaacttgaggatggaagaacccttgctgattacaatattcagaaggagtctaccttacacttggttcttcgtttaagaggtggcatgcagattttcgtcaagactttgacgggaaagaccatcaccttggaggtggagagttcagataccatagacaatgtgaaagccaagattcaagataaggagggtatccccccagaccagcagaggcttatctttgctggtaaacagcttgaagatggacgaacccttgcagattataacatccagaaggaatctaccctgcacttggttttgaggcttcgtggtggcatgcaaatctttgttaagactttgaccggaaaaacaataactttagaagttgaaagttctgataccatcgataacgtgaaggcaaagatacaggacaaagaggggattccaccagaccagcagaggcttatctttgctgggaagcagctggaagatggtcgtactcttgctgattataatatccagaaggagtccactctgcatttggtgttgaggcttcgtggaggtatgcagatatttgtgaagactctgacagggaagaccattaccttggaggtggaaagctctgatactattgacaatgtgaaagctaagattcaggacaaggaaggtatccctccagatcagcagaggctcatttttgctgggaagcaattggaagatggtcgtaccttggcagattacaatattcagaaggaatccactttgcatcttgtccttcgccttcgtggtggttgctaaggggaatcccttttatgaagtgttctcatatgtcttatctgtttgttcagtgtctcccttgaacttgtgctttgcatctctggtttaagtgctgctgtttattatgttttaaaatgatgtattgaactcgtttcagcgaaagtatgttgtttatgtttttattttaaatatcaatatcgtttcacagttaataagttgtttaatatttgattaaccaatcttaagaaaattaagattctattt

SEQ ID NO: 124084 - DNA, 263 bp, Glycine max
  Clone ID: PAT_MRT3847_83054C.1
gagaatatcattctgtcatttaatcttcaaacatcagatattatgcctgcatttccatacactgccccattctcctccatggtgcccgatgcgtgtcgcattgtgagatcctttatcaaaggctctgttgattacttgtcttatggcatacatgtgaatttctttggtgttgtgagaaagtacttggacatgttcctgattgatgtactaaatgtaacactgcttgagaaaatcaatagtgacaatgtcactgtacctcaact

SEQ ID NO: 124085 - DNA, 378 bp, Glycine max
  Clone ID: PAT_MRT3847_83055C.1
gtcttctatactcttattgctttttttatattcgttttggcactctgccccaaaacaagcggaagtagtggggactcgaaactaaattaacgcctgggaaaactcgcagttgcaacttataactaggccatgggcggacatttatacaaacaaccaaagccccaaagatcattgggggagttatccgaacacttacttaatgggtacacaagacccatacaaaccgggataattattggccggccctttatgatactttgactgcctgggccaagactggttggtcccaccggggggagcagtcttgggccaaacaaaaagggtctccattaccttggaaaaacacctctgaagctggccactttttggccccaggaa

SEQ ID NO: 124086 - DNA, 249 bp, Glycine max
  Clone ID: PAT_MRT3847_83056C.1
cgaactcataggaaactcgcacgattaataccggggctgacaagctcactactcgtgaggctgccttctttttttttttttgatcaaccaaaagcaggactcaatacgtaccggggccagaggggcgtggaatgtaacttacaactggaaaacaccaccaatttatgtgtctctaaagctgtaccgtaataaccgacaaaaactattggggccattgactatcattgttttaacaactcttagaaacat

SEQ ID NO: 124087 - DNA, 799 bp, Glycine max
  Clone ID: PAT_MRT3847_83057C.1
agttctcggccgaatggaagttcaattgcctctttagctgacagaagtgtggaagtgaataacgaggaaatcattctcaatgaaatttgtcaatccaggagcaagtcttgtgttgaagtcgagaaatgtgaatcacagtcggcggtcaccttcaacacaccccaggttctgttgaagtctgaagatggtgaaatggtggcgacagtggaggaagatgggcagtgcaaaaaggcaaatgatccgtgtttgtcaactgatactcagggcgcgggcgaaaagccacaaagatcctcttgtgatgttggttctatggaacagcagcctactaatataaatcctaggagacagagcacaagaaatcgaccattgactgttaaagcaatggagtccttgggaaatgaattcttgcatgtgcagaggagacggaaaaagaaagacatcctgtcacacattgatgctttcagcccatgccgcaaggctcgtacaagcaaaacaaagctgcatcgtcatagttcagatcatggaactgcagttttagtaaaagaaaagcatttaagtggagatcataaaatggagattgtagagttagtggaatgtttccaagccactaagctaaattaaagagcatttatacaggtatctttgaagctactagttatcatagatgttttgacttttagaaagaaatggattttgaaaatactgacattcctcctgtctgacatgcaaattttatgttctaaaggtgtcagagttatttgacatactgtacagaattttgccatacttcagagaatgc

SEQ ID NO: 124088 - DNA, 159 bp, Glycine max
  unsure (1)..(159): unsure at all n locations
  Clone ID: PAT_MRT3847_83058C.1
attggctcgaaattgaaatagggttgtgttccctcgtaatatcttggtgttcccctccttatgccaataaacgcaagtcacaaataggatgggtatacacaacaattcntattttcatatttcataatatacaatcttacttcttttatggatacaaaa

SEQ ID NO: 124089 - DNA, 307 bp, Glycine max
  unsure (1)..(307): unsure at all n locations
  Clone ID: PAT_MRT3847_83059C.1
cacgcgtacgtaagctcggaattcggctcgagcttgagttctctttgtaaaaatcagtaaatggaagtcacctcaatttaaaaaaaaaannnaaaaaaaaaagggggggccgccgnttnnngnnnnnntngncncgggntttntttcgggccgggtnccngngggggtncnngtttnccctannggggntngttttagnnttnggggnantcngggncanagnnnttnccngggnnaattnnttnncngntcaaattccaaaaaaaggggggnnggaanaannncnnnnnnnnnnnnnnnngnnnnc

SEQ ID NO: 124090 - DNA, 723 bp, Glycine max
  Clone ID: PAT_MRT3847_8305C.1
caagccaaaacctgatccttcaatactaccaatcatcgaggagtctagaagactttgcaatattatgcccaatggaaagcctatatctattactgaccaagagattgtggagatgatactattcccagtagttaatgaggcatgccgtgttctagaagatggagttgttatacgagcatcagaccttgacattgcatctgttcttggaatgagcttcccaaattaccggggtggcattgttttctgggcagatttggttggggctaatcatatatttaccagcctaaaaaaatgggcacaattatatggtaacttctataaaccctcaaggtatttggaagaaagagcactcaaaggaattcctctgagtgcacctgcttcatctactccaaagtcaatggcgcgtctatgagaaagccaattgttcagcatgttggatgttctacaataaaaaaatgtaacaactaatgtttgcttccttcctagattaaataataaattaaagttggtttcacaaagagaaaaatttaaggaaaagaattgtttcttgggggtgactagtaaggcctcagtatgctactttaatcaagtaatttccttcaagtttggtatgtgttttaattttactttatttaacatgtttgcttagcatgaaactacattctcagcgtaacaaaacggtttcagaacttaaattattatgagctaaaggttaacaatgtg

SEQ ID NO: 124091 - DNA, 211 bp, Glycine max
  Clone ID: PAT_MRT3847_83060C.1
ccacgcgtccacgcattcgaaaacatgttgataaaacgagatgttcaaagctgttagggatggcaaatccggcaccaggccactctacaccgccatgcttgataaccctcaactacgatgaaccttcattcccaaggcttaccccaatctcaccattcaattgctcactaacatcatcacactacttcttcgacaatttcgttctccccat

SEQ ID NO: 124092 - DNA, 549 bp, Glycine max
  Clone ID: PAT_MRT3847_83061C.1
ggttttgtttcctacgcccttcttccctctttctagagctttcattaagacaatgctgaacacattctttgccttcacggactgctaaagttcttaaatacgtaggacatagcttaattttgcttgtacatgactgtggccccataagattacccagtcctcaaactgcaacctttgctcatgatggcctgtccactctctacagacccctttgcccttgattatgaccctacatttctcatttgcagccggtagcacatcttctctccctggactcattggctgaatgccctgcctaaggaaccaccctaagagctgactctggccgagcctgatagaagaacccactctcacctcataggacagcaaacatcctagctttcctcaactatgtgcggatgtgatatgccatagcatatcaaatctctccacctgctaggattcagcggggaacaatcccttgcctacaagataacggtgaacaactcttgcaacagccggcgaatacaaaacggcaggcccttggtggatcatgtgtgaattcgcaag

SEQ ID NO: 124093 - DNA, 300 bp, Glycine max
  Clone ID: PAT_MRT3847_83062C.1
cagcagaacaaatacagatccatccatcaatttcatatttcccttcagctcaccctcaaacggaggtatcaatacacggagggggtgatcctctacatcaacaacagggattgatcttttaccaccaagatacttggtaccgtcatgctgctacttagccttaacccctctaaggcaaacctgtacctcttaatataattcaacacaactactgggaatagttccattaacccaccataaatgctgaatacaatccctctcaagatgaaacacactgattcagaaaaggagctccatgag

SEQ ID NO: 124094 - DNA, 716 bp, Glycine max
  Clone ID: PAT_MRT3847_83063C.1
attcctacaaactttaattgataacttaatcatgtgaacaaaaatacttggatatctgtaaacaataaacttttaaagcaacgaataatgtgtagactactagtacacacaaaaataaataaataaaagactagtaggcacagttctcaaaacttccaaacaaacatctttctacaaattataaatgattctcttaaaaaaatgttgttcgcactcctagcaagagcaatattcaggtctgtcattgtgagcaggactggttgcttcaaatatactcaaaggtgtatcacttcttaagttcctatcaaaatcttatggccagaatagcatgcacaaaggagtggatctgcaacaaatggatcaagaaatatacctgttgtgtgactaggtatgctgtacacagcgtccccctatagttagtatagttaacagacatcaaacaggaagaatgtttagaccaacacgagctcctcttctgctgcttcttgttcctggtcctttggcagtcttccttcccgatatggtcgtagtatccgcctgatttcttctgcattaagcgtctcatactccaataatgcatttgctagagcatgtaatgccttctcatgcttccttagaagggcttttactcgatcatatgcttctctaagaagtttcacaacctctgcatcaatacgggactgcaagtcagaactaggactctcctttatatgaat

SEQ ID NO: 124095 - DNA, 277 bp, Glycine max
  Clone ID: PAT_MRT3847_83064C.1
gggagtagcggcattaaaaatgcagatcttcgtgaaaactctgacagggaagactataaccctctatgtcgagagcagctacaccatcgacgatagcaaggccaagattcaagacaaggaatgcattcctccggatcatcagcgtttgattttcgccggaaagcatcttgaatatggaatgaccctggccgattacaacatccagaatgaatcaacccttcatctcgttctcaggcttcgtggtggcatcatttacccttccctcatggctttggct

SEQ ID NO: 124096 - DNA, 458 bp, Glycine max
  Clone ID: PAT_MRT3847_83065C.1
aggaagaaaaaaatctcaaaactatttgattccttcgagctcggtaatttggcatgaaaagcacgtatccagttgggttcttagaaacccttcaacaaacgacaccagtgacctatgtttgtatggaacttcaatcatttaaggtatttgtttgcctcgtgataccaaaggtagaaaaatctcatgccaatggaaatgggggaggatgcccaattaaagggaacaaaatagtggttgaaattttaaacatatatggaagagaaggaaacctctatgaggtcacaggagctcccccccagaaaacttttcagctaatcttgaataatatatttgaatcttggacccatcatgcccaacctttgaaagaaaaatatcccaaacaaataaggggggctaagtaccaataaccaagaatcctgtgtcgatggagcaatcaatgttgtgcaactccttggact

SEQ ID NO: 124097 - DNA, 818 bp, Glycine max
  Clone ID: PAT_MRT3847_83066C.1
ctgaggaggtgtggagtttcaatgatgctacacctctaaatacattacagagtgcattagaagaacagctggagagattgaggaattccatggattatcttcaaaataaactaagggtgggcttggaaattgaaaatcatttgaagaagagagtcaatgcattagaaaacaaacaaatttctatggacaaagtgattgagaatagcatagcagacttgaaacattatcattctaagtgtagggatgaaattatgaatttacttggtgatggagaatccagtattaaatccataatcaatgcaattgatgaaaaagtctggagttttgatctgagtactgtaccgaatttgacccctcaaagagatgcagaaccagaagagtctgaatgtgcagatttacatataagccctcaagctaaacctgtctcagagtccaagaggaatagtcctagtgcactgtcagcagatgctggtgtaaaaggtgatccatctgatgttttagcaatggcattgcaagagaaggttgctgcattattgcttttatcacagcaggaggaaagacatctattggagagaaatgtgaattcggcccttcaaggaaaaactgaagaacttcaaaggaacttgttgcaggttactaatgaaaaggtgaaagctcttatggaattggctcaattgaagcaggagcatcaattacttctggaaaaattcggtcatgaacctaaacaagggaaaggtgtggtcaacactggagatagacagcttgttactcgtgaaagagatggaactttaaagaacttactgaagaaatcgtatttg

SEQ ID NO: 124098 - DNA, 647 bp, Glycine max
  Clone ID: PAT_MRT3847_83067C.1
ggatttgccgctgctacacgtgtagcagtgccgcctgcttgggggggggggggggggaatgtgagtacaagagggggaggggccacgctggatagtgggagggaagaagtggtcggccaacacgataagtaggaaggaggggaggggagggggggtactacgacggatcatggggccaggggatagagactatggccttataatatatacaccaggtggtggagctgcgcgaatgttgcctaatatggtacgagtaagcgtggttgggggtaggttggcgcctaaggtttacgtaaaccaagaaacaacaggactaacgagaacagttaagcgtactaaagcttagaggtagattaccctataagtgatcattagtattgaagccaagaaatgtaaaagtggcgttagaaccagtgagcgtctaagggaaaaattgtgtaccgagaaatgtggtgccagtgggttaacttggaccagtgtgagcaaggctttagctaggtatagagaagaagcgtggcctgccaagggtcgacttagtgaatacgtaggggggagggcgggtgtggccgagaacgacgccgctgccgaacgctaagtgaacgcgtgtggggagtatgctttggaacgacaaaatgggcaagagtagt

SEQ ID NO: 124099 - DNA, 278 bp, Glycine max
  Clone ID: PAT_MRT3847_83068C.1
gaggctgttccaagctttcattttcttctactacttttcttttcaaattcttcctaacctgacaaaaatagctgaaagatcaaaatttacttatgtgtcttgtcaagatatactttctgtgtgtgtgtgtgtgattatatgagaataataaaatgatataatcttttacttgattcagcttgattagtctttgaggggtgaagagcttgcaaaaacatggcttttccaaaccaatccatgtcatcagagtctccccagagaaagatgggaagagggaa

SEQ ID NO: 124100 - DNA, 364 bp, Glycine max
  Clone ID: PAT_MRT3847_83069C.1
ttaaagaatgcgacccttcaaatcttctcaacaattatattattaaaaccaaaaacctcagccatttctgacaacctccaacagataaaataaaaagaacaccacattgataaattgacttaactagtaactttcccagttctaaaaaataggtccttcaaatcttctcagcatatatattacttgaaaataaaaccaaaaaccatagtcatctctttaaaggacaacctccaacggctaaaagaaaaagaacaccacattgataaattgacttaacaagttaaattatctttctcagtctaaccataggttctgaacaaaactaagccacataacctatccagccttcaaataaacatcaaaa

SEQ ID NO: 124101 - DNA, 1191 bp, Glycine max
  unsure (1)..(1191): unsure at all n locations
  Clone ID: PAT_MRT3847_8306C.1
ccggaataaacccgntcgacccacgcgtccggaggaatctagcgtcttccaaggcttattgggctgtctaaagctgttgaaatgatgctgacatctaaaccaatcacgtcggaagaagggaggaaatttggacttattgatgctattgtgtcttctgaggagttactaaaggcatctaggttgtgggcacttgaaattggagagaggcgcaaaccttggattcgttcacttcataggacagacaaaattggttctctgtctgaagcacgtgcggtgttgaaaactgccaggcaacaagtcaagaagactgctccacatttgcctcagcagcaggcttgtgtagatgtgattgaacatggaatagtccatggaggctacagtggtgttctaaaggaggcagaagtattcaagcagttggtcatatctgacacctcaaaaggtttaattaatgtcttctttgcacagcgggcgatatcaaaggtgcctggtgtaactgatatcggccttaagccaagaaatgtgaaaaaagctgctgttattggaggaggtctaatgggttctggcattgctacagctcttatactaggcaacattcgtgttatactcaaggaaatcaattctgaatttcttctgaagggaataaaaacaatagaagcaaatgttaatggcttagtaagaagaggaaagttgacgaaacagaaggcagatgctgcactgtcactgcttaaaggtgttctggattactcagaatttaaagatgtggacttggtcattgaggctgtaattgaaaatatcagtctcaaacaaactatatttggtgatcttgagaagatttgtcctccacactgcattttagcatcaaacacatcaactattgaccttgatgttgttggtaaaacgaccagctctcaagatcgcattgcgggtgcccatttttttcagtcctgcccacattatgccacttttggagattatacgaactgataaaacttctgcacaagtgattgttgatctgataacagttggcaaaatcataaagaaggcacctgttgtggtgggtaattgcactggctttgcagtgaataaaacattcttcccatattcacaaggtgcccatttgttggtcaacttgggtgtggatgttttcagaatcgacagattgatatgcaactttggctttccgattggacc

SEQ ID NO: 124102 - DNA, 359 bp, Glycine max
  Clone ID: PAT_MRT3847_83070C.1
cgaatatgtcaagccttactttcatggcactaacttgaaaagccaactaactagatattacatacaccattactgatcgaatcgaaacactagtgcaccttgctattacaaaccatcagattgtattttccatgataaacttagcaacaccaatgatttatggtgatacccggaccaagcacttaaagcaaacttactattgtcacgtacatctgcaatgcacaacttatatacaatcccgcgacaccttactataatcgaactccactatccacactaagctaacgcaacgaaaaggaaagctctctctcatacttaatggatccagatcactgatctgcctaccataacacatattg

SEQ ID NO: 124103 - DNA, 492 bp, Glycine max
  Clone ID: PAT_MRT3847_83071C.1
aacaggtgaaaaacagtcaccaactgatgggctgatgggaacatcaccgctgtcttatcaagatgatgttgcccgccagcatattgtgccagttgaaaactgggctaaagaggatgctcttgtggctaaacctgttaataatgatataccttttgttggcggcacatctgttgaaaattctgactgtatggttcaacaatgtccaacagaatataccaatgaacttgctagcactatttcaaaagcagatgctgtggagaattggatatcacaggaccttctcaaacctattgatggaaggctggacaacccgaagataggcaatcctgaaaattttctaaataatgataaatttgattacagcactcaacatgctgtagagaagaaaggggtggtttcagataacaaccatggcaagtcaaaattgaccactggtgcaaatcaaattaatatgatggatatgcttcctagttctacagtggaatataatga

SEQ ID NO: 124104 - DNA, 2567 bp, Glycine max
  Clone ID: PAT_MRT3847_83072C.1
gtcgtgacaagccccgaatgaaaatgagtttgattttttctgtgctttgtttcttcctaggtatgaatctgctacaatttctctgattctgaaataacaataactcatagtaatacccccaaacaacaaaatgggagataacaaacgtaagagaggacgcaaagccaaaacccccgcctccgaaaccctagaccaccccgcccccgtcaccaccaccgctccaaattccacctccaccgccatggacgatgtcttctccgtcggcaacgtcgagctcatcgacaccacggcctctccgcaccaccgccgcctccgcgcccgtcccaaccactccgagaagccccacgctctgcccacggggcgccgccacgcccgccccctcgacaacggaggcggtgacttctcggtccccagcgacgtcgtcggggtgtctcctgccgtgtcgacggaggcggacccggcagcgtgggaggcaagggtgctgccggcgctggagtcggtggtgaaggtgttctgcgtccacacggagcctaatttctcgctgccgtggcagaggaagaggcaatacagctcgagcagcagcgggtttgtgattggcgggagaagggttctcaccaatgcgcattcggtggaacactatacacaggtcaagctcaagaaacgtggctctgataccaagtacttggccactgtgctcgccattggaaccgaatgtgatattgccatgcttacagttgatgatgatgagttctggcaagggatgtcacctgtagagtttggggaattgcccacacttcaagacgcagttacagttgtgggctacccaattggtggagacactatctccgtgaccagtggtgttgtatcgcgcattgagattttatcttatgtccatggttctacagaacttctaggtttacagattgatgctgctataaactctggcaattctggtggacctgcatttaatgacaaaggaaactgtgtggggattgcatttcagtccctcaagcatgaagatgcggagaatataggttatgtcattccaacgccagttatcatgcattttatccaggattatgagaagaatggaggatatactggattccctattcttggggttgagtggcaaaaaatggaaaatcctgatctgcgaatggcaacgggcatgaaacctgaccagaaaggtgtgcgtattagaagaattgatcctactgctccagaatctaaggttttgaagccatcagatgttattcttagttttgatggggttgacattgccaatgatggaacggttccattccgtcatggagagcgcattggtttcagttatctcatatcacagaaatatactggggataatgcagcaatcaaagtactgcggaattcagacattttgaaatttgacatcaaacttgatagtcacagaaggcttattccagcacacagcaagggcaagcctccctcatattatattattgctggatttgtttttacaactgtttcggttccatatcttcgttctgagtatggaaaggattatgaatatgaagctccagtcaagcttttggataaactgctgcattcaatgccactgccaccggatgcccaacttgtcgtggtctctcaggtgctggtggctgatatcaacattggatatgaagattttgtgaacacccaggtccttgctttcaatggtcaaccagtgaaaaacctgaagagcttagccactatggtagagagctgcaatgatgaatatctaaaatttgatctagatttcgaatttgacattaaacttgatagtcacagaaggcttattccagcacacagcaagggcaaacctccctcatattatattattgctggatttgtttttacaactgtttctgttccatatcttcgttccgagtatggaaaggattatgaatatgaagctccagtcaagcttttggataaactgctgcattcgatgccacaatcaccggatgaacaacttgttgtggtctctcaggtgctggtggctgatatcaacattggatatgaagatattgtgaacacccaggtccttgctttcaatggtcaaccagtgaaaaacctgaagagcctagccactatggtagagagctgcaatgatgaatatctaaaatttgatctagattatgatcagatagtggtgcttcgcacgaagactgcaaaagcagctactcttgatattctttcaacacactgtattccatcggcaatgtctgatgatcttaagtcatgatcacaatgtagtagattctgcatcatgatctttagtcattatatgcagatgtgttggcttgacttaacttttagttagattgtttccttacatgtatgtttaattcaagtgctaatcccccttgggactctgatggttccacattttgaaaggaatgatagataggtaagcaggatttacattacaattcattgtcttttgatacattggcctttttcaaattttagggaactgagcaatgtaaagagtttccattactttcacctatgtgatatataccagagcaggcagtgcaaaacag

SEQ ID NO: 124105 - DNA, 821 bp, Glycine max
  unsure (1)..(821): unsure at all n locations
  Clone ID: PAT_MRT3847_83073C.1
gaaaagctaatcatgtacttatgatatttattccaagtttttcatccattgtcactagttctttttcccctgttcacatttgcaattacctgtagagaagcacacttctattctatgatttcaagaacccttttcttctgttagactttctattctaattttagatgcagcagttttcaattatgttttcaaaattggaccaattaacctacattacaaagtctttcatttcttctttgatggtctgtttatggttaaattgttttttaatcattaatgattaaatacatccactcgtattttataacataataaataataaaataacgtattaatgattaaatgacttaattatgttgatatattcctctagtttggaatatatgtgatattggttttctaaaattaatagattcattttacaataagtttgagtagaaaatgagaatttaaggtatttcaagtaaaaaaaaattgaaatcaagaaggagaccaaatttaattaattttaaaatagaaggatttaataattagaagaagaaaaaatggggaaccaaaaccacaccagtcagactaaatgggtaaaaaattaattacgctaaataaaaaactatgaaaaccacaaaaactaaaatgcggatattttatttgtaattcagaaattgataaattaatagttatttttaactattttttacaattactaaatataaaatactcataatgataagaaaaacattntaagaattttatatgggttgaataaaattataagtactcatgatgaattntaattaataagtatcttaattctcacccac

SEQ ID NO: 124106 - DNA, 767 bp, Glycine max
  Clone ID: PAT_MRT3847_83074C.1
tttttcaaaaaagaaatcttataatacatcaaaagctgttgcaaagtagctgatatcaaaatgaaatcatacactcttgaggcagtgccaatggctgcaaacgatgaaggaagcgtggcggtggaaaagatccggatcctttatttcacatatccagattcatgtttgaccctatatttaaaaaaaaaggactaacttgtaatttcttacaaattcagttacattacaaaaaattaaaattaattaataagctacggtaactccttagtccttagccaccctgaaccacctaggcgcaagaatcattattgtgtaggcgcatacttaacaatcactcttacacacaactaataaaaaattgacaagaaataaaatataaagaagaaatatttattcctttctagagattctcaccctaggacttaagtcccagattccttccgccttgtatggagatggagaggccctcaaagaggtgggatgtttctttggaagacccttcatgggaggctgttaactaatgtggagcgcagttaagtggtgcctttccatttctgataactgttctaagtgtaataatgctcctgaaactattatgcatgcatgcgctgagggactatgacgaggcaacaacttttgggtctgaccatattcaccagggtgatgtttgatatggacctcgtgccagcagtgaatatcattatattttctgttctgtccctttcgtatcttttgcaagcatggggaaactactaaagatgcatatc

SEQ ID NO: 124107 - DNA, 650 bp, Glycine max
  unsure (1)..(650): unsure at all n locations
  Clone ID: PAT_MRT3847_83075C.1
cacgcgtccgctttcaaattcctggagaaacattgatcattttacatattctttctcttcctgatactgcataacaattaatctagagttggaggaggatgctcaataaaatttcctttctttttattagtctctacattctgtaccagcatctatcatatttcaacaaaacaagagtgtattagcaaaacccttattttataattatttaagttatatgaattttttattcaggtaaggatgaaaattgcccataaacagtaaatatatgatgattaccagatcagaattgttatggtcccaaggggactctcatagtggtatgccttatgctagtaaaaagttatgtcattatgtgggacatgatgacacaatagtttatgtttaaacattctatggtaagaagtggtaacccttttcatttatattttggaatatatctatcattattctatttctgtatttntaaacaccacaaatcaattacatatgtacaccactatataacatggtgaaatattcagttgacttgaagatgcaccagtgcatagtgttcagctagcttgtaacttttgaaggctngattgtgtattctggacatttagtagcctaatagttgcgggattagtaaaattgctctacaattttgc

SEQ ID NO: 124108 - DNA, 1110 bp, Glycine max
  Clone ID: PAT_MRT3847_83076C.1
tctcgagccgaatcggctcgagacggctgcggaagacgacagaaggggaaagttcctttttttttccccccacatttctatcaccggcataacacattagccttttacagcgtcttcaattctcttgatcctaatttccattttttttggcacaattgttgctttccgtatattctcctcctccttatctctatttaaatctgtctattacaatttgaaagcgatggatcaaggagagcttgcacgagtttttcaaatgtttgatcgaaatggggatggccgtatcacgcgaaaagagcttagtgactccttaaaaaaccttggaatcaccatcttggagcaagatttgagcctaatgatcgagaagatcgacgtaaatggagatgggttcgttgacatggacgagtttggcgaattataccaaacaataatggacgagaaagacgaggaggaggatatgaaggaggcattcaatgtgtttgatcaaaatggagatgggttcatcacgggagaagaattgagcgcggtgttgtgttctttaggcctaaagcatgggaaaaccatagaggattgcaaaagcatgatcaagaaagtggacgtggatggtgatggaatggttaactacagagagtttaagcaaatgatgaaggctggggggtttgctgcggcttcgttaagttgatgcatgcatggctagaggatgtgcacgtaagtcattttttcttaattttatggataggtggagttttgcacataaaagaagaaataatcaagataccctttgtagaatatattatgtattgggggaatggtttcttggttggtgaatatgtttgatgagaatttctcaagtcgatcttgtacggttgaatattggttattcctcaatattttccaatctaatgaacctatatatcctgttgttgtgtaaatgaaagttgctttgtccgcatccaccaaagactttttttttttgtcacaccaatcttttccattgccacgagtttgtggcttttcacatgcatattttaagttttattttgagaatgataaggttgatttgatgattgaaaaagaaaagttgaaacccacgcgtccgcggacgcgtgg

SEQ ID NO: 124109 - DNA, 474 bp, Glycine max
  unsure (1)..(474): unsure at all n locations
  Clone ID: PAT_MRT3847_83077C.1
cccacgcgtccgacggctgcgagaagacgacagaggggggagagacggagaccgtgcgaaccaacttccactgcatgaattccacagcgcattcggtagcatattggattccagatacatagatgtccaagtctcgcagcactagaggacgcattgacaaattactcgaagattcgatcgttgggctggcatacctatgcagagagctcaggaagagtaggttggatgagcaaatnagcagatgcattaacaagttggcaggtgagatgaccacatagctcgcatgaatgaagaacaactcgaatgactcagtgtgtattgactcttaggtattgactagtggactgactagtacttattatctggatcaagtgttgttcgacttgtgtaattttagacaatgtgttggcggtcggtctataacatccatgcttacaggctcatgcttgctactctgtactgctattatactgt

SEQ ID NO: 124110 - DNA, 257 bp, Glycine max
  unsure (1)..(257): unsure at all n locations
  Clone ID: PAT_MRT3847_83078C.1
cttattaacactttccttagttcaatatggggaagcccttcatcactctctctctttcttcccttgcttgctaactcttgtcgagtgcatgctttgctattacctccagcaagttcaacgagtggccaactcaacaacctcaacgcgntggaanccgaccacgcgttgagtccgaaggtggtctattgaaactggaatttcaanacctgagtgcatgcgcggtgtcatgttccaaagnacctcaacgggaanggttt

SEQ ID NO: 124111 - DNA, 385 bp, Glycine max
  Clone ID: PAT_MRT3847_83079C.1
gatatggggaaaaacccccccaaaaaaaacctaaaaaagacggccaaaagggccctttagctttttggtgaaaaggaaaagaccccctttacgcttctaaaagaaaaataggaaaggggttataaggagggtaaatggggagaaaagttttttaacaaaaaattagggccttattttcggcccccctttactccgggggggggggggttcctaccgaggaaattggcccaaacccttcacgggggggaaagaccaactttgttttaaactaaaaaaattggccccagcggaaaaatttgctccaaaaaagggagggcccaacttcccgcccgggccagaatttttttttaaaaagaaccggtggtttaaaaaagggcgggccctc

SEQ ID NO: 124112 - DNA, 305 bp, Glycine max
  Clone ID: PAT_MRT3847_8307C.1
aaaaagataaatataaaaaaaaaaaaaaaaagggcgatcactgggggggcgctcaacttacttaagcattcattcgcgtgcattcctattctatagtttttctatagatgcaatataactgtgcggtccgtggacatcgattgagcatgggaaagactgggagaaacctagcttgaccgaattgaatcacattcaattttatccatctgtcgtcagatcgaataggcccgaacagagtctgattgataacatgttgccacactgactgatcaatgatacccaccgtgacgcgccccataacgccc

SEQ ID NO: 124113 - DNA, 407 bp, Glycine max
  unsure (1)..(407): unsure at all n locations
  Clone ID: PAT_MRT3847_83080C.1
gcacgaggcagaaccaatgcctgtagtaggaatatctcattctgcgaggggttattgcattaatatggtactagagaccatgaagacatattcttctgaagattgcttgacagaagaagcagttgttacgaagcttcgtacttgccaatatcattacttatttttgcatacatccttgaggcggaattcttgtggtttgtactttctcattcttttctatttctttgatgaaaaaatttgggcctaacttggtgcaaaaggtngactgactttatatggaagacatgtcaaagatcacactattaaatttttgtgttccttgctgtaacaagattgtaacaaaatatttcctcccttgtttgtaataatatttattttgtatatataaaaaaacttttaattaaaaa

SEQ ID NO: 124114 - DNA, 364 bp, Glycine max
  Clone ID: PAT_MRT3847_83081C.1
atgctggcacgcctggcggtgccgttcccgcctttccgggttgccccacgcactcggtgaggaccttttttctgttgcgtgtgtttaccattattaacaaagtaccacttacgctggtgaatgaccctgtggagggaaagtccgtactactgatgaaatcatggtctctagtggacatagtttcctttacgaagaacacatgtgtaaggaagaacatgttgaccgtcttctattggtggctgaacaacattaccgagaagattttcttgcggaggcagatgaagaactgcccctacagattgctgccctgttagaagagctaagtgaccctcagtacaatgttggtcctggtcagatggataca

SEQ ID NO: 124115 - DNA, 335 bp, Glycine max
  Clone ID: PAT_MRT3847_83082C.1
atttaagagatgagtcatcattccatatccacctaccataaatacagtagtagtgtcaccataccagcgcgaaatagtatagatcaaatgactggtgaacatggtacagcttgcttacacgatcattcaacatgcgttaaacttacatagacgtgagtggttcccacagatataagcactctgatggactgattttggatatgtcaacagatgaacttatcgccaactaaggcgtctacctcgaagcgtgcctctgaacgtgccatgtgacatctcatgtggctttaacgttaaatgtcatgtgcgtgacaacattgctatcccctgacctacgt

SEQ ID NO: 124116 - DNA, 381 bp, Glycine max
  Clone ID: PAT_MRT3847_83083C.1
ctctcttgttgccaaccagatatttcaaaatctaatgacaatcatggggtgttatgctctaacatggatggctgcattatgtctatgggggtggacatgcaggcctccaaccagaggtctttgcccattgtaaaggatctgttcaggtaaagaaaagcgattaccggaccagcaaccagagacggctcgatacaagggttttgcattccttgtgtatgatcatggaaagggaactatcagtgctatttaactgcctaccatggtggcctcatgtgaaatccatagcaactatcttgctgatgatacctcatgctggtgcagcaccatatggctataaaatctgaattagacactactggacttggagcctatttacaagga

SEQ ID NO: 124117 - DNA, 374 bp, Glycine max
  Clone ID: PAT_MRT3847_83084C.1
gctgccgcccttttttttttgtttttttttttggaagggggaaacactgtcaacagccatgcttgattgggtgaggacgaagaaaaaaactggccccccctaaacgggagcatcatcattttttaccgcccccttgaaatgtgcacctaactaggctttaaccttctttacaccgggcttggtcccgggtagtcatgagctccaatttgcttttggggggaggggctctggtgttcggggaaaaaagagctttaaaacctttcccgcctcctgggaagggggggttctacctctaaaaaggggagcccctaaatggcctgggtccccctggtgcccccatttgttttgcataggcacacctccctttttgtgag

SEQ ID NO: 124118 - DNA, 341 bp, Glycine max
  Clone ID: PAT_MRT3847_83085C.1
acaaagcccaatacgctatatcattgttttagtttactgggcatagtatcccaaaatgtgcgactcatatgtgggagggcaaattcagcagatggtgctgtggatacggctcacattttcattgttggccttcgacatctctgatttcggcaaagaggaaccacttgtcactaaatttaagatggtcgaagtcttcaagaccaagatcatgctaggttacgaacgcgaaggtgcgccaaattgaaattggtacagatgattgtgtcctggatgcatgtaaaggcttctcgggttaaaggttttcaaactcacaatgacgttaccttgtccatgaaagaagc

SEQ ID NO: 124119 - DNA, 543 bp, Glycine max
  Clone ID: PAT_MRT3847_83086C.1
gcaaatccgccaccgccccagtgacgaccaatacatcgccattggcggtagcgtgcaagcgggcagcctgttcatctgcgagcagcagcaagcgcgcaagcaagcggcgcgcggcgtcgccccatccgacggctgcttgtggctcggcaggcaccggccttgggcgccaggtccaggcgtagtggtctgcactcatggcgtcagcattcgggacagttgcccgcgtacctgctgcaaggtttccggcattgtctcgctattgaagttggcgtcgatctcgcgcagcagcccttcgaggaccgggctgtcgggcggctcgctgcgggccaggtagtcttgcgcagtttccagcaagcgattcaagcgcgacatcggttgcaaggtggcctcttcgaccgcactgaacaaatggctgttgctggacgcggcaaacaggtcgcgcagcacctcgcggccatgctgctgagtctctttagtgggcagcacatacagcaggggccatagatccgcgtcgctggcttccagccgcccgcccagcaacgc

SEQ ID NO: 124120 - DNA, 514 bp, Glycine max
  Clone ID: PAT_MRT3847_83087C.1
gagagaactagtctcgagttttttttttttgtttttattttaagataactagattaaatttcaaaagatcgaagaattacagcagacgcacactaagcaagatctctcataacaatattaattaactagcaaagcggttaacgtaattaccataataggagtcatgcatctcatgccgcaggaaattaatgatccacataggtacatacttagactgccaaggttatcaacttgtttgatgacttctctaaaaacgcagttgatccacctgccaattctatttaagcatactattcatttgattgatcaattgtcaagtattcgggttacacatatctttttcacttcaaaggattaaaatcaagggcatcagaatcaagctcaagttggactcccttagaaaccaagatcccaaaacaagtggaccttccccaagtatccattctttagcaatcagatttagagcattaatagtagccgccaatctacatgtaaaactgatcatccctcgtgc

SEQ ID NO: 124121 - DNA, 351 bp, Glycine max
  Clone ID: PAT_MRT3847_83088C.1
tcctatgggcacatctacacttcctctgactcgttctcacatctgtgcgaaagaacacggtcaagcgggggaaatcttggatcagggctcccactctcctatctggtatgggacttcgagggccgactgttatatctactttccggtgtttgactggtgtctgctcactgaaccgcatttgccgccaacgtggtcgtattcgaaacccacttgggcgtaggggcaaaagtaagcttcgttgacacgatgtggacacaacaggctgactgagaaatcagttcctactggcggagattggtacaacggggatgaagattacacaatatctactcaggtgagaaaatggacacc

SEQ ID NO: 124122 - DNA, 2048 bp, Glycine max
  Clone ID: PAT_MRT3847_83089C.1
cgggaggttgattgccaatgacaggctggataggtgtgtggggatttatgttgaggtgaggagttcgaatgtgagggcaagtttgcaggcgctaaatttggattaccttgagatttctgtggcggagttcaatgatgtgcagagcattgaggggtatattgcccagtgggggaagcatttggagttcgcggtgaagcatttgtttgaggctgagtataagctttgcaatgatgtgttcgagaggattgggttggacgtgtggatgggttgcttttcaaagattgctgctcaggcgggtatacttgcgtttcttcagtttggcaagacggtcacggagagtaagaaggaccccattaagcttttgaagctgttggatattttcgcatcgttgaacaagttgaggctggatttcaaccggcttttcggtggtgcgccgtgtgttgagatacagaatttaacaagggatcttattaagagcgtgattgatggggctgcggagattttttgggagcttttggttcaggtggagttgcagaggccaaatccacccccgatggatggtaatgtgccgagattggtgagctttatcactgattactgtaacaagctccttggggatgactataagccaatattgactcaggtcctgatcattcatagaagttggaagcgccaaagctttcaggagaaactccttgtcaacgagattttgaacatagtgaaggctgttgaacagaatgtggagacttggatcaaggcttatgatgatcctatactgtccaacttttttgctatgaacaatcactggcatctgtgcaagcatttgaaggggacaaaacttggggagctcttgggggattcttggttaagggagcatgaacagtataaggactattactctaccatcttcttgagggacagatggggaaagcttcctggacatttgagtagggaagggttgattcttttctcgggagggcgtgccactgcccgtgacctggtcaagaaaaggttgaagaagttcaatgaagttttcgatgagatgtatgcgaagcagacaagttggatcatgccagaacgagatctgagggagaagacatgccagcttatagtgcaagcggtggtgcctgtttaccgcagttacatgcagaattatggtcctttggttgagcaagatgctagctctacaaaatatgcaaagtacacagtgcagaagctggaggaaatgcttttgtgtctatatcggccaagacctgtaagacatggcagcttgagaagttcaacatttagtgcaaaatatgggaatggagtacccgatcttcgcagaacagcatctgcagttgtgtaatttcctagtcatgtatttctgaagactgaacagcattgataatctttccccctcatcagatggatggctactgtatataattttcctctgggccctgtggtgcataagattggctttgcttagattctgagaaggaagttcctgagctctgccattcaaatatctgatttattttcatgaacatgaagcttagcttcccttctgagatgaaaaactggttactatctcccttgcaccgaggtttctgctaaagctttgccatctgtaaaacagtaagttatgaaattcccataaatatgtatggaccttgattatgaggttttttggtcatactgcccgcttaagtaattttattcaatcttcatcttcatctattctgttgtttgtagcagcagcatcattttaatttgcaaattttgtgtacaattttttagtatacatggacttagaagaagtttagattaacagaatatttcgtcattagttttgaaggggctgaagttgttaattgtaaatgcagaaacccttgagttgcttgttccatgtactttctttaaggatgtctttaccaaaataagatgtgtaatttggtaatgaattcgtggggaggccaaggaaaataggtttttatattcaattgtctttctgcattgattgcgttttgacttatattcctctataaattagtaatatattagtt

SEQ ID NO: 124123 - DNA, 644 bp, Glycine max
  Clone ID: PAT_MRT3847_8308C.1
agacagaagataagaagcatgcattaactctgtgcctaaggaggtcaagttccagcctcttgcagaaaagaaagcccctggtaaaaagccaactggtttgggtgctcccccaagtggtcccccatcaactgcagatgcatatgagaggatgctttcaaccattccagagtgtgcaaactttgggaagcttttcaagtcctcagcacctgtggagctcactgaagctgagacagaatatgcagttaatgtcattaaacacatttttgataggcatgttgtgttccagtacaactgcacaaacacgataccagagcaattgttggaagatgttattgtgactgtggatgcttcagatgcagatgaattctcagaggtgttctccaagcctctcaggtctcttccttatgattcacctggacagacttttgtggcatttgagaagccagagggagtgccaacagttggaaaattttctaacgttctgaaatttattattaaagaggttgacccaaccacgggtgaggctgaaaatgacggtgttgaaaatgaataccagctggaggatctggagattgttgcagcagaatatgtgttgaaagtgggggtggctaattttaagaatgcatgggaaaagcttgggcccc

SEQ ID NO: 124124 - DNA, 514 bp, Glycine max
  Clone ID: PAT_MRT3847_83090C.1
ccaacccccagggggttttgggggtttataaaaacaaaaattcccttccaaaaggcaatatcccccccatttttaaaatccccaaacccgttgttttaaggaatataggcccctaaaaaaacccccccttcccagggggtttttataaaacataaaccccgggaaaagaaaacccctttttcggggccccggggttccccccgaaaattccgacccggaccctgagggcgacccagttttccctaaagggagcctaataaaacctgggcgaaaccagggccaaaccttttccctgggaaaaattgttatcccttaaaaattccccacaaaatccgacccgaaagcataaagggaaaacccggggggccctaagggggggcccaccccccattaatggggtggccccccctgccccttttcaagggggaaaacctggccgccccgttgttttaaaaaatccccccccccccggggaaaggcgttttgctttttggcccccagggggttttttttt

SEQ ID NO: 124125 - DNA, 1199 bp, Glycine max
  Clone ID: PAT_MRT3847_83091C.1
ccacgcgtccgggctgggaaacctgccgtgcttacacgtgttgtggatagcatgactgacaacttaagaccaactcgtgcagaagccactgatgttgccaatgctgttttagatggaagtgatgcaatacttctaggtgctgagaccttacgtgggttataccctgttgagactatttccacagttggaaaaatttgtgcagaagctgagaaagtttttaatcaagacctttattttaagaaaaccgtcaaatatgttggagaacccatgaccccacttggaatctattgcatcctctgcggggctcgagcgagctgcaattaaggtgaaagcatctattataatttgttttacttcatctggaagggctgcaagattgattgcaaagtataggccaacaatgccagtactatctgttgtgatcccccgactcaagacaaaccagctaaagtggagctttagtggagcttttgaggttgaattttaaattgagttagctgcttatttgctgttaactatttgtggctgttattaattccccgagagattgggttgaatagatcaactgccaactttcattcttgggaaggcttatatctaatgcaattaatatacgaccgtaatgaatattttataaataatattaatacattttaatttactgttaagtattctcggcatatcataattatgatatttatatcctgtgtaaagtaagtagatacaaccacgaattgtgtttatatttggaagatgctattgtactttcttggatatggacacccctaattccatctaatgttcagaaaattttatttaccaggatgtgttgtgtttacattggcttacaccttgcttaccaaacttaccaagaaattcaatttgtgatgcaggcaagacaatcacttattgtgagaggtctctttcctatgcttgcagatcctcgacatcctgctgaatcaacaagtgcaacaaatgagtctattcttaaggttgcccttgatcatggaaaagcattgggagttattaagtcacatgaccgggtagttgcttgccacaaacttggtgatgcatctgtggctaagattattgagcttgaagattaaactattaaagcgcattcaaccaactacagttttagtatttatttatttttacaacctttttgtttcatttgcatcttattttctgttaggggg

SEQ ID NO: 124126 - DNA, 508 bp, Glycine max
  Clone ID: PAT_MRT3847_83092C.1
ctacaaaacagcgttgtgtcactgctcatcaaacttcttcttcttcttcttctttctctttattcgctccctgtctctctgcgtgtgcgtgaaaaagaagcaaaaatgcattccggtcacttacttctcgaggaacccattcgcatggtttccatcctcgaaccatccaagcctaatttctttccggcaatgacgaagatcgttggtaccctgggtcctaaatctcgatcggtcgaggttatttctgcttgtctcaaagctggaatgtcagtggctcgtttcgacttctcttggggtgaccctgaatatcatcaggaaactttggagaatctgaagaatgctatcaagactactaagaaactctgtgctgttatgctggacactgttggtgcagagatgcaggttgttaacaaaagtgagaaagcgatctcgctccaggccgatggtcaggttgttctgactccagaccggggacaagaagcgtcttcgcagatactgccgatcaatt

SEQ ID NO: 124127 - DNA, 245 bp, Glycine max
  Clone ID: PAT_MRT3847_83094C.1
gtaatataccccatccaatgaacagcaatggggggcacattacagacaaagggcgtcgatataatgaaaaactaatacgctagatgacacacctgctgtaccaaggaagttctaagctggaaatcactaagaaagatcattcttgaggggaatgatgaaaaactgatgcgtgaacggacacacctctctacaatctccaagttcaatgagatgcacattcgagaacgatgtcaacaaagactgat

SEQ ID NO: 124128 - DNA, 325 bp, Glycine max
  Clone ID: PAT_MRT3847_83095C.1
ggctgcctcaatgatctcttccccagctgttaccactgtcaaccgtgccggtgccggcatggttgctccgttcgctggcctcaagtccatgggtggcttccccaccataaagaccaacagtgacgttgccttcattgctagctacggtggaagagtgcaattcaagctagtgtggccgcctgttggcaataagatgttttatactcttttcttcctgccatacctttatgatgcgcaattggcgaaggaagtttaattccttcataggaagggatggattacttggttggaattcgagtgggagcacggttttctgtgccgtgag

SEQ ID NO: 124129 - DNA, 185 bp, Glycine max
  Clone ID: PAT_MRT3847_83096C.1
cagtgctgtctgccatggaggatgagaaagtttcgatttttcattgattggggataactggcccaaagagtttattaaggcaatgcatggagcgatcgtgtgtctcattcacccacgattcctcctcatcttccttgtcctctcaattttcctcattttcacattttctggttcgactattacaa

SEQ ID NO: 124130 - DNA, 957 bp, Glycine max
  Clone ID: PAT_MRT3847_83097C.1
atgccaaacgccactgaacaattctcaaacatcaacagcatcgagtccctccatgtttcccttcgcaacctctcccaactcagcacccgaatggattccgtccaaagcttcgtctcccaatcgatccaatcccacactctcctcactcaccaccaaatgaacatagtctccaacgagatcctaaccgccattcgccacgtcatcaccaacggcgtcgcccttgtcgccgcctcggaaaacgcgctccctctctcggagactccaacgttggactccccgaacaacaacgacgacgacaacgtggtggagctcgatgccatggagctgctggccaagcaccttcacttctgcgaggtgtgtgggaaaggcttcacgcgcgacgccaacctgagaatgcacatgcgcgcgcacggggacgagttcaagaccccggaagcgttggcgaataaagcccgtggagaaacgcgcttgaaggcgacgcggttttcgtgccccttggagggatgcaaccgtaacaagacgcacaagaaattcagggcgttgaagtcagtgttctgtctgaggaaccacttcaagaggagccactgtcccaagacgctgttgtgcgagcggtgtcggaagaagagcttcgcggtgctgtcggacttgaggagccacgtcaagcagtgtcggggagaggccacgtggaagtgctcgtgcgggaccacgttttcgaggaaggacaagctgctcggacacgtggcgctgttcgaggggcattcgccgatgcttggagaggagagagatacggtggtggcggcggccgcggaagggttacctgaagggttctttgatggattggatgaatttggatttggatccattcaaaacaactcttcacaggaggaacacttggccttggggcttcccacaaataatttagatgcatgggaattttctttttctaatttaatctaa

SEQ ID NO: 124131 - DNA, 1407 bp, Glycine max
  Clone ID: PAT_MRT3847_83098C.1
cccacgcgtccgtccaaatttcgtttgtgagacaagctaggcacaatttttgttattcctatcttatcttaacattgtttcttggagttgattgaaatggcagtgcaacctgaaattgagcatcccaggaaggcctatggatgggcagctagggatacatctggtgttctctcccctttttggttctctagaaggaaaacaggggagaaagacgtgacatttaaagtgttgtattgtggagtatgccactcggaccttcacaagttgaaaaatgaatggagtgattccatctatccccttgtccctggccgtgagattgttggagaagtgacagaggtgggaagcaaagtagacaagttcaaggttggagacaaagtagctgcgggatgcttggttgggtcctgccactcatgccaaaactgtgtcaacaatcttgagaattattgccaacaagtgattcccacatatggtgcaaagtatgtggatggcaccatcacatatgggggattctcagacttcatggtagcagatgagcactttgttgtcaacattccaagtgccctacctcttgatgctgcagctcctctcctttgtgcagggatcacagtgtatggtcctttgagatattttgggcttgacaaacctggcatgcatctgggtgtggttggtcttggtggactaggccatctggctgtcaaatttgcaaaagcccttggcttgaaggtcactgtcatcagtacctctcctaaaaagaaaaatgaagccatacaacatcttggagctgatttttttgtggtcagtagagaccaagatcaaatgcaggctgcaatgtgcaccttggatggtataattgatactgtttctgcagtccaccctctcatgcccttgattgatctattgaagtctcatgggaaactagtagctgttggggcaccggagaaacctctggaattgcttctcccacctttaattttggggagaaaaagtatagcgggtagttacattggaggaatcaaggagacacaagaaatgattaatttcgctgctgaacacaatgttagaccggaaattgaagtaattcctatggattatgtgaacacagcaatggagcgtctccagaaagccgacgttaaatatcgatttgtgattgacattggaaacacattgaagccacactattagttttgggccgagtcaaaaaacagagaatgaccattgaccaagggaagggaacactacaataatacaaagcactcttaaggatgtttaatattccttgtgttattctcctagatcttttgtatccatttttattttgaataaagggaacagaataattgcattcactaattttggtgtgccatatccatgttatatatattatgggaaacatgcatttgagaaaaa

SEQ ID NO: 124132 - DNA, 493 bp, Glycine max
  Clone ID: PAT_MRT3847_83099C.1
ctaaaccttacactgaaagcatactcactttttctgtgcagaacgactggcgctactggacgaagactttgacttaccctgtggagatgtaatggacctcggggattacatggtccgagaggagcggaagatcacatcccgcgccctccagaagactctcctcatggtaaggaaaggattgcaaaccccgaactgcctggacgagactacatgattatacgcggggactttgctcgacggaactgatgattatattagcaccgacctgggattaggcctgtatctgtgcgctcggacaagggcgagatatttagggctggggcgatggtattaaaaccatgaagaaaggtgaaaatgctattttaaccatgtcctcccgagctattttatggtgaatgtggctgcaattcaactattactgctaatgctacacttcaaattgatgcttatctggtgtcatggactagtgtgaaggacatatgcaaggatgggg

SEQ ID NO: 124133 - DNA, 662 bp, Glycine max
  Clone ID: PAT_MRT3847_8309C.1
cccacgcgtccgtacggctgcgagcattagccatggacttatccttcttaatcccactttcttctctttcacttccatgcgaagagatcttgcttgattcgaaaaggaaggaacttgagacttgtttctctcagagatggcgttgcctaaggttgatttcgaggttggaactgatggggttgctgtcatcactatgtgcaacccaaccgtcaatgctttggccattccaattatcatggggttgaagaacagatttgatgaggcagctaggaggaatgatgtgaaagctatagttttgactggcaaaggtggcagattttctggtggctttgatatcagtgttatgcagaaggttcaccagactggggattcctcgcatctccctgatgtgtccgtggaactagtagtcaattcaattgaagattcgaagaaacctgttgttgcagcagtagaggggcttgctcttggaggtggcttagaactggcgatggttagttttttgtcaacgagaagccatgttgttcctttaaataagaattgctgtccaagtgtcttcattagtgcttggaatgtacaccttgttgcgtagggatgccatgcgcgtgttgcagctccaagagctcaactgggtctaccagagctgactccttggtattattccc

SEQ ID NO: 124134 - DNA, 335 bp, Glycine max
  Clone ID: PAT_MRT3847_830C.1
aaacagaaaataagaggcttgctttacctttcagggaaggcattccttcaaatgggtcctgttaataaagactttaatttaaaagaacgtacccttagcaaagctggcttaaactacacactgttgatgacactgttccattagggttccagattatttggttaacataattttttggttcccctccggggccgtacgtgcttgccctaatttggcatgccctggagcttttttttccacaacaggctttttaagctggttatggggggtggcctcctaagggtccacatgaccaaccacccccttttgtcgttatcccattcgttagacacgtg

SEQ ID NO: 124135 - DNA, 357 bp, Glycine max
  Clone ID: PAT_MRT3847_83100C.1
ggctggccttcaacaatagaacttcttcccgaacgatctcttgtacccacgtccataaccccaataagcttcacctaaacggagcatgcttcccctccaaagctctaatgttcacgatcaggactcagcatgaacatccagcagggattaatgccactccttcaacttcttctgccgttgtttagacccaaaagggtcagtctattgctgccgttgacgacatgaactaaggctccaaattctcatcagatcctcgttcatggttgcattggatgcccgaagatgacgatgataattgttcggactcttcttgagatgtccttcaattctcctcatcgaaagactgcgtcaatgact

SEQ ID NO: 124136 - DNA, 183 bp, Glycine max
  unsure (1)..(183): unsure at all n locations
  Clone ID: PAT_MRT3847_83101C.1
gttccacaacattgatgagcacgcagaatttttggctctggcctattcataaccacaaccaaccatattgatcgcacaaaatgttaacaaaaacaaggtggtgatttatttttttatgtaataacatcangatactataaaattgacattgtgattaatctaaaattaacaaattattacaat

SEQ ID NO: 124137 - DNA, 687 bp, Glycine max
  Clone ID: PAT_MRT3847_83102C.1
gcatgtaaagatcacatcatgctagtgatgccgaagaaagtgctaaaataatgtcatcatcggtgccattatctgttttacttattccttcattaaaagaggctattgctgatgatccagaactcgtgagggcagttatcaattctttaataaacatggagggtacaaaacctaaatcctgtgatgtttttgtcaaaaagttgcttcagcgattggcaagttcaaaggaagattcattgaaggacctgcagggactggcagaccaactattcagcaagaccaagtcagctcaagaaacccgaaatgcagaggctgataacaggaagaaacaacaaaacaaggaacataattcaaatagcaatttaagcccactagcaagatttcttctctcaagatggcaaggccaaacctcacgggatctaaacccatcttgagcagagttagaagttacaagataccaatttgtctgttgtctctatttgtgcatttttttccgattaattgtacatatattattgtaagaaattatttttctatgttctattattattaaatttatttttctttgaattttttttgctcaaagtgatggcgacagcagtgatgtataatttagagggttttgcaaattgtaacaaactacattgatttgtaatttctaatagttgtcgctttgaagagtgggat

SEQ ID NO: 124138 - DNA, 382 bp, Glycine max
  Clone ID: PAT_MRT3847_83103C.1
cggcaccgacccggccggacttgctggttctacccacgcgtttgtttgcctgaaggcagccgacagggggggggagagttataggagaacaaggagcattctgcctgctccactgctattttttgtttcaacatacaccgaaccaaaaacatgagcagaaaaacatatgaccgtggggactggaaatgcagtgggaccactgagggggtaaagaagagtgctactaccttgaatgaggctaaagtccccggagcagatgacatccaagcgggtgtgagccctcccccatgggtgcttgctgatgaaaaacagatagctgcaccctgatccccatgtgtcggcacaaaacctgtggggctcacaaaggcggcgccccttccac

SEQ ID NO: 124139 - DNA, 3354 bp, Glycine max
  Clone ID: PAT_MRT3847_83104C.1
gtcagtgagtgagggttctgaacaattgattgcatcctgacgcgtccgcccacgcgtccgaattcgaatgctacattctgctgttgccaaatctcgatgtgcatgtggtttagtctgtgtatgaggctttgagtacttgctgctgagagaatggctgatgtggcaggtctagttgaggcctcaggatcgagattcagttcattggagcttattggacagggatcattcggagatgtctataaagcatttgacagggagctcaacaaactagtcgccatcaaagtaattgacttagaagaatcagaggatgaaattgacgatatccacaaggaaatttctgttctgtcccaatgtcgatgtccatacattactgaatattatggttcctatctcaatcaaactaaactttggataataatggaatacatggctggtggttcggttgctgatctaatccaatcgggtcctccccttgatgaaatgtcaattgcttgcattctacgtgacttgctgcatgctgttgattatctacatagtgaaggaaaaattcatagagacattaaagctgcaaacattttattgtctgagaatggtgatgtaaaggttgcagattttggtgtttctgctcaattgacaaggactatatcaaggagaaagacatttgtaggaacaccattctggatggcacctgaggttattcagaatactgatggatataatgagaaggcagatatctggtctctgggaatcactgcaattgagatggcaaagggggagcctccacttgctgatcttcacccaatgagagtgcttttcattataccccgagagaatcctccacagctagatgatcatttttctcgtccattgaaagaatttgtttctttgtgcttaaagaaggtgctttgcatcctaatttagtaataattgggataacagaattatttgtttatttcctgttgaaatttgtagctgtcaacttgatatgatatattatttagttttccctaattagaagctttttagactagcttggagtggaactggtgaagttgatctctctgtcaggctcttaattcccctccttttaatggattcaattcctgctgagaggccaagtgctaaggaacttctcaaggaccgttttattcggaatgctaggaagagttcaaagctttcagaaagaataagggagcgtccaaagtaccaaataaaggaagatgaggagacacccagaaatggtccaagtgggatgggggaggcatcaggtactgtaaaggtggcaagagattcaagaggtgaagaaaataatcgacccagtgatcagggtaaaacccctgaaaagtgctggatgggacttcagcattggtggatcacagggtactggaacctttcgtaatgtttctcgaccaccgcagtttagagataagaaaactgaagtttcggataatcagcttacccaacgaaaaattccagagagtggctatcaaggggagccaagttgcaatcaaataagaatgcgagaatggcatgtatcaaaaggatgagagtctcatgcgcctcggttttttcaactgcatcatcctgctctcaaaaagcgtgtgctggttggtgtttgtctgttatattcggtgaattgaaaacactgagaagttggaaatgggggtccaggataggaagatcagagagtacttgctccaacagcaattggtcaaaaggaaccaggcatggacatatgtatacaaaaggataggttgtgctactattgatgagatagtaaccgaacgagatctatagatcaaaaactgaaaaatggcgaatagttcagaagcattcttggttaggtggggatttaaatctgcagaaatatttctggattaagtctattaagagataggaatattaacattgcatatcagggactgacccagcgaagtgctgcagtgactgtccatataggtccatctgtcaatagaagtgcacttaatgagtcacttgaaagttcctttggaaatgagatcttaaagttccccaccatgatgagcatcatggataatcaccttgaagatgatgaattatctgggaatggatcaggaactgttgttattcgatctccaaaaggatcaaggtcatctgcgtttcgtgaccagagctctcagtctagcagcagctatgcttcttttgaagatgcttcttcaagtggaactgttgttttacgtggccagcatgatgagtctgattctccacagacaccaaggtctcgactgggacttaatgacagaaattcaaatgcctcaatggaagatagtgcagcaaatcttgctgaggcaaaggctgctatcctgaggaaatcaaatgctcgagagaaacttgcccgaggaaaaatcaacaatgatagacaggaaagcataagagatacaaaaggctagtagctctgatttttaaagacaacatggtgaatatgatgcacacgaatgcatgttaagatcacatcatgctagtgatggcgaagaaagtgctaaaataatgtcattaatcggagccatgatctgttttacttattccttcattaaaagagtctattgctgatgatagaatactcataacggatgatgtcaatgcttgagaaaacagtgagaaaataaagtcaaagtcggtgccgttttctgttttaattattccttcattaaaagaggccattgctgatgatccagaactcatgagggcagttatcaattctttaataaacatggagggtacaaaacctaaatcctgtgatgtttttgtcaaaaagttgcttcagcgattggcaagttcaaaggaagattcattgaaggacatgcagggactggcaggccaactattcagcaagaacaagtcagctgaagaaacccaaaatgcggaggctgataacaggaagaaacaacaaaacaaggaacataattcaaatagcaatttaagcccactagcaagatttcttctctcaagatggcagggccaaacctcacgggatctaaacccatcttgagcagagtttgaagttacaagataccaatttgtgtgttgtctctatttatgccttttttttttctctcaattaattgtacatatattattgtaagaaattgtttttctatgttctattattattattattattattattattattattattaaatttactttttcttttaattatttttttctcatagtgatggcgacagtaatgctgtatgagggttttctcagttacatgcaatttgtaacaaaatctacattgatttgtattttctgatagttctctctgcaaagtgggataataagccaatttacgaattaaaaaaaaaaaaa

SEQ ID NO: 124140 - DNA, 1074 bp, Glycine max
  Clone ID: PAT_MRT3847_83105C.1
gtttcacttaattacggctgcgagaagacgacagaagggggaggaaacacaaacagtcgaagcagggtgttatcgtctggcagatccaaatctggaactgaaatccccttctccattcattgagtgaagcttcagcttcgataacgaacacagtccttttccatggcaaatgcctggaaaagagataaggccaccagactcctctccccaaagctactgttcctactcttctcctccactctcatagtcttcttcttcttcgcattccttacctcacgcccctcaaaccccgccaccaccctcaccgccttcaacacccgcctctccttcaatgcaatctcccccttcgactgcaccgcctcccctcaggcccaccccgtcgtcgccaacaccgtcgagggcgtccgctaccccttcctcttctcgctctccgattttggaaccttaccagacaagccccacaagaacatcgtgaggatgctcaagggcaaaccctttcggaaacccgacatctccgttacggttcaggaggttctcgagaaggccaggactgagggtaaggatgggttttttgtcgacgtcggtcccaatgtcggcatggcgtccttcgccgcctccgctatgaggtttcgggttctggctttcgagcctgtgttcgagaatttgcagaggatctgtgaaggggtttacttcaatagagttgcggatttggtcactgtcttcgaggccgctgcgtcggatcgcgtaggcaacatcaccgttcacaagttggttggtaggctggacaacagtgcaatttctgccacacgtgcaaagttggcatttaagtcgaatgaagagataggctttaaagtacggaccgttgctcttgatgaagtgattccgaaatctgagcgtgtgcatctgcttagaatagatgtgcatggctcggaatatcacgttcttacacgagcatcaaagctgctcataatgtaaggaagccaatgcccatatctcatatacgaagatgatgagtgcttattacatgccagtgatagcactgctagagagagtccagacgcgctgcatagtgtg

SEQ ID NO: 124141 - DNA, 264 bp, Glycine max
  unsure (1)..(264): unsure at all n locations
  Clone ID: PAT_MRT3847_83106C.1
aaggcacgaaacccatattctcacgcaaccaaacttgcacttagctccaacccattccactcggcatcggaactancaaccgccacgccgagaaatactggaggctccggcggtggatggcgatctgatgtggatccaattgacgttatcgtgccgctacttatttgggaacactaagcgaagcttgtagtacgaatacaattacttggccgaagcaaaagcgactttacttagcatagttttcaagttattccaggcttcatc

SEQ ID NO: 124142 - DNA, 2431 bp, Glycine max
  Clone ID: PAT_MRT3847_83107C.1
aaaacaaatctgcatctgataaaatcacaaaggaaactgttgctactgaagagtcctctacaacagctagcgatgcggaaagtaacccttccacaccaaaattcagtgaggagttgaagtttgcttcttgtatgagaaaattcacattcaatggacttaagggcgcaacccacgcgtccgcgaccacctacagcccctttggactcattttcataaccgggtttctgtttgtctttgtgttttttttttaaaactcaattaactgtgtactcgtgttgatccttttgttgtgattcaaaacagtgatgttgttgttcttttagttctgttgattatgattttatgatcatgatcatgttgatgggattctaaagtcttcaattattggaagtgaggttgcttgaagtgtttttttttatttattttttttcttctttttttttatcctaaagtctgaaacttgtgggaattttgaacatgaaaagttctttgtaagagttttgtggaagatggggtttaggaataatgcaattcaggctgggagtttggatgtgggaaagtcaaagggaaggatgcaaaaggatggtgctgagaaggaaattgggtgctgtgttaaattctgtttcattgggggctgtataccttcaagatcaaaggtggataactccataagtggcactagtgctaacagtgtggaaaaaacatctgcatctgagaaaagcaagaaggaaacaaatgctcctccagggtcctctacaacaaccagtaatgcagaaagagtcccttcgacaccaaaattcagtgaggagttgaaggtttcttcttgtatgagaaaatttacattcaatgggcttaagttggccactaggaatttcagaccggagagtcttcttggcgagggagggtttggttgtgtgttcaagggttggattgaggaaaatggaactgcacctgtgaaacctggcactgggcttactgttgcagtcaagacccttaaccatgatggactgcagggtcacaaagagtggcttgcagagttagacattctcggtgaccttgtccatccaaatctggtcaaattggttggtttctgtattgaagatgaccaaagattattggtttatgaatgtatgccccgtggaagtttggagaaccacctcttcagaaaagggtcgttgcctcttccttggtctatcagaatgaaaattgcacttggtgctgcaaaaggtcttgcttttctccatgaagaagctcaaagacctgtaatctatcgtgattttaagacgtctaatattctattagatgcggaatacaatgccaagctctctgattttggactcgccaaagatggtcctgaaggggaaaagacacacatatctaccagagtcatgggaacatatggttatgctgctcctgagtatgtcatgactggacatttgacatcaaaaagtgatgtctatagttttggagtagtgctacttgaaatgctcactggccggcgatctatcgataagaatagaccaaacggggaacacaatcttgtggagtgggcaaggcctgtacttggggaccggaggatgttattacggataattgatcctcgccttgaaggtcacttctctgttaaagggtcacagaaggctgcgcagcttgctgctcaatgccttaaccgtgatccaaaatccagacctatgatgagtgaagttgttcaagctctgaagcctttgcaaaaccttaaagatatggctatctcatcttaccacttccaggttgcgcgagtagatcgtactatgtccatgcctaaaaatggtatgcaagcacagttagcatctttatcaaggaagggtcaaccagtgaggatcttgtcaagtccaaaaggtcctcatggttctccatatcatcactatatcaagtcaccgaaacctaatggataagaatcatgtttctctctttgatttgcttctctattcattcagttccctcacaacttaggctatcaacagaacagaaactgtttgtgttttgaaaattgctctgaaacatgaggaattactagagttttctgaccttatctcatctcaaataaggttggggggaccatgagacagttcactggattttaaagtttagcggggaccaagttgaccaaacttgaatagaaaactagaacacagttttcacatgtggaatttgttactgtggagttgctatactttttctaccatttcacaagctttcttcttcctttcagaatgtacttttgtaaagaaaatagttggtggtgttaactcatgttattcatagatatttttacatactcatctgtcaatgtacttttcaattaatacctgtcaatgtaattaaatgttgtacgagaaacatgctagagtttggaatttgagagacttcaaaagttctggatatttttact

SEQ ID NO: 124143 - DNA, 475 bp, Glycine max
  Clone ID: PAT_MRT3847_83108C.1
aatacaacactggaaataataataataataactaataagtaacaaaggtcttggcattgtgtcgcccttattcctagcctcaggttggcgtgtgcttgctgctaatgtgattgctaatttatattttgtttattgactacatttgagttggctacattaccaatttttgaagtgtggcttttcttttcatgttgttgttgctgttttttttctcctcacttttgatttacgcggagatatgtgaatggcaatgttgtgcatggcgcaatgagaccagtaagaccacggatcgttaacttttacatgtgtgatattcgcttattggtcaatattgcgctcttcttctttgatggccccataagtaattcatttttattagctgggaatatattattgaaccaccttgaaagggtagtgttcacttgaggctaaaatcaaacaaggataaaagctttctaatagctcaaactaggga

SEQ ID NO: 124144 - DNA, 234 bp, Glycine max
  Clone ID: PAT_MRT3847_83109C.1
tcgttctttttattttgtccccctagtgactactatataacaggattaccagatttaatcttgctacaactcattaggcaattctgcaaagctcaatagttgatgagactagcaatcaccaagatcgaatttaaatcttcatatgagctgagtgctctatcctagaacagatattgatgaagagtatacaatgtgactagcatgcctctgatatcccaagactcagtgtgaaga

SEQ ID NO: 124145 - DNA, 686 bp, Glycine max
  unsure (1)..(686): unsure at all n locations
  Clone ID: PAT_MRT3847_8310C.1
gtgatggttgtgacgcctgcttcttcgtcgttgtcttcttcttttgttgttggtgtgtgtgtgttttctctcacctnagaatgtgttgctgcggggggaactgtgggtgcggaagcgcctgcgagtgcgggaacgggggcggagggggcaagaggtacccagacttnagctacaccgagtcaaccaccaccgagaccttgggcatgggagggggaccagttaaggcgcaattcnagagtgcggagatgggggtgcccnctgagaacgaggggtgcgaatgtggagctaactgcgcctgcgacccctgcacttgcgagtgaggtgtgngagagctaaagcttcaagcagagatgggccttagaaataatgagaaaaactatatgtggtttcaaaacttcaaaattatgtgntatgtgttatgtggcagctctgggtgttgtgtgtaaacaaacacccttagaataaagtgggcatttcttgcgcttgagcaaggtcaagtgtgttggacttgtgaggggggtgtgaagggcatgggtncctttttttttatatatatatatatatataaatgggttgggatggggcgcttctgtataaagtgcggctagttaatctgagttatgaatctctgcgtataatattanactagtactattgcgtggataaaaaaaaaaaaaaaagggggg

SEQ ID NO: 124146 - DNA, 1263 bp, Glycine max
  Clone ID: PAT_MRT3847_83110C.1
cacgcgtccgcacagtcacagcataaaaagaaaaacaaatgatcatgaagtgaatttgtatatatatagtactttggaagtgtcgtgaagaagcaataacggttttctgtgtgtttctttctctctcatgttgtagtatctcactagtgtttttcattcgtttctgaaccacacaaacatcaccaccgaacaatgccgacggggttaccggcggcgaattccttagtggcgccggacgaagaggggtgggtgtgggggcagatcaaggcggaggcgcgccgcgacgccgagtcggagcctgctttggcgagctacctctactcgacgatcctctcgcactcgtcgctcgagcgttctctgtcttttcacctcggaaataagctctgttcctccacgcttctctcgacgctcctttacgacctgttcctcaacgccttctcctccgacccctccctccgctccgccgccgtcgccgatctccgcgctgcccgcgaacgcgaccccgcctgcgtctcctactcccactgcctcctcaattacaaaggcttcctcgcttgccaggcgcaccgtgtggcgcatctgttgtggcggcaatcacggcggccgttggctttagcgctgcactctcgcatcgcagatgtgtttgcggtggacattcacccggcggcaaggattgggaaggggattctgttcgaccatgccactggggtggtggtaggggagacagcggtaatcgggaacaatgtgtcgatcctgcaccatgttactctgggtgggactggcaaggttggtggagaccggcatcctaagattggggatggggtgcttattggtgctggtgctaccattctggggaatattaagattggggaaggtgcaaaggttggtgctggttcggtggttttaattgatgtgccaccacggacaacagcagttgggaacccggcgaggttggttggtgggaaggagaagccctctaagcatgaggatgtgcctggggagtctatggaccatacttcctttatctctgagtggtcagattatatcatttgaatttctaaggttaatcaattaatgaatgaatacttcaaatcaaatgctatgtgttctgctgttctagagttttgtaattttatatttggattgagattttgtagagaccacactctgcttaattatactgtattatgactggaaattttggcagcctgcaatataatgacatattgtgcaacagattatataaagctggttttgttggtt

SEQ ID NO: 124147 - DNA, 352 bp, Glycine max
  Clone ID: PAT_MRT3847_83111C.1
gcggcgggacaaaaaatttttttaccgggaaacaaaaaatgccctccccaacacgggttttctaaccgttcaagccccaaagatttttttgggccccaaaaaaaagtgggtcaaacggcggggactttgcgggctcaaaccaaggggacaatacaaaagcaaaactcccccctggaagaaacggaaaaaacccattctattttgccgggcacatgaacagacccacgtctcctttgataaagactccacccctcccgggccaccaaaaatcaatttaatgggcgccccaaaataaaaatcatgggccgaaaattcaccccgggccaaccgggaaaaccccggggcccccccc

SEQ ID NO: 124148 - DNA, 881 bp, Glycine max
  Clone ID: PAT_MRT3847_83112C.1
ctgattttccatcttctgatgccagtatacctggagtagagaatggctgcacaactgtgcctcctgatcctgacatccatgatgttggaaactcagagagtggaatccctggcctggattcttttggtcgtagtgatgctgtgtcacaaacttttgctccttccttattggtttccactgaaatatgccaagaaggtggcagtcaagagcaagatacaagtttggatcagaggtcacctctgaacttagctccatcaatatcaacagatagatctgaggagctgagcccaaaagcggctgttagagatgccaatagcttggtgtcctcaacagctacttcagttgtgcctccccgattagtcttgccaaagatgattgctcctgttgttgaccttgaagatgaacaaaaggatcgtttgcaacagtcatgtaagacgacagaaggggatgcatataagcaaatagctgtagctggaggcaccaacattcgtttttcgatacttgcttatttaggagttgagtttcccttggaattagacccgtggaaactattacagaagcatattttgattgattacattagtcatgagggacatgagttgacattgcgtgtcctctacagattatttggtgaggctgaagaggagcctgacttcttttcttccacaacagcagcttctgtatatgaaaatttcctccttacagtggcagaagcacttagagattcctttccaccttcagataaatcattaagtaaattgcttggtgaatctccttatttaccaaaatcagttctgaaaattttagaaaacatgtgttctcctggaaatgggggataaggtgaaaaggagttgcactcactgaatgcagattagagtact

SEQ ID NO: 124149 - DNA, 477 bp, Glycine max
  Clone ID: PAT_MRT3847_83113C.1
ggctacctgcctgaaaatcagaaattgttggttggggccaataatcaagtacagttgccttctgaattgcagtccagggcaccagaatcaattgaaagacaaggtgatgttgttgagcaacagactgactctgcctctgggaaacttagtaaagtttttaaagatttggacaatgtgtctggatcagcaaatgaattgaaatctgaaaaagttgaagcagatctgaaaccaacagaggttggaaataagcaaaatagtgaagatccacactctctgaagacttcagtcccaaatgccaatgcagtagaaaatgatgattctgtgaataagaatcttgggatgggggaggctgctgaaagcaattggaagccttcaagtggtgcaatgcatggggttcaaaatgatagtaatgagcattctgtccaaggcaatgaatttcaagatggacatccaccgaagacagagactaaactccct

SEQ ID NO: 124150 - DNA, 167 bp, Glycine max
  Clone ID: PAT_MRT3847_83114C.1
ctcggcactttctttcaatctatcgatcacgccgctcagtgcaaatttttccgtcttcatctactgggttcttcccctatcccccatcgtctcagatggatccacttatcgtccgatcgcgacgatcggttgcttcaatctcaatgtgtaaatggtacggctcgagg

SEQ ID NO: 124151 - DNA, 186 bp, Glycine max
  Clone ID: PAT_MRT3847_83115C.1
attagtattgaacctttattttaaaaaaacctttcaggcagggccaacctaaccaaagtaccgaccgacattaagggacagggtccaatttctggaccattaaacaaaatgctctgattttatggatcagctaaggtatatcagttaatggataataacgcattctctgaactccaaacaaaccga

SEQ ID NO: 124152 - DNA, 169 bp, Glycine max
  Clone ID: PAT_MRT3847_83116C.1
aataacaaaactagaagactgacattttgataaggcgattgaaagggtcgacctcatttaaatttaaacatcaagctgggtaaaagggtggaaaatccataggccaaatttaaataattacacaaaatatacgcagaatatattaaatataaaatggcctccccacaca

SEQ ID NO: 124153 - DNA, 881 bp, Glycine max
  unsure (1)..(881): unsure at all n locations
  Clone ID: PAT_MRT3847_83117C.1
attctttcttctttgtttgtttctgaaaggtctctttctcaatctgaaatcctagccggtgattacattgatttcatggactggccttcaacgtccggttcgcattaatttctaggtcattcccttaaaccctcatgtattgcatccatgattttatggttgtcagactgagatattttttcatgttctaattggacttctttgccttttcattcatcagcaagtcagaaattcacaagtgtctggttttctgaattttgaagtaaatcacctttgaaatttcacatacctcataagttttttgggaaaccattggtattgaactctgttcagcttcctgctattttctgcacatcaggctgcaccttgtagtccaacacatctgctccctaagtttatagcatttagcatgctggcaaggttaatatttgtggtactcaccatagaacaaatcagagtttgtggcatataagatggccttaacctagatttagagcagttaggtagaaacttttcctctccttctaataaaactcggtagttgcttcaaacaagactagatgactgtggatgaagtggatagtagctctgagtggagcagagagcaggataaagcatttgaaaatgcattggcaactcatccggaagatgactcagatcgttgggagaagattgccgctgatgtgccggggaagactatagaagaaatcaaacagcattatgagcctcttggttgaagatattaaccagattgaatccgnnntgcgtgcctcttccatcttataattcttcttcagagggctncaacagccantgccagtgatgaaggagctgggcagaaaaggcagcgtcctgggcattatagcgggtgagtctaatca

SEQ ID NO: 124154 - DNA, 754 bp, Glycine max
  unsure (1)..(754): unsure at all n locations
  Clone ID: PAT_MRT3847_83118C.1
gaattcgagctcggtacccggggatcctctagagtcgacctgcagttggacccatgacaaggcggtgggtaattgcttcaacgtcgtttatcaagaacaatctcgtgaaatcgcattcaacatggcccctttacacgtgattccacgtttgaattttgtgcctcttgacaacaacggcgtatttggtaccattagaaaaagcatggtaacagtgaagtatcatatttgggcccattaagtttgaaccattggatgtttcccacgtcaatcattggacagggtcaattttaggatgagcggtcgtgtatttccatctaattataaaccactgtaaatagtaagttaattaatttttatagtatttttttattggttcaatagtgtaaaagtttttaaatcaaagatgcatgaacattaaacctaaactatttcaccaaagtcatacataccgaatatacgtgacaataatagaacagaatgaaaacaaaatcatggtaggaataagtgaaaaactccatattgaaagaaaaacagtctattttagtgtaaattttacaatttgctttcataacatttagcatttctatttgttaacaacttgttcataaaatgaaagcccaataatctcataaaagtagaatgggaagttcattatgaaaatctcatgattntgaataattttatctcattatagaacaagaaaaatgaaagtagaaaagaaatggaaagtgaccaaattgttagcttacacttg

SEQ ID NO: 124155 - DNA, 515 bp, Glycine max
  Clone ID: PAT_MRT3847_83119C.1
gtgcaacagtccctcagaactcggcagctagaaagattgaagcattgcacaacacagataaagcaagtcagaaattcacaagtgtctggttttccgaattttgaagtaaatcacctttgaaatttcacatacctcataagatttttgggattccattggtattgaactctgttcagcttcctgccattttctgcacaccaggcttcaccttgtagtccaacacatctgctccctaagtttatagcatgtcagcaaggttgatatttgtggtacgcactatagaacaacgcagagtttgtggtatataagatggcattaacctagatttagagcagttaggtagaaacctttcctcttctaataaaactctgtagttgcttcaaacaagactagatgactgtggatgaagtggatagtagctctgagtggagcagagagcaggataaagcatttgaaaatgcgttggcaactcatctggaggatgcttcagatcgatgggagaagattgtggctga

SEQ ID NO: 124156 - DNA, 772 bp, Glycine max
  Clone ID: PAT_MRT3847_8311C.1
cttttgtgttttttcccttttctttttttgtgcttttccctagctgtgttttgatacttttatgacttaataactaagcattgaaactggatttaaattagagttttgttgatttgtagctctttaccctgctaatacttgtgagttgtgacatctgactagagtggattagtggaacgttttccgttaagtggtgttactcacattaattttttgggctggtagtgtattgtagcaaatgtccttccgcagtattgttcgtgatgttagggacggatttggaagcttatcaaggcggatgttttgatgtaaggctttttgttgggggcaagttgaatagcttcttctcaatcagcttccgctcatcgctaaaagaaaaaggagggaggtaactcagtccctctccttctccctctccgcccgtaacggaatcagcccatgagctcctctttcatcatctcgaacgagtccttttcgtggttatcgactcggtccacgagttgcaggatcagccaccggttatacagaacagccggtgggctagccttcttctggagcttcttcgtgatgttattaatagattggaagcaagcgagagtacatggcctggttgtaagcatgtggttgcatgtgctgccatgtgcaagtcctggagagaaatgtgcaaagaaattgtcagcagtcctgaattctgtgggaagattactttccctgtttccttgaagcagcctgggcatagggatggaccccattcgtgtttcatcaagagaga

SEQ ID NO: 124157 - DNA, 123 bp, Glycine max
  Clone ID: PAT_MRT3847_83120C.1
atctaacaaaaacttattataggaatatgaaattcttcaccgatgggaaaatttaaaaatgacttacatcccgtgtgtagcacgggctcaaacatatgacctcattatggtatcaaagcacac

SEQ ID NO: 124158 - DNA, 201 bp, Glycine max
  Clone ID: PAT_MRT3847_83121C.1
gcccgatacattttttgctattgggtggtcacctgtactactaacttgcgtttctgaaacatttttctctcttacctttctcacgttgggggggggggccactcccccaaaaaaaaaaaagcggccgctctagcggctccacccttacctacccgtgcatcccacctcatacctcttctatatcgtcacccaaattcaatt

SEQ ID NO: 124159 - DNA, 365 bp, Glycine max
  Clone ID: PAT_MRT3847_83122C.1
acacaacccaccgtgtgttctgagctagagtactaaatggatgaggaagaatgtcttagaagtaccagtattggaggatatccatgctttgaaagatgaagctgttatgtaccaaaagaaagaacgaggatattcgcatgacatagctaggctttcattgcaaacctagttccaagcttgaaggctgcggcaactagcaagtatcatttttaatcagatcctatgatgtaacacttgaatttaccatctttcccaagttttgctctcgaattccaaaatttacactactcatttccccctgtagttttctttcattagtgtcttctgtattacatttgatattttaacatgttcttttccactta

SEQ ID NO: 124160 - DNA, 294 bp, Glycine max
  unsure (1)..(294): unsure at all n locations
  Clone ID: PAT_MRT3847_83123C.1
ccggggcgccgacgcgtacgacagccncanaacaccacaaaaaggactttctaatttctcactctcaacttatggctcgcgtgattattaaatgtggcaaccatcaccttcacctacaactaaacctttataatatttataatattaatgtacatttctcaaacatacttgcatttccgacatcataaaaccctcaaactacttactctttcacaaacttaacaaatcattatcagccaacaaaaaattaataaaactacaacctatattcttaataaaaaccactcccatatt

SEQ ID NO: 124161 - DNA, 875 bp, Glycine max
  unsure (1)..(875): unsure at all n locations
  Clone ID: PAT_MRT3847_83124C.1
acacaacccaccgtgtgttctgagctagagtactaaatggatgatgaagaatgtctcagaagcaccagtattggaggagatccatgctttgaaagatgaagctgttatgtaccaaaagagagaacaccaatgcccggggcatgtgtgtcgggttattttggattttccgtggcgcccttagccttagcgtagcttttgggttattcagcaatagccgaggtgaggtgaagatcggaaccctccgctctctgctctgcaatggccaagatcgaagaactgaacgactcggttcccaaatctaagaataaaaggaatcatggctctacaatgttctttgtcattgttgattacctttttattttgatcttcctgggattcctctgcttcatcgttttcaaaattctcagcatttgattcgattcccgaaatcacacaatccaccgtgtgttatgtgctaggatattcgcatgacatagctaggcttcacaagcctagttccaagcttgaaggctgcggcaactagcaagtatcatttttaatcagatcctatgatgtaatacttgaatttaccatctttctcaacttttgttctcgaattccaaaatttacactactcatttccccctgtagttttctttcattagtgtcttgtgtattacatttgatctttattttaacatgttcttttccacttatatttccttttccctttactgtggtgaagaaggatgacaactaagatcaatatcaaagtacattgcatagattaaaactgataatgatgctagagtaaaatcctttttttttgccccnnnnnnnnnnnnnnnnnnnnnnnnnnnnnnnnnnnnnnnnnnnnnnnnnnnnnnnnnnnnnnn

SEQ ID NO: 124162 - DNA, 300 bp, Glycine max
  unsure (1)..(300): unsure at all n locations
  Clone ID: PAT_MRT3847_83125C.1
anngcgcgnacgcgtacgtaanctcttaatgcngctcgaggaagggtacaggccgtggagnngaatncntgcaangacaggagcanctnctnangagtncangaacangtntgttggggctancgcncnatgtagaagncacgnggcctggttngaaggggatcacncccantngaagcnacngagtnctanncagngtnangctgggagancgcgangtcgactnagcntacntcnggatcntgnagggctgggggtgcccgacncccttgtgcccnatnatggcgctnccggtgccan

SEQ ID NO: 124163 - DNA, 125 bp, Glycine max
  unsure (1)..(125): unsure at all n locations
  Clone ID: PAT_MRT3847_83126C.1
cncccctccacntagcatacnangggntcancgtnaatntccccatngatgatccatntggcattgcancanatttcaacacttgtccnactccacttggataatntcctaacgtatagntttca

SEQ ID NO: 124164 - DNA, 417 bp, Glycine max
  Clone ID: PAT_MRT3847_83127C.1
tccacgcgtccggcttttcatcaccggcaagtgcatcctcctagccgactgcaaggtcttgcacaaggttgacaacatcgccgaggttccttacattttcgacatgaacgtcggcacctcaagattgtggttattgtcaaagataacatatcgttttggaagaaggtggatgtcatggaattgagtcatgcaatgtcatggaaagatgttgattcaagtctgatgccacacctattatgagctcctcaagtgtttcttggctcagacttgtaaccttctcgttgaaatggataccactccgaaacatttttaaccattcgcccttatcaatttgtatgccaaattgaaccttttggaagaagcacgaacactgtttgataaaatgtctgaaataaacctcttggcttatggcttttc

SEQ ID NO: 124165 - DNA, 563 bp, Glycine max
  Clone ID: PAT_MRT3847_83128C.1
ataattaataatattagctcaaacgattttcatcaccttgtggaggagtgtgggaatttgaactctcaaacccgttggaagtaaccatttttcaaaaccctactcttcctccccaaatgtcgtcatccgcggcggtgcatctccaatctccgatcaacacctcctctgacgcgccgccgccgccgccgccgcattctccgttcctccatttcaatgccgactgcgtaaacccttccgccgcacgcacgaggtcgaggccgaggctcgccaagctgaggaagcagtctgcttcgcagcaggcccggtcacggagcagaaccgccaccggcgacgacggctccggcgccggcttcaatccgtttcgctccgatcatcaggtaaacggtaatgttaacagtagtggagtagagagtggttccgatggttttgtgtttggggctgggaagggcgattctgattccgctagggatttgaaggggccgagtgagggagaaattggggagggtggcggtggtgtggaatttgtgtttagtgctaaaaaacggagtgatgaagatgaattg

SEQ ID NO: 124166 - DNA, 170 bp, Glycine max
  Clone ID: PAT_MRT3847_83129C.1
ggagcgagcacacaaattacacgggttcctcatcttctatgtggacggtgagtgtgatttctagataactggattttacactgatctgtgtcgatcatcgcgtgcctgagtatgcacaaaccttccgcgactacgggctcacacgtgccttagaacacatggaatatttg

SEQ ID NO: 124167 - DNA, 454 bp, Glycine max
  Clone ID: PAT_MRT3847_8312C.1
tatcgacaaagataatatattagatatataaaatgcagtactagaggtactgatatacatatatgttataccttattgctggttccacagacagacagtcctagtctaaaggagaaccaaagtaaggaataaattaaatatacatatgttgccctgcacattgttctagcctctactgatacagaaaccttgactaatactacttgaccattggttaaaatggatggtgaaatctttttcaaaaccccttagccacgtccagatgaggaatgtagcatcttcgagcagtttattagcattgaaggttgcattagagaacactatgctatttcggagcttccaaatagaccatgttaaagctaaccaccagcaatgccatcttttgaaccttacaacatccacttgaacacctgtgtgttgaagaaaatggtgttttggaattagaggaaaagca

SEQ ID NO: 124168 - DNA, 1360 bp, Glycine max
  Clone ID: PAT_MRT3847_83130C.1
gaggtgcgagaagacgacagaagggggagtaagcaggcggcatggcattctcagcggtctggcgactagcgaatcttgggcgacacttggatttgagtgaatcagtgaacaaggctgcgccagttgggtcaatcaagttgaaggtagcttcagaggtttctgaagcattatcactgggtcgtgctgttgttgctcttgaatctaccattatttcgcatgggatgccatatccccaaaatttggaaactgcaaaagaggtggaacgtattgtaagagagaacggtgcagttcctgcaaccattgcaattttagatggcacgccttgtgtaggcctaagtgtagaagaacttgaaaggctagctattttgggaaccagagctcagaagacagctcgaagggacatcgcacatgttgtagcttgcggtggaaatggtgcaactactgtttctgcaacaatgctttttgcttcaatggttcatattcccgtttttgttactggggggattgggggagtgcacagacattcggaacagactatggacatatcttctgatctcactgagctaggcagaacaccagtaacagttgtatgtgctggtgtaaaatcaatattagatattcccaggacgcttgaatatctggaaacactaggagtttgtgtagctgcttacaagactaatgagtttcctgcatttttcacggaatcaagtggctgcaaggtctcatgtcgggtagatacccctgaagactgtgcttccttaatagaagcaagcatcaaactcaagcttggaactggaattttgatagcagttcctattcctcaagaacactcaacttctggacacataattgaatctgccattcagaaagccattaaagaagctagggaaaagaatataacaggaaatgctgagactcctttcttgcttgctagagtaaatgacctgactggaggtgcttcacttgctgcaaacattgctcttgtgaagaataatgctcttgttggagctaaagttgctgtagcccttgctcaattaagagaaaattgtcaaagatcttagaagttggaagatggcctccacaaccagtctgatccaactacaattgggagcaggaacctagaaacttgatcactctgctagtgcttcacttcttgacgttttgtgttgtattatccccccggttttccttgtgaagtggatatttttttttgctgttgttgttcgttatgcatttcaaaattgcagaagtggttagtgaacttgacaaaacatatatgttgtgagagggatactgctggacaggaaagatttaaaattctaattcaatctttccaagctaaattaaggacgcaaaaaaa

SEQ ID NO: 124169 - DNA, 182 bp, Glycine max
  Clone ID: PAT_MRT3847_83131C.1
gtcgagaccaacctctacctcacggtgatcctcaacgctgtcgcggagatgccggcgtttatgataacggcgatgttactcgaccggtgggggaggaagccgttaaccataggaaccttatggttcagcggtgcattttgctttgcggggagcttggtgaacaacgttggggtgtggaaagg

SEQ ID NO: 124170 - DNA, 483 bp, Glycine max
  Clone ID: PAT_MRT3847_83132C.1
gcggtctggcgactatcgaatcttgggcgacacttggatttgagtgaatcagtgaacaaggctgcgccagctgggtcaatcaagttgaaagtagcttcagaggtttctgaagcattatcactgggtcgggctgttgttgctcttgaatctaccattatttcgcatggttctctctacttcctctttcacctcccaatacccacaacttagtatttagactatactcacttttgtttgtagggatgccatatccccaaaatttggaaactgcaaaagaggtggaacgtattgtaagagagaacggtgcagttcctgcaaccattgcaattttagatggcacgccttgtgtaggcctaagtgtagaagaacttgaaaggctagctattttgggaaccagagctcagaagacagctcgaagggacatcgcacatgttgtagcttgcggtggaaatggtgcaactactgtttctgcaacaatgcttt

SEQ ID NO: 124171 - DNA, 866 bp, Glycine max
  unsure (1)..(866): unsure at all n locations
  Clone ID: PAT_MRT3847_83133C.1
cctttttctatcaacacaatagataattaataaattaaaataatgccatgattttgtcgtttcgcccctttccacgttttcatcctttgcgttccaatcttgctctcttctttctttcgatcagggtttcccctcgtctccgagctcgtttcgttctcgaagaatcgatctgcgataatgactcgcggtaaccagagggatcgtgatcgcgaaagggctcaggctagaaccggtggtaaaggcaagcagaaagatgatgggttgacccctgaacagcgcagggaaagagatgcgaaggcgctgcaggagaaggcggcaaagaaagcggcacaggatgcaggagggaataatgcaggtggaaccaaaaaataggcaataattcaatgagtggtttgagttcgacattgttgtttgtagacatggaatttatggaaaatttatgttgcgttattcgtggagtatgatgtgtttattaatgtaatttgtgacagatgaataaataagttgtgcttctttgaaaggtgttgtcgctggggggctgaatcaataacttgtatctttgtttggaataaatagtatttggcaatgatattgtgtttgctccccaggcgcaacaggaaaaggcagcaaagaaagcggcacagggtgcaggagggaataatgcagcaggaagcaaaaaataggcaataattaaatgagtaatttaaatttgccggttggtgattggggtcatgggggttgtggaatggaagtttttgtattgcaaaaaaattaaaaaaaaaaaaaaaaaaaaaaaaaaaaaaaaaaaaaaaaaaaaaaaaaaaaaaaaaaaaaaaaaaaaaaaanaaaaaaaaaaaaaaaaaaaa

SEQ ID NO: 124172 - DNA, 264 bp, Glycine max
  Clone ID: PAT_MRT3847_83134C.1
acaccttactttcacgtacacacatacaataattatgtctcacgctgcacaccccgctagtgctttccaagttcgaattagagttttggaagctcatggattagctaaggctgacaagacctcgcaatctgatcccttcgtttatgccaagctcaagggattgaagactatgatgactcacgttcaaacctctgttatcaacaacaaccccaaccctgtatggaatcaagaactcgacttattccccaactctgtcaagaggtt

SEQ ID NO: 124173 - DNA, 374 bp, Glycine max
  Clone ID: PAT_MRT3847_83135C.1
aagaaaagggtatggggattcaggaatttacatgccccactggacattcttgggaaaaaagggtgatcaaaacaagcccgggatctctaaattttggagctttccctcttttccgaaacgcccttatttgccaaatttgggcgggataaagggattgtttacggagaggcagaaagcgtcccttttgtgccaacaggcttttgtgacttttaaaaccacaggggaatgcttccccccaaagggaaattcgggaccgcttacatgactatcccgttttgcacggcccttttcaaaccctggaacggcaataactcccggttttttacccaccccttggtggtatccgcgcacctcttgcccaaaaaccggaagct

SEQ ID NO: 124174 - DNA, 308 bp, Glycine max
  Clone ID: PAT_MRT3847_83136C.1
tgattgggttttgctttactactattggtgatggtatgtgctggaactaactgagttatccttttacccttgaacccttggataaagaaatgactattcgggaaacctcaacattgcatttgatgacaccaatgctcccttgcctgttggcctatttggtgacctggatgaggaccatttttttattgacatttgaactatgagggaactgtctaagcttgccccctcctgtagaaggaggtatttgcctccatgaattaatttttggtcctttgccccaactgcaggatgggtgaagatcaactcct

SEQ ID NO: 124175 - DNA, 689 bp, Glycine max
  Clone ID: PAT_MRT3847_83137C.1
ctaactgctatcgagagctacacacaagagtaagaccaaagcaaaaatacattatacaatatattatcgatccacatcaatttttgaagaagatggttagagctccttgttgtgaaaagatgggattgaagaagggtccttggaccccagaggaagatcaaatcctcatgtcatacatccaaaaacatggccatggaaattggcgtgccctcccaaagcttgcagggttattaaggtgtggcaagagctgcaggctaaggtggattaactatttaaggccagatatcaagagaggaaatttttcaagcgaagaagaggaaattatcattaagatgcatgagttgctggggaacaggtggtcagcaattgcagcaaaattaccaggaagaactgacaatgaaataaaaaatgtgtggcacacccacttgaagaagaggctactgaattcagatatccaaaaaagggtttccaagccaagaatcaaacgatctgattccaattccagcacactaactcaattagaacctacatcatcagcatgcactacttctttaagtgacttttcatcatttagtgaagggactaaaaacatggacaacatgatcaagagtgaagacatagagtctgtggagacaataatgcctccaattgatgaaagctttggtcaaaggcaacagtggattatgaaa

SEQ ID NO: 124176 - DNA, 182 bp, Glycine max
  Clone ID: PAT_MRT3847_83138C.1
ggcatcgatagtgaatacgtgttatatcacaggggctatgcgcgggatacattgactcactgccgctactgtgtgtactacggttaagatagtgattgttggatgaacttctagggattcaacggatacttgattcaatacaaccgaggcatgcataatgtctatgctttgcacaatctaat

SEQ ID NO: 124177 - DNA, 489 bp, Glycine max
  Clone ID: PAT_MRT3847_83139C.1
agattccttacacaccttgtgcttccatggcaaaaccaaagcttcacttgctgtcctttctcttctgcagcatcttgctaagcttcttccactgcacattttcactgatcaacccagaggatgagcccagctggactgacatggaaactgaagacattaacattgtaagaacccggagagatacttggaaaaaatgtgactactctgttggaaaatgggtttttgatcaatcttaccctctctatgattccaattgtccctatctcagcactgcagttgcttgtcaaaagaatggaaggccagattctgactatgagaagtggaagtggaagccatttggttgttccatcccaaggtttgatgcactgggatttctaagtaaaatgagaagaaagagaataatgctggtgggtgattccataatgagaaaccaatgggaatctcttgtttgcttggttcaaggagttattccaactgatagaaaaaggg

SEQ ID NO: 124178 - DNA, 493 bp, Glycine max
  Clone ID: PAT_MRT3847_8313C.1
ccttatgaagctctgttgtcaaagtataaaacaaaggtgcgttattttcagaattttatcatctgggccgtgcaagttttctcccatacgctagtgggtttgctgaaaaatgtgattttggtgggttattgagatgggtttttcggaacatgctctgatctcttcctctgtctctgttgctttgtcttggattgacttcgttttagtgttttttttgctggaaaatgtttccttggccgttacggttgctgggggttctgtagtttgaagaatcggcataagtatttttcccccgatcttcttctgcatagttcatttcccgtccgatggctaaggaaagtgttgatttaccactgattccaaaagtaactatgtcaagtggggttgcattaagaaggcactctgctggaatagcaaattctggaaataatgaaaagaaagttgttgttcctctttatctcagagcatctactggctcctgtcatgatttttg

SEQ ID NO: 124179 - DNA, 213 bp, Glycine max
  Clone ID: PAT_MRT3847_83140C.1
agtacgcgtggggttctagatcgcgagcgccgccctttatttaaaaataagcgcgattttataaaaaagggaattaaggtttatgttttttaaaaatgtgcttataaagagaattacagttactagaaatttaggaggaaagaacttgaaaatagggggataggtcaaaaggaataggcagaaaacaaagggacaggcaaagcacaagagtgt

SEQ ID NO: 124180 - DNA, 402 bp, Glycine max
  Clone ID: PAT_MRT3847_83141C.1
acacaaaaatctggatcattcctactcgcttatatatcctaacccaaaacgaggttctatcgtaatactacgttaccatcgaatgtatgagtatgcaaagagcaagacactgcatggtattgtgataatgagcgttccctgttgcatgcatagcgagaacctgggatgtttgcggtatgattaggggaaagaaatggaaggagaagatgaaataaagtggtggagaagtctattgcggcatggcacaaagtatgaataccaaagtggcaatccatccatatactacctccaaagttctgtataagagcgaggatgtaggcatataccaaaggacaataaaagtcgaatcaatgaaaacgtttggttcggaagaagatgaagagggaggagcaaaatcacttg

SEQ ID NO: 124181 - DNA, 182 bp, Glycine max
  Clone ID: PAT_MRT3847_83142C.1
ttcactttccaatacacaccctttctccacctctccaccatccatttctgacgccgcagcccgaacccgcctcttgaactccatccgcaccctccaatccgccgacgccgccgtctccgtctccgtcgacttcttccaccgaatgctaaccccaaaccccttttcctgcatccaagacttca

SEQ ID NO: 124182 - DNA, 788 bp, Glycine max
  unsure (1)..(788): unsure at all n locations
  Clone ID: PAT_MRT3847_83143C.1
tnccgatttgggctgcnnnngtggcttcctnncnagtggactcaccatgctgtgatnnncgtggagggcacatnnngatacttagcaccagagtactttatgcatggaatcgtggatgagaaaacagatgttnnngcatttggaattctacttttggagattgtaactggacggagacctgttgattcttcaaagcaaaacccccacgcgtccgcaaagcctctgatggaatcagggaatattgctgagctagctgatccaagattggaaggcaagtatgatggagagcaactctatagggtagtgctaacggcttcatactgtgtgagacaaactgccacgtggcgtcccccaatgagtgaggtattagagctgctaactagtggccaagagagtgaggttggaaagagctggaggatcccaaagttcacttctgatgaattggatgattactccatggttttcggatatgatgtaccctcagacgtatctttggaggattatctgtgagaatgaaatgtatggttcagtttcaattttcttttccatactctatatcttaggtttgtggtaggagtgaagtaataagcattagatcagaggcttgttctttatttgcgtaacttatcatatgactctcttttttgttgtttatttggtacaccttagtctagtctgtcttggttgagcaaatacgaacttttctatttttttggagttgaaggggaggattataatttttatgaagattttagggaaatattgttaatacgaaagacattctgtcg

SEQ ID NO: 124183 - DNA, 432 bp, Glycine max
  Clone ID: PAT_MRT3847_83144C.1
caagggggattggctgcctttataaaacccctgggggaagaggaaaaatttttccaaaggaaccccccctaaaacattcctaccccgaattttttaaccaaaaaaccctttcctaaaaggggcagaaaatttttttttttttttggggggggggggggaaaacggaaccgacattttaggtggcccctaaccccctttttaaaaaccccgggcctccatcgattggaatggaataacaccggcacccctcccttgttgggaaaaaaaggagggaggatcccgattttcaatccccaagggggaacaactttttgggcccaacggggcccccttcctaacgggttggagttgaaaaggcaccccctgatggcccatcatcgggtttacctcctttcccaagggggccttgaccatgagagactaacctttttt

SEQ ID NO: 124184 - DNA, 421 bp, Glycine max
  Clone ID: PAT_MRT3847_83145C.1
gcacgcatacgccgcatcaaactcggctcgagctttaatacttaaatttaaaaaaccaaagcctcactaaccggaaaaacgaaagcccacaaaccgagcaacactttggagagacaaaaacgcaggagacaacgcctcgaaagctggaaggcccaaggaacaggaaaaaccaaaacgagagcagaaagacaccgcaaaaagcaaaagccaccaaacacggaaacacggacacaacgcaaaaccgaaaacagacgaaggaacaaagcacagacaaaaaccgggactaaaaaaaacaggggcaccccaattgaaccatacacatacagcggcacacaagtgagaccagttcccaaggaaccaagcctaatagggacataaggatgtacaacaccccacagggcataaacatactctccatgga

SEQ ID NO: 124185 - DNA, 379 bp, Glycine max
  unsure (1)..(379): unsure at all n locations
  Clone ID: PAT_MRT3847_83146C.1
tgataaaaacaacctcgtaaacagaaccagcaattccaccaccgatgagagaccgcacccaatggatccagtggttaatccagatccagctcacgacagcagacccaaatatgacagcgaagttcataaccgctgcagagagaaccccacccaacaaaaggttagcgccgacaatgaaaccaatggcgataggagcaataatggccagattaccctggttgaggtcaatggcagtgacgtgnaccgtatgcacgagacgcgaaatcatgacgatgtccggcaccaagacggtggcaagtccgactccancagaaagtccgaatgctggaacgaggggaggcgataacgagaacgcgggagagaaggaagcgacggtggg

SEQ ID NO: 124186 - DNA, 284 bp, Glycine max
  Clone ID: PAT_MRT3847_83147C.1
ctaaagccaaatcttatttttcaattgaatatttaatctaattcgcggggttattgtcattaatttataaaccttcttggttggggaattctaacgaataaggttggagattggatcacacgtatacacatgtctactattagaaacttgtaaatagtttttttttggaaaaaaggctagttaatggtcaaaattgttatgcttgcaaaagcataaattgaaaagttatgatttgcacatattgtatgatgtgttttttaaatacaaaatccgaacatataatt

SEQ ID NO: 124187 - DNA, 110 bp, Glycine max
  Clone ID: PAT_MRT3847_83148C.1
cagaaacatcaaaagttccttcactttcttgccttatccaaatgccacgaggagctgtgttctaagcagagacttgccttgcaaattattttggagcatggtgaaaagtt

SEQ ID NO: 124188 - DNA, 216 bp, Glycine max
  Clone ID: PAT_MRT3847_83149C.1
gacacatatccttctttttgaacgacttattgggggaaggactagatttgggggctacaactcttactgaataaagatacatcaacatgactctttaagctttacatctctctgtcgatgcattccccatatctgatttcctagaatctgtattacacacttattctataactcttaactcccttttcaccaaaaaaccttttacaatcatcacac

SEQ ID NO: 124189 - DNA, 423 bp, Glycine max
  Clone ID: PAT_MRT3847_8314C.1
caattctttatgcatgagaactagaccacataaggtcaagtgagttgtaggagctctcgatgcaggcattggactggggacaccgtgctgtttgtaacaatttattgattactgtaaatccaaggtgtttactgtctgtagtaacgtttatgttgtatattgttagttcatggcaggagaaaaaagggagtaagttttcatatatactctctctctctctctctttttcttctttttttttaaagattatgtatccatacttgagaatgatacgtgtatggtgtggaacttggttccaaaccgtagccagaatgatgatgggcttgaaagtgaaagagccagcgagtcctgaatgtccaaagtattagttggaagcagttattacgcattatgctatttcttgcaatgagtttgataattgat

SEQ ID NO: 124190 - DNA, 555 bp, Glycine max
  Clone ID: PAT_MRT3847_83150C.1
tgttgcacttgcacgcccttctccgcctccttcctcacctctcttcctcttcaccaccgccttcaaccgtcgccgccacatttcgccgccgctgtacccctttgttccaaacaacaaaccccttctcacacctttcgccttttagccctccctctattatcccatggcaacaacaacaacaacaacaacaacaacaacggtggtagttggggcaacccctttgactcctccgattccaattcaaattcccaccacacccttttcctctccctgctatgctcctccgccctctgcttcttctgccacctcctccacgccaaactcgcaaaggccaaaactttgtctccctccaccaccgccgacacctcacttttctccgaacctgtttatgaagtcaaaggtggcaagtggaccaaactcgtccccgacctcaccaacgatgtctttgtctccgcacaacaaggcttcttgtcggagctatcatccctcaaagtaccttcacagctcgcaaccttcgtgtggctcaagtgcagtgacatcttcacgcgcttgatg

SEQ ID NO: 124191 - DNA, 623 bp, Glycine max
  Clone ID: PAT_MRT3847_83151C.1
caacttattatttattagttagatttttatttttatttttggacactcaaacattagggacatttcattgacattcttaatttttttttttatatctcttctcacgttacatcatcaaccatatccataatttatctttcttctcttctggactctctttggctgtctacactcaagaaatgtcatatcccaactcttcttacactttggtatgcttgtacaaagttgaacataccaggtaatatacaaagttgataccccccactaggacgaacatccagtaaaaattatctagcctcccctgatttatgtcagcaggtaaccaattagtactcctacgcacttggtcaattaatgcggtacttagataataagatatccctagaatcatggaaatcatagcagtggatgtgctccgaagtgactgaggaagttgttggtagtagaatgcaacttgtgctggaaaatgaaacgattctcctattccaactaacaccaattgtggaaacaaccacagaatggacatggccactgagggatcagaatgaaccatcttgagcctgtttgattcaacaagtgctgagacagctattccaagcacattgaacacgtggcctactcca

SEQ ID NO: 124192 - DNA, 570 bp, Glycine max
  Clone ID: PAT_MRT3847_83152C.1
agacggggcaggttcagatggaagaccaactcctaggtttgctgcatatggagcaacaaagagaagtgtggtgcatttaacaaagtcattacaggcagaattgcggatgcaagatgttaaaaacgttgtggtgcataatctttcggtaggtttttgtatcctatgataatgtatgatgggcatggattcatggatgcgaaaacttgcatgtttctccaattttagtattgtcatagttattaattcatataataaagggaaaaatgtgttttgtgtccctttgctttcggtcaaacgtagtcaagatccctctactaatccattgtaaacttcaatatattagatgtactggaattctttgttattattatgtgcaatcctattagatatccgtcagccttttagaaatacagtggttttcaggatctcattcaaattgcaaaagagcagatgatatttgtcatatttgcttatgcagatcatgctgggaaatgaggatgaatttgatttcctaaattttcattctgcaattattaacttgtcatgcaagcttaacagattggatattaa

SEQ ID NO: 124193 - DNA, 255 bp, Glycine max
  Clone ID: PAT_MRT3847_83153C.1
caaccatgacatgtctgcagtagctgacatcatcgttgtcactgcggattggctaaactacagagctgtatgccgttgtgacaggtgctggtaatggaattggcttagagttagttatacaattagcttacacctggagtcaacgtggtgctcactgcactagatgcctcgacaggtatccaagcactgcacgcactcaaggactacgggtctatctgagcttgtactgaatcatcaagctgatgtggctgatgc

SEQ ID NO: 124194 - DNA, 1651 bp, Glycine max
  unsure (1)..(1651): unsure at all n locations
  Clone ID: PAT_MRT3847_83154C.1
gccctcggcaaattcccgaccctaaaactacgacaccacacaaccacccccgtccggttcaccaccacggggtcaatcattcccgagtacttaatgcagtccaggaagcaagaagatcagcttccaatggctatgatgttgctacgtcctaggagagcaccccacgaactgcagcctccgcgatttcctctgccactgctcctagtgtagctcgctccaatgccctcccaacccaaatgtctcataatgttaatcccacgagcattccaattcccattgtgtgaggctgtcagctgcaaacaattgatagtagagatgcacgagattgtcagaagaggtcggtagtttaaactgctttgtttacaccgtcatcatcactgctggctgaatgaaatcaagcagatttattatccatctgccacgagtcttgtatagagggaggaagggtgatggcttccacatggtaaaatactacatatacatactatattttttccctttgcctacattttgtaaatttacttagatgtaaatgcgtagggggttgggtagatggaaagtgggatgggggggtgggggggagccggtaccgcgggtagtaccggcaggggttaaggcacgggtttggggtgtatcggttttacaccggggatgtctatgctggagagtggtttagtggacagagccatgggtgtggggttcacacgtgcgaggatgggagtcggtatgttggggagtttaagtggggggttaagcatggccatgggcattaccatttcagaaatggagatacatatgcgggtgaatactttgcagacaagatgcatggttttggcatatatcgttttgcgaattgccatcgttatgaaggagcctggcatgaaggcagaaggcaaggacttggaatgtatacatttagaaatggtgaaacccaatctggtcactggcaaaatggagtccttgacattccaagcacacagaacaccacctatccagtttctcctgttggtgtctatcattccagagtacttaatgcagttcaggaagcaagaagagcaactgagaaagcctatgatgtggccaaggtagatgagagggttaatagagcagtagcagctgctaacagagcagccaatgcagctagagtagctgctgtcaaggccgtgcaaaaccaaatgcatcataacgttaacagcatgagcatcccaattcccattgtgtgaggctgtcaactgcaaacttttgatagtagagatgcacgatatcgtctgaagaggtcggtagtttaaactgctttgtttacactgccatcatcaccgcaggctgaatgaaagcaagcagatttattatccatctgccatgagtcttgtatagagggaggaagggtgatggcttccacatggtaaaataactacatatacatatataatttttctcattgcctacattttgtaaatttacgtagatgtaaatgctggtgtgcgggtgaaaccactacccagctactgttgtaagatcgcttggtaaaataaggagagaaacaaacatctggcctaaaaaaaaaaaataaaaaaaacttgagatatatttcatgtcacctgttaactaaaggtttgtcaccaacagataaggcattgtgtggngtaaaatt

SEQ ID NO: 124195 - DNA, 352 bp, Glycine max
  Clone ID: PAT_MRT3847_83155C.1
aattcggctcgagctcgagccggaaaatttgagtcactcagtaacgattcctgttgctactgataatgtggaaatactccaaaaaagagtaaagcagttgcttggatgtttttacataaatgtgaaagagattcgaggtattggcttgcatgtttccaggcttgaaagtgcagaagcttctaaacaaggtacagtaaaatatactttgaaatcatggctcacttctggatatgcaagtattgaaaatcagaaatatcctatgggtcatgacaagcaaaacagggatagcacttgcagtcgtgcttgtagagatttgccagggtcttcagtagaaatggacaataaaatacct

SEQ ID NO: 124196 - DNA, 1027 bp, Glycine max
  unsure (1)..(1027): unsure at all n locations
  Clone ID: PAT_MRT3847_83156C.1
ccatacaaagtactagactttttatctgtcccatttaacttatttattaagattggtaaactgtttttctcagttaattaaatttacaaaacatcattcccaaatttaacccaaataacttagttggggaaaaaaaaaaaaaaaacccttattggggatggtccctcctctccttattttaccaagccattatacaacagtagccggttgtgggtttcaccaacacaccagcttttacataaatttacaaaagggggaaaaaagaaaagttttttataggatagttttaccatatggatgccatcacccttcctccctttatacaaggaccacagcagatacagataacaaatctgcttttttttttttttccagccagctacctggtggtaaggtgctaggagcaaataatgaaaaagatcaaatcaaagaaagcataatgccaaaagcaaatgttgcagtcggcatgaagctgcttaaactagtgtagccacctagtgaagctgctttcttctacaatctcaagcttctcttctaatataaaagcagctgagatactctttacacaacaggaattgagaagctttcactgctaacatgataattctgtttttgtacagcttttacagcagctactctagctgcattggctgctctattagaagctgctacagctctgttcaccccttcatctaccttagccatatcataggctttctcggcagctcgtcttgcttcctgcactgcattgagtactttggaataatagacaccaacaggagaaactggagaagtggtgttccgtgtgcttggaatgtcaaggactccattttgccagtgaccagattgggtttcaccatttctaaatgtatacattccaagtccttgccttctgccttcatgccaggcttcttcataacgatggccattcngcaaatgatatatgccaaaaccatgcatcttgtctgcaaagtattcacccgcgtatgtatctncatttctgaaatggtaatgggccaagccatgc

SEQ ID NO: 124197 - DNA, 1592 bp, Glycine max
  Clone ID: PAT_MRT3847_83157C.1
attcgcttcctctctttcctcatccactatttctctccgttttctggccccaccggaaaacctcttccgttcgccggaaaaccgctttcgttttcggcgtttttttcacgtctccagaggaagctgatttcggtcttcttattcgcgcgtttgcattctctcgctatttgccgtggtagcttctgcgaggcgttggatctctctgtggttcggtttcagcgttgtattcagcgttcctagagaatgtggcgagcctggttgtccttcgaggctcgctcttaatctgaaacattcaggatcgtgatttagggtttggatttcgatttggtattgtgattgctttttttttttttggcgattccttgtatcacctttttttggcgattcctacagggagcgacttcgtaatgaaatggtggaaagaagagtgactttatcaaaggaagctagaaatgggttagaatttttgaagcgtaaaaggcttcagcgtgcaaaatttgtcactgccacccagacaagtgttgctaacatgatgagcagaagtggaaatgctttaagagcttcagcatcatgtggcccaagatttcatggtaatgctaatgtcttttccaagcgcaaggtggataagtttgatacaaatgacctggattggactgataaaattctagaatgtcctgtgtattctccaacaaaggaggaatttgaggatcctttgatttatttgcaaaagattgctccagaagcttctaaatatggtatatgcaagattatttcccctttgagtgcttcagtacctgctggggttgttttaatgaaggagaaagcaggattcaagtttacaactaagagtgcagccccttcgccttgctgaatgggatactgaagacaaagtcacattttttatgagtggaagaaattatacatttcgagattttgagaaaatggccaacaaggtatttgcacgaagatattgcagtgctggatgtcttcctgccacatacttggaaaaagagttttggcatgaaattggttgtggaaaaatggaaactgttgaatatgcatgtgatgttgatggcagtgccttttcatcatctcccactgaccagcttggtaacagcaaatggaatttgaagaaactttcgaggttgcccaaatcgattttacggctcttggaaacatcaattccgggagtaacggaacccatgctatacattggaatgctgtttagtatctttgcttggcatgtggaggatcattatttgtacagcattaactatcatcactgcggggcatcaaaaacatggtacggtattccaggtcatgcagctttggaatttgaaagggtggtgagagaacacgtgtacactaatgatattttgtcaagtgatggggaagatggagcctttgatgttctcctggggaaaacaacactatttccaccaaatattttgttggagcatgaagttcctgtctacaggctgttaaaagccaaggagtttataaaacattccctgggcatatcacgctggcttagcatggtttaactgtggagagcagtgaatttgcaatggtgattgtttccttagggctgt

SEQ ID NO: 124198 - DNA, 199 bp, Glycine max
  unsure (1)..(199): unsure at all n locations
  Clone ID: PAT_MRT3847_83158C.1
gcagaagatggtgtcaggttctggaatctgcgcnaagcgantggtggtngncgctcgccaccacatgttgggtcggctaacgtccntcgnggcgnaagaccctctgaattggcagnaagttncngcngngcgtgcgcagagattgnatcnccggggggtggtccgncanangagganntcnttnagctcnncccgcaaa

SEQ ID NO: 124199 - DNA, 256 bp, Glycine max
  Clone ID: PAT_MRT3847_83159C.1
aaaagatgtaaataaagaaaaaaaaaggaaagaaaaaaaaagaaaaataaaaaaattaagagcaaaaaagaaaacgttaaaaaattgcaacactgaaatcaaaagttcataaagcctgtggaatgaatcgtaaaataaggggtggaggcatggcaggcattttgcatagtgttggttacttgagagtaataagtcactccaagtaagctcactagatattcgttaatcggcagttccttttcaattccgttacagg

SEQ ID NO: 124200 - DNA, 753 bp, Glycine max
  Clone ID: PAT_MRT3847_8315C.1
gcgctccggggaaagtgagggaaagcacgagaaagcttgcgaaaatttcacgttcttctatttgcaaacactgattttccattccattactgctattattatcattattattattttgctgtgatcaaattggtttatcgtattaagaattttcattattattattactgttgagactttcctcaagtcttgcaccaaagaactgggttcccagttttctccaattctagggcaactttttcggctaaatccctttcttcccatcgaagcgagctctcattgcaaattaaacgcgctttgcgtgctgcgatcttggttgtgatggaaactagggcatgaattggccgtacagaagaaaaaaagcgtttaaagaatgttcttcagcggcgatccttttacacggaagcgtgtcgatttgggaggtcgaagttcaaaggaaagggaccggaaaaacctgttagaacaaacacgagttgagcgcaaccggcgcttatggttgcgccagcagaactctgctgtactcaaaattcagaaatgcttcagagggagaaaagctgtcagaactgaacaatccaagttgcgagagcagttctataaaatctatgggaagcattgccagaatgtggacaggaattcttttggtccagattctaatttcctctaccagttcctctatttctttaaggcagaaaatattgaggacttcttaaaacttgtccgttgatgccggtggcctgttcagtctgttcgggg

SEQ ID NO: 124201 - DNA, 428 bp, Glycine max
  Clone ID: PAT_MRT3847_83160C.1
cctcgtgccgaattcggcacgaggcgactctcctcccgcccccgtgtctccctccgactcccccgtcgcctccggccccgccgtagtcagcgacggacccgccgacgcccccaccgctcttggccccagcagccacgcccacctccgcagagtctccgcctccggatctgtcgccgccgttgcattcgccgccgcggccgctttgatgatgtagatccggtagttagggttttattttaccattattgtttattagtagtataaatattggagtacgagagtttgtttaaagacactaaacattttgtttttattattatcatcattagtgagtgagtgagtggtgggagatcagatcatgttgatagtgacttctgggagatcttgttctttcgcttccctctcacactcagactaccattattaat

SEQ ID NO: 124202 - DNA, 156 bp, Glycine max
  Clone ID: PAT_MRT3847_83161C.1
ttggggagttttgtcgcagcattccatacgaggccgaatggaagagtttttgttgggtttggaagctaaataaggtttgcgttgaaaaaaaaaaaaatgggaagagaaaaagagacaacaaaggtagcttacacaatggaacatcttgtaaccttt

SEQ ID NO: 124203 - DNA, 326 bp, Glycine max
  Clone ID: PAT_MRT3847_83162C.1
ggtttctgcagcttcaattcaatcttttgccacaaggcgtaaactccctccgactccgtcccaacaacgccttaaacgtcaccaccttaatttcttcccgccccaaccggcccaccacacctttcgtcaaccccgccaccgcccgccgcttaactaaaacacaactatgcgctttccgggaaggccgtgccaccccttttttccgggaccttgggattccaaaaggccaacgggggcttattcttttccccaacctcattcaatttccccgtttgtgccttgccacgattttccttggggccattattaacaccaccaaacccctt

SEQ ID NO: 124204 - DNA, 321 bp, Glycine max
  Clone ID: PAT_MRT3847_83163C.1
tttttaaagacaaaagttgaatactgtcattatattaaggcgattcagaggtacaacgccactcatatattcacataggctgggtcggagggtggttaatacatatgtcatacttatattattacacataatatatttggatattatatcatatcagatggcctgaccacagcttcatatatgcttggtgttatttatgggtcgaccaaaagacctgcgtaagcttgatacttgcgctgacacactagactatggccgaggttgtcagaatcgaaaagagcctgctaatggattgtcctaaacaccattcttaatgtagct

SEQ ID NO: 124205 - DNA, 465 bp, Glycine max
  unsure (1)..(465): unsure at all n locations
  Clone ID: PAT_MRT3847_83164C.1
gatttaanagaaaggagccgttcgagtacggagaacgctaaagcctcatgcccacctcggaagctgggtcgagtggttctggatcgctagcgtgcaccaagattcttactggggacacgactaggatcttaaaagacggaggcgccagctacttgagctaaggattagggattatggcgactctctctaagagcaagctgaaccctgtcctggatagggccgatagtgtgatgggactatatgacaacaacatagaggtcccacttcagttgactgaattcgaccgctacaaagaaaatcccgaggattacttggacgcgcaaaagtacgaagcgctgttgcatacccttgacaacagcgactgctgaggcactacgtgatctgcttctgtgtggagagccggacttatagccatgccctcagtgaaaattgcatcaacaagctgaggccgtggcgcgcgctata

SEQ ID NO: 124206 - DNA, 249 bp, Glycine max
  Clone ID: PAT_MRT3847_83165C.1
cactggtaggcaacatgggaacatcggtggcccttactatggaaccaacaccgcagacaccggtactggtaccagaaaacgcctcccaggaggagaccggtatggacgcaatggtggcactgattgtggaacaactggttgcactggttatgggaatggaactgggtatggagtcaacactgaggggtcgcacaatcaagcaggaattaagaaagaacatcgtcaggatgaccaatctcaaggtgatca

SEQ ID NO: 124207 - DNA, 419 bp, Glycine max
  Clone ID: PAT_MRT3847_83166C.1
accagggtacttgaggcatgctgcagggaaatggatgctgcttttgttgaccatggctatgtggtcgcaaggaaaacaagttcaatagggcctttgttgctttgcattgtagagagagggacttttaaaaagattttggattatttcgtggagaatggggcagcactgggccagttcaagacccctaggtgcactaacaacccggtcctcctcaaaattcttagtgcatgcaccattaaaacatttcgcagcactgcttatatatagttcaatccacttatgatggatgcatcatgcattgttttgattttttttttcttttcaaaatttttctatggttttctcctagtgaacaacaagctataacgaagttattagcccatggttactagaggaaaaaaaaatctttttaatcaaaa

SEQ ID NO: 124208 - DNA, 263 bp, Glycine max
  unsure (1)..(263): unsure at all n locations
  Clone ID: PAT_MRT3847_83167C.1
ggcaaccgcaaaaaaacaatactacaccataggattttttttgtgataattaattcaaaactaaaatttattgttttatatgaagtggatggggggtcttttcanactattcattatctggattgttcacatatacaactattatcagctatatatcaaattcagagtaacatccaaacctcacacaaaaaaagattttttacaaacatactaacacatactacatacatgccatcttcaaattgtatacatcacctttgaaa

SEQ ID NO: 124209 - DNA, 969 bp, Glycine max
  unsure (1)..(969): unsure at all n locations
  Clone ID: PAT_MRT3847_83168C.1
ggctcgagaaaaatcactgcctacgttggcggcggcaatggcggcggtgggaaggtccgtccggcggctaatggaaccgacggtgacggccggtttgaccggtcgcgacacggaacggttttcagcgacggcggtgcttcgacgcaggcttataaaacaggggaaaaaacagagtcggtgtcagggcaagaagaggaggaagaggagaatctgtggaacgcgatggtggaagaagcttctagaatggaggtgagttggagagggaaggatttggatagtgatgttatgaaacggttcgtttccccggtgatggcgagtattgaatccgatgactatgcagagtatctgagaacagagcttgtgtccaaacagggttgtctcaggaccccaacaacactctcctccttgccaaatatgcccagttcctctacctcgttgcacacgattatgacagagcggaagagtttttcaagagagcaatagaggtggagccaccagatgcggaggcatataataaatacgccccctttctatggaaagtgaagaacgatttgtgggctgcagaagagacctatttggaggctatttcagctgatcctaataactcattctatgctgctaactatgctcattttctatggaacactggtggtgaagacacatgcttccctttatcctcccctgacaactcccaagaagtttaatcaatcaaacaataatcaacaaaatcaaaatcaaattgtagaaaagtatagagaagaaaagaaaaagccaaagaaaaaaaaaagaaaattttgtagcttatatatatatatatatatatatatatatatttttttttttttttttttcatgttacattttttcattggggggtgagatgaagagccccgaagaggatggggaatataatcaatatgattattgtatcccttttgtaattataagtgtacatatacgtctttnaat

SEQ ID NO: 124210 - DNA, 126 bp, Glycine max
  Clone ID: PAT_MRT3847_83169C.1
gtttgcggctgaggattccgaacgagcgaccttcttcgtttctcgcaaagttttcgtcatcatgggtaaggcaaagattcacatcagcattgtcgtcattggacatatcgactctgggaaatcaac

SEQ ID NO: 124211 - DNA, 283 bp, Glycine max
  Clone ID: PAT_MRT3847_8316C.1
tgggggagcgacacagagagtgatttcagtgagtgatcagtgttcacttgatctcatcataatcgtcagcgtcaactgacgaagatgccgatcagaaacatcgccgtcggaaagcctgaagacgcgactcactccgacacgttgaacgaggttttggctgagttcatctcaagcttcatcttcgtgttcgccggatcaggctccggcatcgcctagaacaagctcagcgacaacggcgctgcaacccctgcagggctcatctccgcctccatcgcctcatgca

SEQ ID NO: 124212 - DNA, 451 bp, Glycine max
  Clone ID: PAT_MRT3847_83170C.1
ggggaaaaaaaaacccccccatttggattaattttttaaaagctttcaaagaaaaaaacccgggggagggaattccctccctccccccaaaaaaaaaaaacccccaatttctaaagggggaggggcctcaaccccccccgggggccggaaaaaaaaaacccaacccaaccccccccccgggggcccccccttaaaaaaaaaaaaaaaaaacggggaaaaaattttgaaaaaaaaaaaaaaaaattccctttccccccccccaaaaaaagggtctgggcaatccccaaaaacaaaataacaagggtaaacatgggatcttggcccccgggggggcatatttaaccctttggaacccccccaccagggccggggttttaaaaaaccggtcccctaaaaaaattttccaattgggcccgggaagagggccaacccctaatggaaggggagaaaa

SEQ ID NO: 124213 - DNA, 491 bp, Glycine max
  unsure (1)..(491): unsure at all n locations
  Clone ID: PAT_MRT3847_83171C.1
tttcctttctcaaggtcttcaacaagcactatgagttattggcctatcacacgtctattagcagattcacatagcgcagacacattaaaatgggctatggaagccttttcaatcactccagaacagctcgctccatcggtttagttccctttagaagaaaccaactctcagtttactttggagacacgcgtggaccacaaggaaaggcgttacttagccgtaccctgcatggagcatgcaccgtgcaacagctcttcatagcaccgagaggagagtacctgccntctctgtgtaatccatgctcgctcacggcggagccggcggagtacccttcgccaagactgctgtctacgacaacagatacgcgccgttacccgtcgacaaactgagctacaattgttcggtctgcagcaaagtctttttctcttaccaagcactgggtggacacaaagccaggcaccggaagctcggcggtgagcaccactcgacct

SEQ ID NO: 124214 - DNA, 258 bp, Glycine max
  Clone ID: PAT_MRT3847_83172C.1
atgcaaatgaggaatttccgcataatatctccttctcaagattagagaggtatgttttaatttttaaaatgtacacccagagctggctgactgacatgatggaaggcatgatggaagaacatagaccatgtagagctttatgcataaatggttttaatgcctcagttcaaagttttatatcattaccaatcaaggatttctttcaaaaagcagagtatcttcatttggagaaccttgagggaggttacgaaaatgtaa

SEQ ID NO: 124215 - DNA, 547 bp, Glycine max
  Clone ID: PAT_MRT3847_83173C.1
tgattcttatgtttgcttttaataccggagttaattatttttatgtttgcttttattcatgtcataaggagtgctgtatgtttgctgttgtgaattgttaaaaggagcctcataacatagcaaatgtatgacttatttttggttttcttcacccaatgcatgtagcatgtatattttttaaaaatgtaatcaggcattatatgtattttgaatacaactgcatctcaatcatgacctaatttaacaaaatagtatctcttgggttgggattcttgaatcatgtttcctatgtttgtgagctgcctacatgaaggtttcttatctccgcttttgtttaaaagaaaaatgcataatatgaagtaatgattgatgttgaactttgtaatatcttaatttcatcttgtgtctatgctcaatgcataatagggctattttgtaatattttaatttcatcttaatgactgaggcaaatgtttcaggaatgttttatttggtggagctcgcccacgtgaactagtaagtgttttcctttatatattatcctgaa

SEQ ID NO: 124216 - DNA, 476 bp, Glycine max
  Clone ID: PAT_MRT3847_83174C.1
cggctcgagcgattcctgagttgcgttggtcttgggggggttacaaactcagcagcagaagaagaagctcctcaattggttaacctcaaattcgagtcgaactatgtaaacgccactttcggggcggggttggtggctctggtttggtggttgggctggtactggtccttaagtcgggttttcccagcctggattttaaccaccggaaggggtccctggtaacggcttctgggaggggtggttttaaattccgggaaggccgtttccgaccagtttcgggggggtttccgggttttggggggggacgatgacccacctggtttaaggatctttgagaagatgctccgaccgtccctttacgaagttccaaaatgcatcgagcaaaaactgctctctcactgcttagagagaacaaaaatgggtttgacattgttataagcgatgtgcatatgccggacatggatggattaaacttt

SEQ ID NO: 124217 - DNA, 466 bp, Glycine max
  unsure (1)..(466): unsure at all n locations
  Clone ID: PAT_MRT3847_83175C.1
tgttagtggactgatgtattatatccccaagtacatgtctatcaggcacagagtcaccatgcatatagtttagttttgttgtctggaaccaattattatttattggtactgactcattatgtaggcactggaatattcaaacggtgatttgaagttagtgactcagcagcaatttgaagtacaggatcaagcacgccaccgttctcatgactctgggcaccaacattctttgagactaccaccttcgagtccctatgataaattcttgaaagctgcgggatgctaatgacactaacctgcaatagatgacattttttcattctttgcaatgctggtaaaatgtttctttagaatttagatggttcctaccataagtacgtgaaatatgtgggagtaattttttttttctttcattntgntgggagagggtgatgtttgtttccagcaaatgtatgattttgtctat

SEQ ID NO: 124218 - DNA, 168 bp, Glycine max
  unsure (1)..(168): unsure at all n locations
  Clone ID: PAT_MRT3847_83176C.1
atatgtnttaattatattttttttgaataaattaaactattaataatcgtgaaataaataacaatgcttttacagtatatatatacctatatcaaaactttatatgtcaatcaacctaaattatactttcttccactttataaaactcttcataaatcaaaataaaaa

SEQ ID NO: 124219 - DNA, 338 bp, Glycine max
  Clone ID: PAT_MRT3847_83177C.1
ggaaaatcaaaaaacttggggggaatagattacaataaacactggggggggcaccccttggcttgagcatcacagtttttttataagttttacctccaaccggtccaatttaatgccccatcatttttcgggggggaggtttttgaatttttggggggcgcaatacaaacaatttattttccacataaggtggcctccttccaaaggaatttaaaatcaaccctgcccatttttatttattcgatcggcccctggaagaaggggctcttgacatgagcaaggccatgttttaatccttaaatttcaagggggcctaagggagagttgacccttttttt

SEQ ID NO: 124220 - DNA, 480 bp, Glycine max
  Clone ID: PAT_MRT3847_83178C.1
gttataacttttccaatatatgttttcagtttaagtttggttacgtttgattgaataaacttaaaaaatattattaaggagaagggaagtaagtttttcttcttaagttaaaagtaacttatacatgagataatttatagaaattcttatacaataacttatccaaaaatttgtttttaatttatacataagttaaatttattttgtggtaaaaatttagtttatttattttcgtatacaagtgtttatggaaaatttatccaaataaaaccaaaattgttttcttcatttagaaaaacttagaatttcagctctaatttttctcacgtgaagtgaataataactaacatggtggattgattcatctcaactcgaagcagacatttctactttaatcatatggctatttgatggggctggaaatctagaacaaattaagtgtgaagggcagaatatttttaaagatttttgaaataaatg

SEQ ID NO: 124221 - DNA, 672 bp, Glycine max
  Clone ID: PAT_MRT3847_83179C.1
ctttttttttttttttttttttttttttttttttttttttttttttttttgaataaagaggcatatgataaatgatggataaatatgagcaaatacaatttgataatatgatggataaattcatcattgcaagggaacctacactttttttgggggtcgcatttctcgtaaactataatgatatgggggcaagaaaacatacatgattcgtagaaacaaatatagtggtctacattaactctgcgtcattaagaagccgcttcattactgcaggttcgacatatctaactactacacaatatcagtcacgagtttatcacaatttccctgaggagctgcttaaatggtcactactcatgaaacttgataccacaaaatacctgggccgcatctacttaatgatggttcctcctccacaaaactccaatcttcttcaacatgtttgtatttttcttcttaggtgactcgtcatctgtgtctaataaataaggtgaattcatcttgccagtaacagaattgaagctgttttcacgtgagcagtttcggtccacaaatttccccgttgtttccagcagaaatcatagaggcggctgcttcggctgcctttctccactgatctgactgaactttcagtctcctttatttcggcttccaactctgatttgcagcctg

SEQ ID NO: 124222 - DNA, 673 bp, Glycine max
  Clone ID: PAT_MRT3847_8317C.1
ctagatcgcaagcaaagaacaattttacgttacgagaaagcagcggtgacatgtctggcgccaaggacaagaggaagcaaggcgaagacgacgccgtttcggggagccagcagcagaagaaggcgcgtgaggatgaggctgtgacggatgaggaggtggaggagttctgcgccattctccgccgaataaacacggcggtgaagtacttcaagagccacggcgaggacgtggcagcgttggagaaagatatcatgcaggatgtgaaggaggcaaccagaatgagtaatcagaatgagaaggaagaagacgacttgagtttggatctaaatgtcactccccaaacccccacctgagactccgactcagacctcaatattattaccatctttctctcccttccttcgttttctatttaacatagggattttcttatatgtcccctatgaatataaggatgagttcaataaaatgcaccgacaaatcatccttgagtttcatttcaattacaattgcactcttcttatttttaattgaaagcataacttcctctagcagagatcatggtaatttagtttcaatcacttccctatttggaagataagtgtaataataattgattgttattatggtttttgcatataaaataataaaaaaactcgagggtgggcccgtc

SEQ ID NO: 124223 - DNA, 572 bp, Glycine max
  Clone ID: PAT_MRT3847_83180C.1
tacggctgcgagaagacgacagaaggggaagacatgtatatgtcatgttcttagttccaatctaactgctcataacaaaaggaaccatatagacaccttcgtacttgtcatggcccttaagatcaacactttccttctagttcttctcttgatcctcattcccttatcttcaggcttggctgaaggcttcggggaaaacatgcatccaactcatggcttactttataaggatggtatcaagatgaactcgaggaagcttttggttcatgattttgtgttggattatgatgaggcaggacccaacccaaggcacacaaagaaacctggcaagggcccttgaatacccttacaccaaataatgaaataaattaatctatatactatcatctctcttcctactcaatgttttggtcgcgtatgaggagatatgtaaacgggtttcttcttcatcggagccactacttgtgtgtgttatgaggcaataaattagtatgatattttattatgtacacctggtgcgtatgtatggactatggaccattaagctgagaatattataacaaagttttatc

SEQ ID NO: 124224 - DNA, 682 bp, Glycine max
  unsure (1)..(682): unsure at all n locations
  Clone ID: PAT_MRT3847_83181C.1
gaaatggtagcaatgaagcagtgactagaggtggtgaggaaggtgatttggactgtgattcaatgtcataattgtccaatatgtttgaaggatctgaagctcttggttccgttctacaacctcgggcttggcctttcttccccaaccatttcttaacctttcactctctcttatgcatatcaagcatgccttcatcctggacttgtgattcaacatgcaggaaacttgaataacacgccagtaaacaaattgacatgattgctttgtttttatgcaaatgtcttcaattattgactgctgatgctattatgatttggttcatatttgttttttatgtagcatatacagtcaagggttgaaaccttaggtgtcatgagccaggatgcaacggcgggctgtgttccatcaaacttgctcattcttcatataacacttatagagattttgggagtcaagacggaaaggcaatttggtggtgtgcgatgtattttgttatttggtgcctaactgcctattttagattcttcattgtatatgcagagaaattcctgataatggcatgcttgatgaacatttttgtttgctttgctttttataattttgtggccncgtgtttattaccccaaaaaaaaaaaaaaaaaaanngnnnnnagcggccgctctagaggatcctagcttacgt

SEQ ID NO: 124225 - DNA, 279 bp, Glycine max
  Clone ID: PAT_MRT3847_83182C.1
gtgcacaccacactatcgaagatgaagtttgttcgatgcaagctaaatgcctatggcattggttgtctttcgggaccacacatcataactgttattgtaagttcacatgtactgtggaattagtgtgaaagcagcgtctacatgtctaagtacacggttctgacttgcacagctactattattgaggtattcagtaacacctggcagtgtcatggatgcatttttggctaattaattacccaaatcctgcaccaggtatagtatcctaattgccatggt

SEQ ID NO: 124226 - DNA, 2155 bp, Glycine max
  Clone ID: PAT_MRT3847_83183C.1
ccacgcgtccggtcgaattcccgggtcgacagaaacgtacgggaagggcgaagttgaaaaaccaaaacccttggcgagtgaagccctagactcactagactacacacttcgcaatggcggttgttgctcaaacccctgacatcgccggcgagcggcagtccggccaagacgttcgcacccaaaacgttgtggcatgccaagccgttgccaacatcgtcaaaagctctttaggccccgttggcctcgacaagatgctcgtcgacgacattggcgacgtcaccatcaccaacgacggcgccacgattctcaagatgctggaagtggagcatcctgctgccaaggttttggttgaactcgccgagcttcaggatcgagaagtcggagacggcactacttctgtcgtcattgtagctgctgagcttctcaaaagggcaaatgaccttgtcaggaacaagattcatcctacctcgattatcagtggatatagacttgctatgcgagaggcttgtaaatatgtagaagaaaaactagctgtcaaggttgaaaagctgggaaaggattcactaattaactgtgccaagaccagtatgtcctcaaagttgatagctggtgatagtgacttctttgccattttggttgtagatgcagtgcaagctgtaaagatgaccaatgctcgaggtgaagttaaatacccaatcaagggaatcaatatcttgaaagctcatggaaaaagtgctagagacagctttctgatgaatggttatgctctaaatactggccgtgctgctcaaggaatgcctcttagggttgcccctgcaagaattgcctgtcttgatttcaatcttcagaagacaaaaatgcagttgggtgttcaagttttagttactgatcctagggagctagagaaaattcgtcaaagagaggctgatatgactaaggaacgcattgaaaaactgctgaaggctggagctaatgttattctgacaactaaaggaattgatgacatggctcttaagtactttgttgaggctggggcaattgctgtaagacgtgtgcggaaagaggacatgcgccatgttgccaaggctactggtgcaacattggtctcaacatttgctgatatggaaggggaggaaacatttgaaccatcttttcttggatatgctgatgaggttgttgaggagcgaatttctgatgatgctgtagttatgatcaaagggaccaaaactacaagcgcagtcactttgattctaagaggtgcaaatgaccatatgcttgatgagatggacagagctctgcatgatgcattgtcaattgtcaagagaactcttgaatcaaatacggtggtagctggtggaggtgctgttgaggcagcattatcagtttatttagagtaccttgctacaactttaggatctcgggagcagttggctatagcagaatttgctgagtctctgttaattattccaaaggtgctttctgttaatgctgctaaggatgccactgagctggtcgcaaaattacgggcctaccaccattcagcacaaactaaagccgataagaaacatttatcaagtatgggtttggacctttctgaagggaaaatcagaaacaacttggaggctggagtcattgagcctgcaatgagcaaagtaaaaattattcagtttgcaactgaagctgccattactatccttcgaattgatgacatgatcaagcttatcaaggatgaaagtcaaaatgaggattaaagtataactgaatctaggaggcatctactccccagtgcttacaaaagggagagttttgcaggttgtgctagtgtgcatttgaagagggtatctgcatttaatcttcaatgcccttgttcttgaaggaaaactgctctaattatttttctgaaagtagctttattatatttacatctttgcattttatattccaacaatttttaggcaaacatttttggtcatgcattggctggttgcatgtttgtacatttctttgaggcagtgtttgatttgtgaaattttgatgtttcgttggtagtaagtagtttttaatactataagaactaaattatgagggttcagaactaaaaaaaaaaaaaaaaaaaaaaaaaaaaaaaaaaaaaaaaaaaaaaaaaaaaaaaaaa

SEQ ID NO: 124227 - DNA, 2455 bp, Glycine max
  Clone ID: PAT_MRT3847_83184C.1
tgagcatatctgccaagccagttattaggggtcaaggcacaatcctcgtcccagagtcccctccccactcttctcctttttttaacaataccccaaaaaaataaacaataaaaaaaaatttcggttttaaatttgggggaaataaatatagggaaaaatattatagagagagtgtatagaatatgtttgttgagaatatgacgctctgcacaatcgcctcctatcgaggatcatcctcttcttctttttccgatgcttatcccaataggggtttgttggaggggagataaaatggggattgttatgatgatggtgttttttaggttgttttgttgtaattgtgtttttgggatggcaatattgtacgaaccagcaataagaactcatctgaccagatgagctagcatgggcgattcttgtcttacttctttgtcatatggagaatcatcacccttccacgctcttgtcaatggactcaagtgcatcttctcacgaggaactggatttggagatgaatcgccaaatcatactcacccgtccgccggatattaatcttcccctctccgccgagcgcagcccaccgccacagccgtggaattctgagccctgtgatattctagatgttggtcttggtactcaaggctatgagactgagagttttctcaatctgcccaaagctggtaggaagtgcgcgaagcgtgttgatagcatatggggtgcttggtttttcttcagtttttactttaagcctgctttgaatgacaagtccaaggccaagattgtcagggacagcaacggtgtctcagggttcgataagtctgatctgaagctggatgttttcatggttcagcacgacatggaaaacatgtacatgtgggttttcaaggagaggccggagaacgcgctgggtaagatgcagctgaggagttacatgaatgggcattctcgccaaggggcgcgcccgttttcgtttagtgctgacaagggttttgctcggtcccacagggatgcaacgaaagcattataaagcactatcaaaccgtcaatgggtgcatggtgttgagggagtttcctcgcccgatctgatgaccctcgttaaggatggtcgaaaaaattggatagaactcactggtggagaattgaattttacaatttcaactgacgcaagtgatttcagttagtggagaaattttcccaacacggactttgagcatgagaggcaacctcccccaatcaagaatggtcctaatgcacacccgaagaagctgcttaatggatctggacttaacgcgaactcgtcttaacggatctggccttaattggatctggacttcaactatctaaccacagtaatggtgatgggttggacctctctcctgtcagcagcaaaaaaaggaaggactttttccctcatgggaatgaagaagaatgttacttggctgttaatcctccatccgatcgtataccagatatagaaatgcacccaactgagccacactggttgaatgacttcagcggggtgataaaaagtgtttatggacctgttacagctgcaaaaactatttatgaggatgaacaaggttacttgattattatcagtctgccctttgtagatcttccaagtgtgaaagtttcatggaggaacactctgactcacggtatcataaaggtttcttgtatgagcacatctcgaaagcctctcatcaagagacatgataggacattcaagcttacagatccatcgtcagagcactgccctcctggagagttcgtccgagaaatccctctttcaactcgaattcctgaagatgccaacatagaagcatactacgatgggccaggatctgtgctgagatcctgttaccaaaacatcggtgtgaactgtatatatggacgtctgtgttcggcaaagactactatgaggagaacaagcttattgattattatcagtctgccctttgtagatcttccaagtgtaaagtttcatggaggaacactctgactcacggtatcaaaaggttcttgtatgagcaacaagcctctcatcaagagacatgaggacattcacgatatcagtgcttgagatcctggtgccaaaacatcgcgtgggaccagaagagcatgaagtccgggtttgcctccgccctcatctgggagggaatgatctcaagttaacttgagataggcacttaaaaaaatttgttagggattccggtatggttcgtatgtcattgtttttctaactttgtaccatacagtgttatttgcaatagaattgtgtctcttatgtttgtctctagcaattttagctcactgactgccctggttctttttgttccggtgcatctgtattatgcttttgattgtaagcagtattgaacagctagttctcataatttataagaaattaccaaatcatacctttggaataatttgttatttgatttcgcccttt

SEQ ID NO: 124228 - DNA, 653 bp, Glycine max
  unsure (1)..(653): unsure at all n locations
  Clone ID: PAT_MRT3847_83185C.1
cccgcgtccgncattcctcccccacactcttctcctctatttaacaacgcccgaaaaaaaattagggttttcaatttggggaaataaaaatagggggaaatattctggagagagtgtgtagaaaatatggttgtcgatgatatgacgctgtgcatcatcgtcggctatggaggttcctcttcttctcgtttctccgatgcttatcccaaaaggtaataaataatccttgaagatctttgtctctcttctttaaaaaaaaaactgttttttttcctctctctctctctctctctctctctctcttatggatttgatggttatggttcaatgcttttcccctgattttggagggtttttggagttacctcgaatagggttaaacataattcacctctagcgttttcgaaatctcttcctctcttacagagattgaagagatatatcactgtgtcactctctctgttatataatatagatagatagttaattagttagttctgttcttatttatttattaatttataaagaaaattagaagaactgttattattattattttaaataggttggatttgttgatttttttctcctgttttcaactcaatttgataaatctaggggtttgatggaggggagatatagtggggattgta

SEQ ID NO: 124229 - DNA, 466 bp, Glycine max
  Clone ID: PAT_MRT3847_83186C.1
ccaagggatgatttggtaatttcttataaattatgagaactagctgttcaatactgcttacaatcaaaagcataatacagatgcaccggaacaaaaagaaccagggcagtcagggagctaaaattgctagagacaaacataagagacacaattctattgcaaataacactgtatggtacaaagttagaaaaacaatgacatacgaaccataccggaatccctaacaaatttttttaagtgcctatctcaagttaatttgagatcattccctcccagatgagggcggaggcaaacccggacttcatgcttttttggtcccacgcgatgttttggcaccaggatctcaagcactgatcctggcccatcgtagtatgcttctatgttggcatcttcaggaattcaagttgaaagaggggatttctcggacgaactctccagggggggcagtgctctgacgaatggatct

SEQ ID NO: 124230 - DNA, 1850 bp, Glycine max
  Clone ID: PAT_MRT3847_83187C.1
gacgtgcatgacgcgaccccacgtgggaattcggccgtacgctccttatacactcttctcctctatctaacaacacccaacaaaaataaaaaataaaaaaaattagggttttcaatttggggaaataaaaatagggggaaacattctagagagagtgtgtagaaaatatggttgtcgatgatatgacgctgtgcatcatcgtcggctatggaggttcctcttcttctcgtttctccgatgcttatcccaaaaggtaataaataatccttgaagatctctccctctctctattttcagaaaactgtttttttcttctttcttttctctcttatggatttgatggttttggttcagtgcttttcccctgattttggagggtttttggagttacctggaatagggttaaatataattcccctctagcgttttcgaaacctcttcctctcatacagagattgaagagatatatcactgtgtcactgtctctctgttatataatatagatagatagatagttaattagttagctctgttcttatttatttattaatttacaaagaaaattagaagaactgttattattattattattttaaataggatggatttgttgattttttctctcctgttttcaactcaatttgataaacctaggggtttgatggaggggagatatagtggggattgatatagacatggtgctataattgctgactccgtttgcaatgacaaggacacaagggattgtgtagataaaaaaactggaattaagggacgatgcgttgtggcagcaattaccaattacaccaaccagctcctcgagtatggcagtgacacgcgatttcagttcgtggagaaaccttcctaacaccgactttgagcttgaaaggccgcctcacccaatcaagtacactcctaattcttatcctaaaaaactgcttaatggaactgtgctgaatctgtctaaccatagcaatggtgatgccattgatctatctcctgtaaatggcaagaagaggaaggagttatttcttaatgatgaaagactattacttgtctgttaatgctccttctgatcgggttccagatatagacatgcaaccaagtgagcatccctggttgaatgactttagtggggtgatgaaaagtgttcatggacctgttacagctgcaaaaactatttatgaggatgaacaaggttacttgattattatcagtctgccctttgtagatcttccaagtgtgaaagtttcatggaggaacactctgactcacggtatcataaaggtttcttgtatgagcacatctcgaaagcctctcatcaagagacatgataggacattcaagcttacagatccatcgtcagagcactgccctcctggagagttcgtccgagaaatccctctttcaacccgaattcctgaagacgccaacatagaagcatactacgatgggccaggatctgtgcttgagatcctggtgccaaaacatcgcgtgggacctgaagagcatgaagtccgtgtttgcctccgccctcatctgggagggaatgatcttaagttaacttgagataataggcacttaaaaaaattgttaggcattccagtatggttcgtatgtcattgtttttctaaccttgtaccatacactgttatttgcaatagaattgtgtgtcttatgtttgtctctagcaattttagctcactgactgccctggttctttttgttccggtgcatctgtatgcttctgattgtaagcagtattgaacagctaattctcatgatttataagaatttaccaaatcatacctttgaaataataaaaaaaaaaaaaaaaaaaaaagggcggc

SEQ ID NO: 124231 - DNA, 378 bp, Glycine max
  Clone ID: PAT_MRT3847_83188C.1
gcacgaggctgagttgatgataagattatgtgatacagaactttgaaaaaaaaaaaaaagcaaatcaaggatgctcggcattttgattttgtagcgctttctgttggaattactgattgattgtggaatttagattattttgtgccatgaagcctcttgttggcctttaggaggattcatgttcatgtacaaataatgaattagaattgtttccacgaagttgctgaggacacaaagaaaaggtgctttgaagtggtgcttttacttggtaattcatatatttagtgtcttagcctcttaggaatcgtttagttccaactgtcctaaaacacaatctatattctgttgaaaattccaaattattgatattttctgaaa

SEQ ID NO: 124232 - DNA, 412 bp, Glycine max
  Clone ID: PAT_MRT3847_83189C.1
cgccaagtttctaggctttgctgtggaagcagcacaaccatctcgagccctttaaacaccatctcctgaacgagtgctgttgaactcaaccaaagggactacagttaactggtcgaacaactttaagatcacgactgctataaacatgttaacgcaacaacgcttctcttttattgctagttgaaccgcggaagtccactctacaacgacatcatttatatttcgtgcatagattaacactcgtacttctctaatatctccatacttatgaacaaacatggatatgggcgtggaggaatgtaatgaaaccttatatgatgaatgggttaacaagggcgacgcaccggcattgccagagactcttaaaaactacaacaagctgatgtctcttggctcaagattgattcttgtc

SEQ ID NO: 124233 - DNA, 390 bp, Glycine max
  unsure (1)..(390): unsure at all n locations
  Clone ID: PAT_MRT3847_8318C.1
gaaagtgtcatttccccaccaatttgtttcctctgtttccattctttcttcttcattggggtgtcttattcaattccactttttccttttgtttttggttgagttttagagctgctgagggcttccattttcattctattttttgcgattttggtttgggttctttttctttaaatggtctgattttttgcggatttatttttggaacaggttacagtaacaacgacggctttggcaaagaatttgtgggtgaagttaagaaaaagatagaggttcttatattttgattntattaaaactgtgtatatgctttttttggctgattttttcgggcttatttggatgcctcgctgctattttttccttgaaaagctgttgcagattattttg

SEQ ID NO: 124234 - DNA, 389 bp, Glycine max
  unsure (1)..(389): unsure at all n locations
  Clone ID: PAT_MRT3847_83190C.1
gggggcccaaggaaaccccgcccgccccaacccnaanncagagcgggccaagggggggaacaaccccaaggggggccaaaaggggggggggggagacaacctgttttttttttcccaaaaagctcattttacccttctatattcgggggaaacaggggtggaaacccccccctggggggggaaccaactttttaatcggggaccctaaggggggccccgtccccgggctcgggaaccggggggttggaaggagcgatatctccatcttcgggggcaagggtaggtgggaaaggggggagggatatagcggggttttgggggcgcgggagtttgttggaaaaaaaagacccagggggcccggggggcgcttgcacttgccgcggggaggg

SEQ ID NO: 124235 - DNA, 251 bp, Glycine max
  Clone ID: PAT_MRT3847_83191C.1
cgcactttcattctctcttaaaaatctaaatcccttttaggtcttcatcttagcctctgatgcaggtatgggttcgaaacgcatcctgaaggtgctcaaggatttgcagaaggatcctcctacgtcatgcagcgcaggtcatgtggctgaagacatgtttcactggcaagccacgatcatgggacctgctgatagcgcatatgcatgtgtgtattcttagtgtcaattcattttcctcctgactatgcctt

SEQ ID NO: 124236 - DNA, 276 bp, Glycine max
  Clone ID: PAT_MRT3847_83192C.1
tacaacgaggtcatgttcaacagattttttcgcaattcgagtggcagcgacttggacggggtaaggcaggctgagattgccacagaaacgggacatgaaatcggcactggttatgtggtccaagttggtctccatggtcttctggatgagcttgaaacagcgtccaatttccttcttcgacacttttgacaccgcacaaacttccttgaacgttctgggaaccccctcttgacgacatgcgatgtaaaggcaagcggccgcctgtgcctcgttgta

SEQ ID NO: 124237 - DNA, 242 bp, Glycine max
  Clone ID: PAT_MRT3847_83193C.1
atggatctgcttgccatcgcctccattgccgctgccatagagggttgttccggcgcaatccgccttgcatgtgctaacatcattagtcaagtctacgatcccgagagacagatattggaatcggcgataaaatggccggttaatgtgttgaaggtggcgaaggaagcagtcgtagagcgcgtctgtatcgacttcatcgattacgtcgattataccacgtcctaattggtcagctgataaga

SEQ ID NO: 124238 - DNA, 484 bp, Glycine max
  Clone ID: PAT_MRT3847_83194C.1
gttgttgaagacgttaaacttatcattcatatatgtttgtgattattaaatgagtgtaaaaattctttacaccgttaaacaataaaaaaaataaaattatgaaggttgggagtgttgcaaattatggtggatgcaccaaagtttcagagcacagccttcgtaatacaatgtttgtcaacttgtttaattttcccctatcatttgctctggaattttggcttgtctttgagtgcatcaaggtcagcatagtactgtgtgatccaccttttgatgatcttgacctctttctttcgttgttcgaccaaccatcctggatcgctttgatttgcccgcagaagatccaggcaatgagaaccattaactgtatgaacggcaacgatgctgtctgatatgttatccagaaccccgccaatactatatgggtcccttagcccattggagaaaataatgttgctacccaatcttcgaaggaccaatttaatat

SEQ ID NO: 124239 - DNA, 109 bp, Glycine max
  unsure (1)..(109): unsure at all n locations
  Clone ID: PAT_MRT3847_83195C.1
ggtttgtcagaatgttgtatggaaaatgttgattcaccaggaacaataataggtactctntctttggtcaatgatgaatnaacattttccatacaacattatgacaaac

SEQ ID NO: 124240 - DNA, 496 bp, Glycine max
  Clone ID: PAT_MRT3847_83196C.1
ggctcgagtgaggaacgaaacgctgcctttgatctttttcctcttcctatgttcccacctccactccgtcctctcatggaagaaagaggagttccgaacctgccaccaagccccattctgcaagcgcgcccaatcccgcgccccgggctcctcctccctcatcgccaccgagatcaccatctccgacggcgacctcaccgccaaactcaccccataacacgattctcaatccgaagaaaccaaacccttgatcctcaccctctccgtccaccaactcggcatcctccgcctcaagatcgacgaggacccctccctctcccctcccaagaaacgcttcgaggtccccgacgtcgtcgtttcggagttcccctccaccaagctctggctcccccgagtttcctccgaaaaaaacggcgcctactcctccgtctacctcttcgacggccactccgccgtcctccgccacgaccccttcgagctcttcgtccgcgacgac

SEQ ID NO: 124241 - DNA, 456 bp, Glycine max
  Clone ID: PAT_MRT3847_83197C.1
ctcgagccgaatcggctcgagtacggctgcgagaagacgacagaagggccatcaccaacaagttttattgggggttaacttttaactatgtaattaataattagttatatgttgataatacacttttttttagtgtggcctaagtgtgccaatcctatcgttagattctgtttaggagagcaaatgcgtatcatgaacaataaaacatcaaaccaataaaggttaatttaattgacaaagaatagatttatatctcacaagaataaggacatgaatctgattctattatgaatgtgagaattttattaatagataatctataaatatttttataaacgctctttgagtcttgaaatttggtctaatactcgtgaattatccagatctaactcatttatttttttataaaaaaaatcataaatgatgaaactaaattacatcatcttttaatgtatt

SEQ ID NO: 124242 - DNA, 402 bp, Glycine max
  Clone ID: PAT_MRT3847_83198C.1
aaagggggcccgaaaacccctataagactggaaaattccaaggatttaatacatcggggtttttatttttcacgatctacagggggggcaaataaaaaaaacggttttagaaagcatatcccgattaagggctttgggtttttaaggattcaggaaaacaaaattttgaagcaacttttttctttagggaattcatgctctcctttccagggggccaaaaatttgaaggatcatattttttgccatttttttttgcaacaagaggatcaggatgcacttgacaaacaaattggcctttaactttgggacgctgctctgctagtttattttggctctcggatcgaacctttttattaaagaattttttttttcttttaagccaaatttgtttaaagctggttt

SEQ ID NO: 124243 - DNA, 1494 bp, Glycine max
  Clone ID: PAT_MRT3847_83199C.1
atatgaaatatgtttgtctccaagaataataaaaatttagaaagaaaaacagaatttgatggtgaaatgtattgtaggaattgcatttggtggaaagaatgtaacccgtgtgacataagtggccgcacatttagagaactagccacttctatataagaataacattagcaggcaaaggccttatctggcaccaaacatgagttctctgaatcttggaacatggcctcgtcccacctctatgttgaacacaccttcacatctccttcccccttttcacactctcactctcacaacaacgcttcccaaactcgcaagtggaaccccaaaactaatatcttcttttcccctcgtctctgctgtgcccactaaggaacacacagtcacaacccaggaaattcaactccaagacacgccgctcaacttcgatttcaagggctacatgatcgccaaggcccacacggtaaaccaagccttggacgccgccattgcgttgagggacccacacaagatccaccaagccatgcgctactccctcctcgccggcggcaagagggtccgccccgtgctctgcatcgccgcatgcgagctcgtcggtggcacagaggccaccgccatccccgccgcctgcgccgtcgagatgatccacaccatgtcgctcatccacgacgacctgccatgtatggacaacgacgacctccgccgcggaaagccgaccaaccacaaggtctacggcgaggacgtggcggtcctcgccggcgacgcgctcctcgccttcgcgttcgagcacgtggcagcgtccacggagggagtgtcgccgtcacgcgtggttcgagcgattggggaattagcgaagtcgatcggtacggaagggcttgtggcgggacaagtggtggatatagattcggagggggtggcgaatgtggggctggagacgctggaattcattcacgtgcacaaaacggcggcgttgctggaagctgcggttgtgttgggggcaatagtgggaggtgggagcgacgaggaggttgagaaattaaggaagttcgctaggtgcattgggttgttgtttcaggttgtggacgacattctggatgttacgaagtcgtcggaggaattggggaagacggcggggaaggatttggtggctgataaggttacttatcccaagctattggggatagataagtcaaaggaatttgctcaagaattgttaaaggatgccaaggaacaattgtctggcttcgatcctccaaaggcggctcccttgtttgcattaaccaattacattgcttataggcaaaattaaaagtgaaaacattggataccctgttttctcaccggggaaccactcaaataaatttctctgcttccatttccagtcctcaatgctgtactgttctccagcgattatttgtaataaaataaacctctttttttcttatattatatccttctacctatattaagttgagtaaaagcatataagtttattga

SEQ ID NO: 124244 - DNA, 815 bp, Glycine max
  unsure (1)..(815): unsure at all n locations
  Clone ID: PAT_MRT3847_8319C.1
agagagagtccacttagatgagaagtatccacagagaggttctgatggaccatcatatttcctcttgccattcccttcagaagttttgcctgctgttgagactgtacattatgccgttgattaggatgttgcctaccgggctgttgatactgctgctgcggccgctgtggcggatggcgtgggtgttgctttgctgcttgattagtcaacccactggcagtggaattcctgctgaacccaggttgtgcatggtgaagtttctgctgttggagctgggatgacaatggagttaaaggggatgatggcgttataggtgaaagaggcacttgctgaggagaattttgtggttgaacctgagaactgttctgcagtggtgatgatgagatgggaagttgagacttagcctggacatgtggcattaatgcatttgatgcagcaagctgctgctggtgctgcagatatcgttgctgcagttgtctttcctttgccaaccgaacagcataggcttgttgctgtgaattagtggcatgactaggaccttgaagatgaggactgctgagatgggactgctgctgggggagttggtgtggctgttgggcatgtcctgagtaaggctgaacaggtggtgttgtctgattgctaaaggcagaactcggcccacacagagcaggaataccttgactgttcccttgggtgacctgcatctgaagttctggaaccatcatttgtctctgatgttctgggttatggcccagcctcatcatatgtagattctcatgaggtcttaacattgangtgccttgtacagtaccaac

SEQ ID NO: 124245 - DNA, 370 bp, Glycine max
  Clone ID: PAT_MRT3847_831C.1
taattatatcaatacctaactcttgcggtaatgataaaaaacgtgatcatcctacctgacatagtggggaagaactcatgcatgtgtctctattgtcctctttcgtatcaaaagactatcatgaacgtacttgtcttccttgcccatcatacttgggaaccctactgattggaaaaaccattaaaccttaaacatagtttaccgcatgatacttatagacacagacggcttactcccaggaggacctctggaccatttactcccttatccgagatgacagcaccattgcgagctaacagcttaacaccaatattgcccaccatgctgatgtttccctcgaggattgcaccggctccaaacaatacattgc

SEQ ID NO: 124246 - DNA, 711 bp, Glycine max
  Clone ID: PAT_MRT3847_83200C.1
gattcttccgtccaggaactctatcttcttcttcttcccaggaactctatattgcctacacaaactacccttctcttatttcttttttcctttcaatctcattattattctttttgattcatttagctgatatggagttaaagaaaatgaaagttacaggtggctaaggcttggcaagttctatggcctactctgatacttgggcaatgtgtgagggaaaatacaactctggaagcttaaaatataaattgcagaaagcaagtaagagggattattgtaggaccataacttctgttatggaatttgaatcagactggataaagcacagaaagtcatcttcttataccgctcatgttattcgttccgcgacatcttttatgccttggtcttgtagaatcccaattggtgatgggtatcatgaatttctttagttagttgtactcattactcagtaagacattttcacattgtttggttgattggtcgccactcgccaacaaaatttctctacatcttcgtcttacatcatatttgtgatcactaatttgaaaaatgcctagttttgtggctgaaaagaagatatttgtagagccaaatatgtgttttaccaatttggccaaccatgatagaccaactcttacaaaaaacaatcattatgtgagggctgagggtcttgatgaagatgatgatgggactaggcccattctaact

SEQ ID NO: 124247 - DNA, 554 bp, Glycine max
  Clone ID: PAT_MRT3847_83201C.1
aaaaaaaggaaggccccaaaaaaagggcctaattttattatccaaaaccttattgggcaataaaaggagggaatggggggtaccaaattcaggatcaacccctgggcaaactaaaaaaaaatatcgggggaaggggccaaaactttttttacatacaaaaacttttaaacaaacaaggcccagggacttacttcaatcccggggaaaaaaaaaaaccccccaaaaaaatcttttttttctcaagccgcaaaacggtttccccctttcccaaaacccaccctttttagtttacaaaaaaaaagggcccccccacccatgaggcaaaaaattatgcccgaccccccccctcgttttaagggggctcattgcccccagggcaccctcaggccccattttattatccttaaaaccaacctttaggtggggggcaattttctcccccttaaaccgcaatatattatgccaaccccagcaccccccttaaccgaaggggaagccctggactttccccctggccctttttggaaaacaacccccccccttttacccaaaaa

SEQ ID NO: 124248 - DNA, 388 bp, Glycine max
  Clone ID: PAT_MRT3847_83202C.1
gggaaaggcccaggggtttttttatttttgggggtttccccccccccctttctaaaatttccccccctggggaaccacttttttttgaccccctttttcccccacccctaaaaattccccgtcgggccacccccaaatcaaaatcccccggggtttacccggggatttttttacccccaatgggggaaattaaaaagccctttttttacccgggccaccaaattcctaaaccccattttgcccaaaaaaaaccccccctttcccctttcgggtttcggccggggaacccctgaaatttcccgacccccccggggtttgcccaatttgggggcaaaaaccttgctttgcaaatccccccaagccttttctcccccccctttaccccgtt

SEQ ID NO: 124249 - DNA, 280 bp, Glycine max
  Clone ID: PAT_MRT3847_83203C.1
attagggccacggcggcagaaatttgtgttttcccaaaggggcgactgaattcattttcccatcgcagattcgagccagctgtcatcagacataaccaattaacccacactcttcaatgctcctctagaatactctgcacttgggttttaacctccatgaaaggaggacacgagtccttaaggaagaggacccggaattaggctcgtctcaagggaacttcacaagctccaaccaggttttagtccgtgcattttcttttttttttaaaaaatgcccact

SEQ ID NO: 124250 - DNA, 748 bp, Glycine max
  unsure (1)..(748): unsure at all n locations
  Clone ID: PAT_MRT3847_83204C.1
gaattcgagctcggtacccggggatcctctagagtcgacctgcagacatggcttgagcggcatggtccgtttgatgctgttgtagatggtgccaatgtaggccttgccaatgggcataatttcagcttttcacaggtgagcgtgaaattattgaatttattagcacattaggaaagtaaccacttaatggttctttgcccttggttgtagcttaacactgttgttgaacaattacgtcaaataagcccttcaaagagattgcctcttataattttgcatataagtcgggtacatggtggtcctgctcagaatccaaaaaacaagagacttatagaaaattggaaaaaaaatggcgttctttatgctacacctcaaggttcaaatgatgactggtaatgccgtacttccttaatatttaagttagattgagttgcctaatttcctttttttcttattttacatttccaaagaacctaatgatgttgattgatccatgtagctgactccatctagtgggataggggtttgctgttgttaatttgttgtaccacacatttagaacattgatatgaatataaattctctatagtcctacaattcagttgtactaaaatggtgttttgtttatcacaggtattggttatatgctgctgttagttgtaaatgcttactgctaacaatgacgagatgagggaccacttgtttcaactattggggttctatttntttcccgagatggaaggaaaaa

SEQ ID NO: 124251 - DNA, 365 bp, Glycine max
  Clone ID: PAT_MRT3847_83205C.1
ttcagcctttcttatgaatttgggatgttccttctgctgaaggacaaagacgatatccccagtaattgtgtccggctgcaaaataccaacaactcatgggtcattataaatttctgcaatccatgaagcacaatgcaaattacaatactgattctcatatcaacataccgcttcatcgagttcgccagggaatgttatcttctgccagtccatgattcagcagatgcagcatgcttgcaatgaatgcaagggtactggagaaaccatcaacgacagagatcgctgcccacagtgcaagggagaaaaggttgtgcaggagaaaaaagtccttgaagttattgtggaaaagggaatgcagaacgggc

SEQ ID NO: 124252 - DNA, 197 bp, Glycine max
  Clone ID: PAT_MRT3847_83206C.1
attcccactcctagccactcctccaaactgctgctacaagactacatacatctccggattcaatactactactcaaatttacgtctacagaaatactacaatacatgccaggcaatatccctacctccttgttccctatcaactctcactcactacaattacctcatcatctttacttatcacctacattcatcttt

SEQ ID NO: 124253 - DNA, 333 bp, Glycine max
  Clone ID: PAT_MRT3847_83207C.1
ccaagacatacttaccatggtaataacactcatctttggcttcaatattcctatcattggggcagtcgtgtatcacattgaatgaaaccatatccttgacctaattctcaattccatcaaaattgtttatcgacattatgattgtactactgactacaataacgaaacactacttggagatgcgcttaaggacgctcttgatagtatccttctgaagagagagtatctcttcattaccaccaagcttttctattcttttcaaagacaatttcttgaagcttgtaaaaacagtctcaaaaaacattttatttaacgtttctaaatttatatctt

SEQ ID NO: 124254 - DNA, 803 bp, Glycine max
  Clone ID: PAT_MRT3847_83208C.1
gctcatatatacataacaacatacacacactattctcataacctataactagtaatattaaggatgtcatcaaagccttctaacattgttgccacgcgtccgcatcagaggaaagagaaggacacaatgatgagccttgatcatagtaagctaaaaagagaattgtccaatctctccaatgaagcctaccatgttgaatcttcttcaattccctttgtgtgggaatctcaaccaggaactccaaaggttagattcaaagaaaattctctccctcctctcacaccaccaccatcttatttccaaaatgctaccaaaaaagccactaccaaggccaagaataagaactcacctaaatctagcttcttgcaaactctattccccaaacgtgctactagaaaaggtggtgttcctccacaaactggatctcaaaatatttggtcttattcttctaattctccctcttcttcttcctcttcttcgtcatcatctttgtcattctcttcgccacggcctacgtcgtattcagtgccatcttctccgatgatacactcgcggaagggtgaagaagatgaagatctgtatgaggtgagtagttcgggtttgtgctttggtaatgccaggtcaagagggtgttattcatccatgttcaagaaagtactgcttggagattttctgtgatgttgcataggctcatagctgccttttctctatggttgttgttaataatgtgtggctagttggatagattgtatgtgccaaactgattcttaaagtaatgaagtgcatcatatctttaacttcct

SEQ ID NO: 124255 - DNA, 427 bp, Glycine max
  Clone ID: PAT_MRT3847_83209C.1
acgcctacgaatgctggtaatgctgcttgtgcgatacttctatttccagcggatccttagaaaacgagcataagaggattctgaggactctctcgttgcaacaggcgatgacgcgacaaaatgactattgatctgcgccgtctcttctatggatacagcggcgtcggtcgaacacaacgctgacgctgccgctaccgtctggatctccgactgccctgagtatgagagatcagtgaaccacgccctttctcaccaaaacctataaactcgaggactagcaagccatcaacaactttatttcctggaacgacgactggtcatagattatagactggtgccctaccacttgcatcagagaccagctttctgaagctttcactcacaatgatgattctagcttgcatggccaactggacacttacggatt

SEQ ID NO: 124256 - DNA, 196 bp, Glycine max
  Clone ID: PAT_MRT3847_8320C.1
gttggaaagccccaaaatcaaactgggttttaaattattagggcgtaattggggacatactttgtggaaaaatctcttgaaaacagggaacgctaaaaaaaattggcctttcaaccttaacaagatccggcccatttttttcctaccgcaacactttttagtccaaagcttttgcgcttccctctccccccgaaaa

SEQ ID NO: 124257 - DNA, 776 bp, Glycine max
  Clone ID: PAT_MRT3847_83210C.1
agttgctcccccattacaccaatggtccaacaaggaaatactccgacattaaatcgcaatgcggtcatggaagtatagttgctatggagcacgtctcagaagttcaaccacacagacgatgatgcagaggaacagtgattctgacgtcggcattctcatcggatttgtaggtggtcgtcgatggcgacattggaatctagaaggatcttctccgtcattggcaccagttggaaaatgattgctccacgtgaccattgcctcgtcgtctcagacgagcaacgaagtgtggcgatagtgctctccagatccaaatcgtgttgcagcatctcaaagcactatcacttcttgagaacgtgtctcctgggaaagccattgatggccatggagaagcaatggatctatcagtggcaaagaggcatttgtaatgcagagacaaagtggggatgacgaaggtgcagtggtacgccatgtaattaatatctctgatgtggttccgcacgtatatcgctgacatgttcaacaaacagacacatcatcacaggagactaatggcaaggatctcccacaaaactattgaattttcaaggatcagttgcaaaatttggttatttttaaggaatctccaacatatttaagccaacggaatgagtttaatttatgtttaagctcatgccaattggattggagcaaaagaagtcatttgattttcttgtattaagattgcaaaaattgaaaaaagtgtttgttctgagatgcaatatacatttgcttgttgg

SEQ ID NO: 124258 - DNA, 931 bp, Glycine max
  Clone ID: PAT_MRT3847_83211C.1
ccacgcgtccgcctcatccttccgctcccgcttctcttcattggaaacactagaatgtgaaccataaaaccaaagcattttatcttccatgtctaaacacacaagccttatttttatttatttattttcctcagaatacgatcctaaatatcttacaaattcacaattcttgggattttaggtgtgacagacactcacacacacagcacaaccaaagcattttatcttccatgtctaaacactgaaatggcgtccatctctacgtgcatcactgtgacccccacttgtaggcttgctcggcggctactttccttcacctcgaagcaggcaatagcattcccttccgtgcagcaaaacccggtaattgggggagtcacgaaaagggtatgggattctagggttttggtggcggggccgggtggcgcagtggaaaccgacaagttgccttctgatgtgagaaagcgaacgatggatgctgtggatgagtgtggagggagaatgaccattggggatgtggctagcagggctggcctcaacttgaatcaggctcagaaggctctccaagctcttgctgctgacacaaatggcttcttagaggtttctgaggaaggtgacgttctgtatgtatttccaaaagattatcgatcaaggcttggtgccaagtcatttaggattaaagctgagccattttttgaaaaggccaaggctgcaggagaatactttataagggtttcttttgggacagcacttattgcatccattgttattgtttacactacaataattgctcttgtaactagcagtagaagtgaagaggacaatcgtggaaggcgtggaggcaggtcatatgattcaggattcactttctactttaatcctgttggtttattctggtactgggatccatttttttttagggaggcaaaggcca

SEQ ID NO: 124259 - DNA, 569 bp, Glycine max
  Clone ID: PAT_MRT3847_83212C.1
ggctcgagcagacactcacacacacagcacaacaaaagcgttttatcttccgttccatgtctatacactgaaatggcgtccatgtctacgtgcatcactgtgatccccacttgtgggctaccgcggcggctactttccttcaccccgaagcagccaatatcactcccttgcgtgattggaggagtcccgaaaagagtatgggattctagggttttggtggcgaggccggggggcgcagtggaaagcgacaagttgccttcggatgtgagaaagcgaacgatggatgcggtggatgggtgtggagggagagtgaccattggggatgtggctagcagagctggcctcaacttgaatcaggcccagaaggctctccaagctcttgctgctgatgcggatggctttttagaggtacgtttctttatgttacccttttttatctttatttattcatgtgccaccgtggtctctgcaggtttctggggaaggtgacgttctgtatgtatttccaaaagattatcgatcaaggcttggtgccaagtcatttaggataaagctgacccttttttgaa

SEQ ID NO: 124260 - DNA, 1953 bp, Glycine max
  Clone ID: PAT_MRT3847_83213C.1
taaggtgacagacactcacacacacagcacaacaaaagcgttttatcttccgttccatgtctatacactgaaatggcgtccatgtctacgtgcatcactgtgatccccacttgtgggctaccgcggcggctactttccttcaccccgaagcagccaatatcactcccttgcgtgattggaggagtcccgaaaagagtatgggattctagggttttggtggcgaggccggggggcgcagtggaaagcgacaagttgccttcggatgtgagaaagcgaacgatggatgccgtggatgggtgtggagggagagtgacgattggggatgtcgctacaagagctggcctgaacttgaatgaggcccacatgggtcttcaagatcttgtcgcagaagcggatggctttttggaggttactggggagggcgaagttctgtatgtatatcgacctggttatcgataaagtgtttgtggggagctcgtttggtatgattgcggatcaattttttgacaaggctaaggcggcaggagcctactttataccgtttttttattggccattctcttattgcatctagtctgattgctgtcacaacattgaattcagttgtggcatgtagtagctgttactggtacaatttcgatcttaagtcatggcaggtaattcgattcaggattcactttctactttaaccctgttgatttattctggtactgggatccatattattataggaggcgaaggctacaagctgatgatgacaagatgaacttcattgaatcggtcttctcctttgtatttggagatggtgatcccaatcaaggaattgaagaagagagatggaagttgattgggttataaatattgggcaatacatagcatctaatggtggcgttgttgcagctgaagaacttgctccatatcttgatatagattccacagagggaattaaggatgatgaatcctatattttacctgtgctcttacgatttgatggtcaacctgatgttgatgaggagggaaatattctgtataggtttccatctttgcagaggacagcttctcaaaagagtaagagaaaagaatatgttggaaggagatgggcagattgggttggaattgagaagtttttcaaggagaaaaaatggcaattcagtaaaactggcacgccagagagagcaatggtcattggcctgggtggcctcaatctgtttggagttattattcttggaaccatgttgaaagatatggcagttgcacccagtagcttcattaaatttgtagccgacatatttcctcttcttcagatttatgctggttccttctttgcaattcctcttgttcggtggttttttattcggaaaaagaatgctgatattgaaaagagaaacaaagctaggcagcagtgtgcacaagttcttgaattacctgacacttcactaaggcagaagcttttcagtgctcgggacatggcccaaaagacagtcataggacaggatcaaattgtgtatagtactgacaaggacttacttgagcaagagtatgaagctcgcgaatgggataaaaagtttcgggagctagagaggtctgattaagggtcaactattaatctgttatacagggcgttgagctctcattttgccatcattgacaactttagcacagcatctaggctgccttctgtgaaagcattgggtagccctggtttattgcaggcatttactggtccatgtatcaatcttaattcgtttctcttaggtccagcaatttaagtgataaatttgtaatgtgatctataaaaaaggaatagtgaaagtttctataggacaaacaatgtaacttaataggcattacctttgtatttatgattttatacgccagagtttcgaaatttattagcgcgtcgaagtaacatgaacctttatcaatttagctaaaagttccacagattatgag

SEQ ID NO: 124261 - DNA, 284 bp, Glycine max
  Clone ID: PAT_MRT3847_83214C.1
gtaacagaacaaaccaatcattttttaaaatttccacaattctggcaatacaagggtaaaattttaaactttttaattgggcttacatttcactgttttaaaaggggcgtttgcattctgcaatacaaacaacaaaaaaaaaatttccccattcattttcaactgggggggccttaatcgaagaccccaaattttcataccagggtgtttggcctaaacactgaaagtaaaaaacgctcttttttttatgtcaattaccccatggcatatttttggggcccgct

SEQ ID NO: 124262 - DNA, 479 bp, Glycine max
  Clone ID: PAT_MRT3847_83215C.1
acgagcagagtagtaatatatataggataatttgggatatggagttagtatacattattattggtgcacttccaaattcttagatagtcgcatagtttcacgttcactcatatatttagtttttagtgcacacttaaaatatatgttcattatttggggactggaagttaaaagttctaaactgttatagggtccatgttgttaaatctgtattaattggaaaatgttgtagcttattgtgttaggaaaaagcttttctaagagtgagtatgtctgtaatgtgcacaagggagtattcatccttaaatttctgtgacaaggccttttcctctgcagtatgctgagtattatgatctcaatttcatggcaaatggcaacatgatcagagggataccattagatggcccaattctgcattgttgccttttgtttttctgaatttaaggaattgcctttcttgcttttaaagtacggagacg

SEQ ID NO: 124263 - DNA, 359 bp, Glycine max
  Clone ID: PAT_MRT3847_83216C.1
gtctggtagtggaaaaacttatacaatgtggggtcccccaagtgccatgtttgaggagccctcgcccaaaagtcacaggggaattgttcctcggatcttccaaatgttgttttctgagcttgagagagagcaccatgtgtctgacgggaaacaattcaattaccaatgtcgatgttctttccttgagatatacaaccaacaaattggggatgtacttgatccaaccgagcggtaccttgagatgaaagatgattccaaaatgcattgtatataggagaatgtgaccgaggaatatgtcactagctatgatgatgtaacacaaattctgtataaggggctttcaagcagaaaagtgggag

SEQ ID NO: 124264 - DNA, 309 bp, Glycine max
  Clone ID: PAT_MRT3847_83217C.1
ctctttcttttttaataataacttgctgtcaaggagaactcgcttggcacatccctccaaaaaaaaaaaaacgggcggaacgattgtaagggggggagccaacggaaaaaaagggccacccttaagcgcctttttggcaataaactcacggaccaccgattgcctgctgaaattacaaaacgcacaggggcactcacaacgatattagacggggtggagaaggggcgagccccaaggctggcgacaaagctatcccagagggggcaaaccctgcgttcaccccggcccgggccgactcgtgggtgggcc

SEQ ID NO: 124265 - DNA, 259 bp, Glycine max
  Clone ID: PAT_MRT3847_83218C.1
ctgatcctggctagtcgctgccgtgggccaatctcacatttctggaggataggtaattgggtgttgagagtggattgtcatgcttccaagtatttcaacctatgatcaagaagacatcgatattgggtaatactgagggagttgattatagtgctatagcatgcgtcaagtctgcttaagtaataactcatcttaatagctatatggctgcacgatctcgtgatagcgatatgtccgtcattgcagagtattaaatcat

SEQ ID NO: 124266 - DNA, 215 bp, Glycine max
  unsure (1)..(215): unsure at all n locations
  Clone ID: PAT_MRT3847_83219C.1
gtcgcangcacncgtacgtaagctcggaattcngctcgagnagcggacgccatggcggccgacatcgagcaggtttttaggtctttcgtggtcagtaaattccgggaaatntcnacaggagctttccagtggaaggagtgaaggccagctgaatggtgaaacgaatgcacccattgaagggaaccaggcaggngacacagctgcctctgcaagga

SEQ ID NO: 124267 - DNA, 368 bp, Glycine max
  Clone ID: PAT_MRT3847_8321C.1
atccgtggtcgacttatatacaactttgatgaaaagtgcataggagcgagttcggctgaagaaaaatgccaatgatctgctcttgcctgaagaaaactataggatgaataataatttaagaaagagctgaagtcgaactggtgcccttatttaggacatggatggggagtgtttggtaatagtgtttaggcttaaggcaaagaaacaactattgcaatgggtattggtttcccaagacttaagtttcttttggttgctcccaacagctttttttctgttttaacaatgttatttatttattaacttctttagtctctggtgttggtggggttatttaattgttcacctatatgattattttatgtatt

SEQ ID NO: 124268 - DNA, 279 bp, Glycine max
  Clone ID: PAT_MRT3847_83220C.1
gacgtaaagctgacgcgcccgcaagcaccgatcccgaacacccgactccacctattctagaatttttttttttcattcaaatggaaaacagtaaaatatgggaaggcttttcttaaagctggatctttcacccaaaatttcacaactacttttctcgtgtgtctcttatactcaaccctagacatagacaagattttgtattccataatccatgtgtacagtctactgagtggctgaacacgtaaaaatgattatttactttcttatccctcgacttgc

SEQ ID NO: 124269 - DNA, 2670 bp, Glycine max
  Clone ID: PAT_MRT3847_83221C.1
gggggagtcctgctggaaagaatggacagctccatttttcgccttatagtttcgtcgtgtcttctttttactttcctgctggaagctgttcatggcagcaaaaagtgttacattgtatacttgggagctcattctcatggtcctagccctacctctcttgacctcgaaatcgctacccattctcattatgatttactagcttcagtcttgggaagtgaggagaaagcgaaagaagcaattatttactcatataataaacacatcaatggcttggctgcgctacttgaggaggaagaagcagcagatattgcaaaaaacccaaatgtggtgtctgtgttcttgagcaaaaaacataaactgcacacaactcggtcttgggaatttcttggactagacagaaataataaggactctgcatggcaaaaggggagatttggtgaaaatacaataattggtaacatcgacacaggtgtttggcctgaatccgagagcttcagtgataatggatttggctccgtcccatcaaaatggcgagggggtaacgtttgtcaaattaacaaactccctggctccaagagaaatccatgcaacaggaagctgattggagcaagattctttaacaaagctttcgaggcagccaatgggcaacttgatccatctaacgaaacagcacgtgattttgtggggcatggaacccatactctatcaactgcagggggaaattttgtcccaggagcgagtgtatttgccgttggcaatggcactgcaaagggtgggtcaccaagagctagggttgcagcttacaaagtgtgttggtctccaactgatcctgcaagttgttatggcgctgatgtgttagctgctattgaccaagccatagatgatggcgttgatatcatcagtctttctgctggtggaagctacgttgtgactccagaaggaatattcacagatgaggtttccattggggcatttcatgcaattgctagaaacagaattttagttgcctctgcagggaatgatggacccacacctggaactgttctcaatgtggctccttgggtcttcacaattgctgctagcacattagacagagactttagcagtaatttaaccatcaacaataggcaaattacgggagccagtcttttcgtaaatttgccacccaataaagccttttctctgatccttgcgactgatgctaagcttgctaatgcgacatttcgagatgctgaactttgtaggcctggaacacttgatcctgaaaaagtaaaacggaaaatagtgcgttgtattagagatggaaaaataaaatccgttggcgagggtcaggaagctctatctaaaggcgccgtggcaatgcttttgggcaatcaaaagcaaaatgggagaacccttcttgcagagcctcatgttttgtctactgtgaccgacagtaaaggacatgcaggggcacagcctggttacataactgccattggggacgaggacgacatccctataaaaacgggtgatacaataagaatgtccccagcaagaacattatttggaagaaagccagctccagttatggcttcattttcatctagaggacccaataagattcaaccatcaatactcaagcccgatgtgactgcgcctggtgtgaacatacttgctgcctattcagaattggcaagtgcatcgaacttgctagtagacactcgtcgagggtttaaattcaatgtattacaaggaacttctatgtcttgtcctcatgtcgttggtattgctggacttatcaaaacacttcatcctaattggagtcctgctgctattaaatcagcaatcatgaccacagcaaccacacttgacaacacaaataggccaataaaggatgcgtttgataaaacactagcagatgcctttgcttatggttctggacatgttcgacccgatctagcgatagaacctgggcttgtttacgatctaagcctcactgattacttgaacttcttatgtgcttccggatacgaccaacaactcatctccgcactcaatttcaatggcacattcatttgtaaagggtctcacagcgtaacagacttgaactacccttcaatcacattaccaaatcttggcctaaaacccgtaaccattactcgcacagtcacaaatgttggaccaccagccacatacactgcaaatgtccactcgcctgctggatataccattgtcgttgtgccaagatccttgactttcacgaaaattggggaaaagaagaaattccaagttattgtgcaggcaagcagtgtaactacgcggagaaagtatcaattcggggatttgcgttggacagatggaaagcatatagtaaggagtcctattacagttaagcgcagatgaaaattccccaatggatttggtttttttgtattgtgtggatgcatgtttagatataagctagttagactctatatatatacctaggatttcatgttatgacatgactgtgttgttccttggttatcatgtggtttggtttttttgtattgtgtggatgcatgtgtgcatgtttagatataagcgagtttcactatatatatatatatagcaaggatttcatgttatgacattactctgttgttccttggttattatgcatatataccacactttctctcttccaaa

SEQ ID NO: 124270 - DNA, 260 bp, Glycine max
  Clone ID: PAT_MRT3847_83222C.1
ttacctaaactagccacccctttaaatatactattctattattacaaccgcacccgcttaatatttcaggtgccgggcggagtacatgtatcactgttcaataagaaataatatggtcgaaataaatactttccacatctggcttgaaactacccaacttgatgtcggaatgctgtgtgaaataggattacttattttagttgtggacatctgcacaaggttctcaatgacatccctgcttaaatggtgtctttcttttg

SEQ ID NO: 124271 - DNA, 2562 bp, Glycine max
  Clone ID: PAT_MRT3847_83223C.1
gaaactttcaaaagctgttaaagattgtttagtcttgcatccatagtttataccttttcttttatttcttcttgtgtccacattcaaattcgcctgtattctttcttatggtatactgttggtaaaatatctctcaactttcaaagcctctctttatcccttaaacaaacagacacgcacggagagacaaatcctactactaactcttgtttatcttagtgtgtcatcacactgtggacggttctgtgtcaaaacaaaccaacgattttgaaggtttgagacagcaacatgatgatgttgcggttagtctatgctcttatcttggggtttgtggctttgaattgcttgcaagtgtttgaagaatccaatgctcaacgcataccgcgagatgaagtgaaagcactacaagcaatatcggataaactagagaacgtgaattggaaagtcacagaacgttactgcatagaggatggaggcttcaatggcaagattaatatagacaatgacatcgtaaggaatgtcacatgcgattgcactttccaaaataaatcagtttgccatgttgataagatctttctgaagggtcaaaatatatcaggagttttccccagtgaatttggaaatctcacacaactgaaagaacttgatctcactcgcaactatctcagtggctcacttccaacaaatttttctcccaactccctggtcgttttgtcccttctgggaaaccgactaagtggacgaattcccacagaaatcggtgatattgctagtcttgaggaactggtcttagaatgtaatcaacttgaaggcccacttccacctagttttggaaatttgagcaagttgaagagactgcttctttctgcaaataattttacagggaccataccagaaacatatagcaaactaaagaatctcactgagtttaggatagatggaagcagtttatctggaccaatacccagtttcattgggaactggaccaatcttatcagactggatttgcagggaacaaatatggaaggcccgattcctcccactatatctcagttgaaacttttgactgaattgagaataactgatttgaatggtggaccaagtatgacatttcctgatctgaagaatttgacaaaattgaaacgactggaattgagaaattgcttaatcacgggttctattccaggttacattggagaaatggcaaacttggctactttagacctaagctttaacatgttgactggttcggtcccagattcaatacaaaaattggataacctagactacttgttcctaacaaataattctctaagcggaccaattcaggactggatactgagcttcaagaataatatagatctatcttacaacaattttacaaactcttctgcaactagctgtcagctcttggatgtgaacttggcttcaagccatttttcttcagcagtaacttcggcgtcaactttttgtttgaagagggaccttccttgtgcagaaaaaccccaataaaaatgtcacgtctgtagtggatgtgctaacttagctgttaggatataaggagaaggaaaagttagttaacatagttagactattaataagttagttagttagttagaagagtttattagatataaatagggataaaaggataggggagattcagatttggataatttgtaattgagcattagttcttcgtgaaaaaagaaatcctttgtgaaggggaaatccttggaacaaagttttctctcctatatttagttcttttcttactattcaataaaatctatcttttctttcccattatgattcttggctcctaaaaattggtttgaccgattgcacgatggagaacaaagtcagcgctttggagaaattggccggcgagcatggaaaggtgattacagacttgaaaaaaaatatggatctcataaaagaaagattgttggacatgaggcaaatcaaggaattacttcttgaattcaagaaaggaaagacaccttcagatggtggggaaaactcagtcaacaaagacaagaagtcggaagaggagaacagtgacagtaatgggtctagcgaggacagtgaggaagaggaacccaaattttgtgggttgcaccatcattcttgcaaaatcagcatttccgagttgaagcatggacaactaaaaagttcagaaaacgttcttgaggtttaaaagggaagaaaccatggaggaggaggagccctctgaaatcaagaccaagaaaaccattgaggtaattaaagagatcaaatagatgctataattgctgatcaagaaaaagggcatgagtcttgagttcaaaaaagaggacaaacaacccatgcaaacagtatcaactttgcagtagggtgtgtgggtaacaaagtcacagcaagacaatgattcagtgaaagcccttgagggttctgccaatgagaaaattgaacccaccagtgggaaggagcttggtctcaaagacaaagactcgaaaaccattgaggtcgaggtggtagatgagatcagggtgaagaggctaagaatctgcaggcatgcaa

SEQ ID NO: 124272 - DNA, 275 bp, Glycine max
  Clone ID: PAT_MRT3847_83224C.1
catttctgggagtgagcaaaccccaacaccaccaatgccaagcctccctctcccaacatataaccagaagaaatggctaacaaagggagatcataatgatttttcattgtggtgtcaacacattcagtgacagagaatggggcactggccaggaaaaccgagcaatcttaaacccaactgggctcaacaccacccagtgggccactgtgggagcagatgcaagagttttattgacgatattaactgcaaaacaacaagatggattatgtctctgg

SEQ ID NO: 124273 - DNA, 398 bp, Glycine max
  Clone ID: PAT_MRT3847_83225C.1
ctcgagccgtgcattggcctgctggccaccggcggctacaggagacaccagcgcatgatacatcaacaaccccctccgcgcgaacttttcccctgggagcacttcccgagattaaacggctattacaatggcctgcgcaccctcgtctcctacaaggactatgttcctgagcagacatatgtgaaagctgacgccgaggcccctctcgacacgtacccctcgactacccagaaggccaaggctcacaagggccctgagccgtcgccctccgcccgcccgttcccattcaacccctaccctgccttcagctcggccgagtatctgaaggaatatcatcctgtggaagagtgctatctggacgagggtctgaaaaccccgaccccggacatctacgcgta

SEQ ID NO: 124274 - DNA, 1254 bp, Glycine max
  Clone ID: PAT_MRT3847_83226C.1
ccttcggctccacgcgttgaaaattttcaattgtctattgacacgaccaatacacaaaagcacagccacaaaggcagcatcatcagagagcaacaatggaagaagaaaaagaagaccaaaagctcctgacatacccccactactggggcttcaccccagaagaggactactacaaacaacaaggaatcacatccacaagctccttcttcaccactccccaaggcctcaaactcttcacaagatcctggctcccaaaccctaacactcctccccgtgccctaatcttcatggttcacggctacggcaacgacatctcctggaccttccaatcaacccctatcttcctcgcccaaaactccttctcatgcttcgccctagacctccagggccacggccactcccagggcctcaaagcctacgtccctaacgtacacctcgccgcacacgattgcctctccttcttcaattccatcagaacccaaaaccctaacctcccttccttcctttacggcgagtccatgggcgccgcaatctccctcctcatccacctcgtcaactccgaaacggaacccaaatctcaacccttccaaggtgccgttttggtggcccccatgtgcaaaatctccgacaacgtgcgacccaaatggccaatcccgcaaatcctcactttcctatcaagattcttccccactctccccattgttcccactcccgatcttctctacaagtccgtcaaagttgaccacaaaaaagtcatcgccgacatgaaccctttgcgttaccgcgggaagcccaggttggggactgtggtggagcttcttagagtcacagatttgctgagtcggaggctctgtgatgtgagtcttccgtttattgtgcttcatggaagtgctgatgttgttactgaccctaatgtgagtagagagctttaccgtgaggcgaggagtgacgataagacgattaaggtttatgaggagatgatgcattcgttgctgtttggggaaactgatgagaatgttgagattgttaggaacgatatcttggagtggttggttgctaggtgtaagtaacaaaggaggaaacaaaacaaaccagagttgttgaatagtgaatgaaggattgtttgtttgattgttactccatttggtttggtcattgggtgaatgtgattttgcttttgatgaaatttcgttaataacgatgaatggtctgtatattgttgtttatttatgaaagaaaaaaatgttacttttt

SEQ ID NO: 124275 - DNA, 208 bp, Glycine max
  Clone ID: PAT_MRT3847_83227C.1
cacatctgttgctggattttctcgcgaacgtaatcgcacttgagacggtcattattaggcgcgtactacgatatggtctgtaagccgatcaccgttcgcttgaatacaggggattctgggatatgctccttatctctgcacgatggccgcaattttctccgtaatgtctactgcagaggagagaacatggaatggttaagggcgaggg

SEQ ID NO: 124276 - DNA, 192 bp, Glycine max
  Clone ID: PAT_MRT3847_83228C.1
acggttgagacaacacaacgggatgatacattctcactcaaattctctgcatcagggtgggggcaccaatattgctgagaagcgtcttcaataggtgcttctcctaatacaaaaccttagagtccaatttgtcgcttcggctgaaccgataatcttgagtcgaactatgccaaaactccaggaggttccttg

SEQ ID NO: 124277 - DNA, 303 bp, Glycine max
  Clone ID: PAT_MRT3847_83229C.1
tttggaaggaagagagaaagagtttctgggtttcctttcaacgatgagaagtttgatcattttggtcgtccgtcgcttccgtggctggcagcttccgaccgaaaggtcatcaacggtccgaacgtcgccaacggatgccgcggcaaggagtccaccttcgacctcgccactcagggctgctgcggttctcgtgtttacaacctctcctctggcgagcaatgctgcggtgacagcctcttcaaccccgtcaacaacacttgctgcggtgtcggatccagcgcccgactcgcctctggtttgggc

SEQ ID NO: 124278 - DNA, 399 bp, Glycine max
  Clone ID: PAT_MRT3847_8322C.1
ctctcgatatattcttctctctcttcagcgacatcggttttcgccacaagcatcgggtatggcgtcaggatcctcgggtcgctgaacctccgccaccaaatgctgcgaattcgcttccgataagatacgctgcgcctacaacaaccacgctcagcgctaatccacgtcgaactgcaggcagaacgatccggacttgcacacatgaatgacagaaagaacattcatgtttcatagtatagcttattatccactcgaaaaatcttgaattccagatgtgattgcgactgtggagaagactgtcaaatgatatcctgaaaaccgaaagcagttcctaaacggaatcagttcaaggataagacttctggaaatagagtgttactaacgcgatgggtcaacagg

SEQ ID NO: 124279 - DNA, 272 bp, Glycine max
  Clone ID: PAT_MRT3847_83230C.1
aaagaatgcaaacctccacaggcgccggggcggagcagatacatggaatcccgtagaaatctacggcacaaccgggatataactgagtgtcaagagtgaaccttactagaccaggacacccagccttgagaaagaaggctcccaccagatcctggccttatttgatgtggttctcaccgccgacgagcacataaacaaccaccgcaactgatgcgactgtctcaatgtaaaccacatgtccgactaactggacccgacaaaaaaacagtgcc

SEQ ID NO: 124280 - DNA, 239 bp, Glycine max
  Clone ID: PAT_MRT3847_83231C.1
gggggggtgttttttttttttttttttttttgtttttagtatgttttggagccgttctagcctttttttggggaagtggggaacaccgatcaaggccctgcgcaaaaacccggggataacattaccgtcggaaatttataaaatagagcacaaggaggggctgagccaatgtaaatcccccatagccccatgcagtcttttggtgatgaaaacaaggggggatgtttaacacccgattg

SEQ ID NO: 124281 - DNA, 654 bp, Glycine max
  unsure (1)..(654): unsure at all n locations
  Clone ID: PAT_MRT3847_83232C.1
cggtccggnaattcccgggtcgacccacgcgtccggtctgactgtgtgcacgcaaaaactaacctatgtgttcttatgtctaggcaactctttcccctcccctgaaccctgtttcaacctccaaccatggagataccaagtacttctaagagcgccaacagcagcaacaaccgtatgagctagggcacgaccctaacttcggccactactaggtaagatccttcttggaacacagtataccgagcacataccgtatagatgaacgtgaccgagatccaccagatgtacgaaagctagttccagaccctataggagcgccgcttacaaagacaccccctggacatccacggacgccgacgctcactaaatatacaacgagcacgtattatgacttctttaccgatagaagaggttccgacacctctacacacgtgttaatcgcacgctccggcggcgcatgaacaaggtggacatgtactgtagcctcttacaagcagcactgcacggcgtcgtcatcatgcaggtccccaaccagattctatgggacatggtacaaggaggtcgtctaccagctgaagagcggatgccaagacagggcctagatgagaaacaagaccgaagcaggagatggtgctcctgcgagagctcgaccag

SEQ ID NO: 124282 - DNA, 195 bp, Glycine max
  Clone ID: PAT_MRT3847_83233C.1
acgtgcatgcacgccacgtagctagaattcagtcggatgcgcacacaactttttgtgtattgtaatgagtattactttggtgggggggttcaacaattttctggtgggacgacttcatattgaacttcacttaaaatgggagacttaagtgtgacacatgttcccaaggatgtctttgaaatgtatttgcaagaa

SEQ ID NO: 124283 - DNA, 360 bp, Glycine max
  Clone ID: PAT_MRT3847_83234C.1
ccacgcgtccggtggtacgtactgggccagaagtagtagtggctcatgcttgattattcatgtcactgcttggttggttggctgctgatatgttcccttgcctagcctgagttagtccacgcagctcctcaggtggagcgggctggggcatgagaacgctccagcaacacagcagacctacacaggccactctctgtggggcctagagtctgaatgccttcaacatcaccatggaaagtttactgtcatagctaactatggtcggtctaagcgcacccatactgttctgctgtgatacacatgggcagatgcagagcttgctgagcctgtggggatatggtggctatcctccttcggaac

SEQ ID NO: 124284 - DNA, 942 bp, Glycine max
  Clone ID: PAT_MRT3847_83235C.1
aatggtaaagccaaactgtgacgtaaaatgagcggaaccaaactgtgacgtaaaatgagcggaacctacagggatacttcatggcatggtttcactaataaaatactgtcatcatacaaactatctatactttctcttttccttccgtgaacaacatccaatgcctttttctggtacctcaaatacatctcaatatttattggataaaaaatatatacaacactttgatttgtcaaaacacatgaaaatgtgccaagaagatatacaaacaagaggttgaaaattaagcaatttctttagtattagcccagaaacaaataaagctgtttatttcacgaggaccagaaacaaataacaatatatatgacttatctaagggggggaaaagcaactgagaattttcaaatactttatgaaacaatgcctccaaaatttcagagtacagtgggcactaaattggccatacaagagcaaaattataacacaatgatatgcataccttcaggctcaaaaaaggcacttcaattatccaaatactcaacaacattgctgtctagcttggtttgacacttcaactcaacattcctttgtaaaacatcaggtagaccatagctccaatggcatctgtcctggtgttaatcaagggacagtagcatagtaccaatgaggcaatgacatatgagacaaggattttcattgtctcaatcccccacatctccattttcaattctcttatcagttcagttctcaatcattcccctatcaccttggccccatcaaattgaaaccaagttaaatcttaaatgcttgcatattcattgatcaaatttgcttacttgacggcgtgtagggcgtcggcaattcgacaatccactcatcaattgattatatgaagcaagatcaggtataaaccccatatccaacatctcattcaccagcaac

SEQ ID NO: 124285 - DNA, 242 bp, Glycine max
  Clone ID: PAT_MRT3847_83236C.1
ctctattcaccttctctctcatgaatggttaacattaacattttcatttccatttcactttcattattacaaccatgccatcgcgtccgccgccactctctcctcctgccaccgccgcatctcatcggcgccaaataatcctctgcggcgcaattggcggcgcgctctttctaacggcgctaataatctccgtcacgattttcatctaccgcaagctctcctactcccgaacggcgccgttc

SEQ ID NO: 124286 - DNA, 439 bp, Glycine max
  Clone ID: PAT_MRT3847_83237C.1
gcctgtgtagcaagtcttttacatgtaacctatgaaattaacaattaacatttgtaacattataaacatgaatgatacaacctcaaacatgtcgattattaatttaagtaattatgctaagcaatactactcaagtatttttttatcttccttaatcgtgtcaagtttttttttatcagtaagaaaggtaaagggaggaggactgcagacagttccttcagcatctgctgttaatccagcaaaaccaacaattgatgagacttgtctcccaactttgcaaggctgtccgcacacgcattcccttctcggtaagtttgcttgaacttgagaacccaaggataagaggtaaaagatcttatcttagaaatatatccaatgggggaaaaacttgatttttaaaataaaaacaattttataggatcacccaaacttttagggg

SEQ ID NO: 124287 - DNA, 310 bp, Glycine max
  Clone ID: PAT_MRT3847_83238C.1
accaaaccatcattttctattatggttttattaggttacaacgggtatacctggtattaaactattaccaatacacttaaatcataatcataatggaactgatagcaccacccacatggaccaaattaaatggtttaaaaaaaagggagaaaagaattgaaccgaattaatcaccccaatcttggaaaagggtttttttccaccacccttggaggcaaagaccccggtgaatccacacttacattttctattaaatcaagggactgaaatttggctggcaccctttgatccttggttgagaaccctttaa

SEQ ID NO: 124288 - DNA, 371 bp, Glycine max
  Clone ID: PAT_MRT3847_83239C.1
ttttttttttttttttttttttattatatggggtggtttttttttattttttttttttactattttattttttctttttcggggggcaccccttaccttttaaggttggggggggattttttaaaacctttaaagctttttattgttggaagccccctttttttttgtataaaaaacacggaaggggacccccgtggaaacaaacttttccataattttttgaggtcctttggaacacaaacaaagctcaaaattttaggtttccatttgtccccaattttaagtttttgtgcaaaaccccttttgcgaaaattgctcaccctatttcttttctcttttaaaaaaggggggtaaaaagaccattctttttc

SEQ ID NO: 124289 - DNA, 252 bp, Glycine max
  Clone ID: PAT_MRT3847_8323C.1
tttttttttttttttaaaagaacaagcaaactggtatgctattcttataggagaaggggaacacaaattacattggatcattcccatatgaaaaaaaagaaaaaaaaaacactattttattctacaaggcaaaaccatcctcgggtatttcactacgttacacttttttctatgccaaaacttgtgtggcataatccttgcctccttggctttggtgccctaaaccacaaaactaatggaagggtggggaag

SEQ ID NO: 124290 - DNA, 411 bp, Glycine max
  Clone ID: PAT_MRT3847_83240C.1
agcacgcattcgattacatgagctcagatgttgtcaccgttgacatctgtgtgtacgactaggagcttatggcatgatttcgttgaagtgtaaagtacggtgctggaatctgccatggagagtatgacttccactgtggatgcttacaatgaactgaaaagatcgatgacagaatctacttgacgatgtcatagctcgagaagaacatttatgaaacataccatggctgatgactctagaccaataggatcactgatgtgtacactgaacctctaaacatatatgccatgagtcatctctttcatagcgtacttgtcaagtgaatggcatacgattgtggaatctgactggtcatttggtcatgactaatattataatacaccaatcttataattaactatatattgcact

SEQ ID NO: 124291 - DNA, 451 bp, Glycine max
  Clone ID: PAT_MRT3847_83241C.1
aaaaagagaaaaaaaagaaaaacaaaaaaaccagatttaagacagaaaaaaaaagaaaaaacaaaaaagaggggggagaataaatagagaaaaaaaggactaaatacaaaaggagaaaagaaaaaaaaaccaaggaagaacacagaagccgagaaaaaaaaggaaaggaaaaaaaggttggagcatcaaaacaaaaaggaagggactgaggggacgatggctagaggcataacaaagagaaaaataagaaggtgagagattaaggaaacgaagggatgtagaaagtcaaagaaacagacaacggcagaggatccagaagcaacatgggaagagggaagataagaaataaagatgctggagaggggaacatggaagagggacggagctgaggaaggagatagaagagggcgaacagtggaatgcaaaaaatcaaaaaaggaatgcgaaagga

SEQ ID NO: 124292 - DNA, 442 bp, Glycine max
  Clone ID: PAT_MRT3847_83242C.1
aaaaaaaaaaaacccctaatttttaaaaattttaggggataaaatttaaaattttttttggaaagggggggaaaacaattggggtgggttaaaaaaaatttcccaaaaaaacttcaaacccggtgggggggggaaaaaatttcttaaaactaaaaactaaaaaaattaatttgggggttgccccacaagggccaaaatttcagggacttttgcccaaaggaaaatcttaaaggggcaaagtttgggcccccctttttcggtttaaggccacccgggaaccaaaagggagggcccaaaaaccaaaaggggggggggaaaaaccccctttttaaacgggaaggcccttgagtaaaaaaaataaaggccggcaaaaggcccctattaaaacgcggaccccccaaaattgccacttaaaaggccctggggtggaaaatgttcccag

SEQ ID NO: 124293 - DNA, 413 bp, Glycine max
  Clone ID: PAT_MRT3847_83243C.1
gtaactaaagaatgatgtgttacacctctggtgcaaaaccttggttgacctcccttttttcaagactggacatattcatacttagaggcaaggctcaggctgagaaggttaagaaggctaaagctaagaaaatccatgcggagaaagataaggggaagcaaatagaaaatccccaagatgacttggtacctcttccttctcctgttactaccgatgtcactatccgagaagacctatgccttttagtggtggtccttctaagaggcaacggttggaaccggtaccggtggatattcctttcgtcatagatggccatactgcttttagtaatagatggccattctacttttttgttaacaaaggaatgggtttcttctctttggaagaaagatttcaacccctaggctctcatt

SEQ ID NO: 124294 - DNA, 695 bp, Glycine max
  Clone ID: PAT_MRT3847_83244C.1
gacgtaaatttcacactagctagctgtagttgacaatcattggtgcaccaaatgaaagctgaagcaacacaacactctcttctacttctaattcccatctacagttagccccaaatctggggttagggtttcctctgcgtcgatggcttcgaattcgatcgacggcgacgccgttacggggtcgggactgtgcataaacgacgtgttaagggacgacgagctgcgttccattctggggcgagtggagagcgagaaggacaaggaaacgttcgggttggtctgcaagcgatggcttcggttgcagagcacggaaaggaagaaactcgccgcacgtgcgggtccccacatgctccgaaaaatggccgataggttcacacgcttagtcgaactggacctcgctcagtccgtctctcgttccttctatcccggcgtcaccgattccgatctcgccgtcatcgccactgccttcacttgcttgaagatcctcaatttgcataattgtaaaggaattacagatgctggaatgaaggctattggtgaacatctttccttattacagtcgttggatgtgtcttactgtagaaagctgactgacaagggattatcagctgttgccaaaggctgttgtgacttaaggatattgcatatggcgggttgcagatttgttactgatggtgtattagaagctctctcca

SEQ ID NO: 124295 - DNA, 746 bp, Glycine max
  Clone ID: PAT_MRT3847_83245C.1
acacattcaaaaactgttatattgctttctcatagggtaatccatgagacaacaaatacaagaagaagctcttctaattttggacttgaatcaaaatcccttgcaagctaggactctgaatttgtaaatacagagtttgttatatgttttgaagtctaaaaagggaaaaaactctgaatttttgtaccctttttgttgtagggagaagtccatgaggctgcagccaaaacaagcaataataaaagcttatcacttagcacttcaaatagtattaccaaactaataaacatacatgacttggcctttattcaatgagaactatacatgattttttagaagtgactatcattcaattttatggacttgacatgtcacatgaaaatagtattgtaagtagccatcctgacagctcaatgatcatgtgaagtaattagagtttgtgtttgtgagcactgtacttgtggagccacactcactgactatggacctgtcaagctttattgagcatggatattggtagttttgggcagtgacaccaacatgtgaagatgacctctgcatcctcactggctttgggacatttcttccttccattgaagctcttcgtcggctcggttgcctctcgtacgaatccggccttgactttggtgcactctgtgatctggctttggcccttgatgattttgtgttggccatgtagtttgaaaataaagggtagtcaaaggacatgggttctgtgtatgctg

SEQ ID NO: 124296 - DNA, 332 bp, Glycine max
  Clone ID: PAT_MRT3847_83246C.1
gacggcggggacgtgagaaatgtaatggcttctgaaacggaatgatttgacctgtgtctacccacacatttaacttatgttgactgggataatgcatatcatccaacgtcggttgctgctaatttgagacaaggtagctatgttctagagaaagactagcaagaacggcgtgagacgactgatactcttgcactgcctacgtgggcgatcttccacattaagatgttttgttcgctcgtcgaatactgtgattgtaccatctacggcgctatttatgagtacaagcctccatcatatatgtgcaacgacaccttacatagaagtgcacgtta

SEQ ID NO: 124297 - DNA, 441 bp, Glycine max
  Clone ID: PAT_MRT3847_83247C.1
gctgcatttggtactactggacgtattgtcatttcaatagtattgtacgtggaattatatgcttgttgcattgaatatataattttggagggtgacaatttgtcttctttatttccaagtgcacacttgaatttgggtggaattgaactgaattcacgtactttgtttgctgtgattactaccttggctgatcttactactgtttggctccgggacctaagcattctcagttacatatccggtaagagcttatttttggtgcacgtagtgatcagttatacattaaagcttggtcccatttgcctttggacttaaggacatattgctgaaataaggttttattatacttcatgggatatccttttctgtattgggataagctttgatggtgttgttaaaggaaactataataacgtatcatgttaccaactatatataaca

SEQ ID NO: 124298 - DNA, 289 bp, Glycine max
  Clone ID: PAT_MRT3847_83248C.1
tgctaatatgggtaccatgatatcctgaaaacaatgtatatattcttggggtttaataaggggggggtagcttaagaggggttcagaaaagccagatgaaatggctaattggggtgatagacaacgcattatacgctggtttattgctggactatctaaaatcaggaattacggctataggaggtgggatgactaaattagaaagaagatggggtatgactatagttatcaattacttgaactataggggaataaccattgtgggatggggcgctgtttgaatgggggg

SEQ ID NO: 124299 - DNA, 465 bp, Glycine max
  unsure (1)..(465): unsure at all n locations
  Clone ID: PAT_MRT3847_83249C.1
cctgcatgagatttagggattgaactttcggaagaacgttaaggtttctacttcttgtgtaggtacttttggttgcccaaagtcagaaagaagcaaagaacatggctatcagccacagtactttggcatttgccttcggcatgctaggtaacgtcatttcgttcttggtattcttggctccaataacaacattttaccgaatattcaagaagaaatcgactgagggctttcagtcactgccttacctggtggcattgttcagttccatgctttggttgtactatgctttactcaagaaagacgccatgcttctcttgaccattaactcatttggatgtgtcatagagaattatctaccatatctcgtacatcacctatgcgacaggggatgctaggaacttaactntaaagctattttttgcaatgaatgtgggcgcctttgctctgatcctcttggtcacacat

SEQ ID NO: 124300 - DNA, 374 bp, Glycine max
  Clone ID: PAT_MRT3847_8324C.1
attttatgaaatattgttttttttttggaaaattcccttgatccttactaattggaaaaatacccccaaagaggcccggcctgaaattttcacatttaacttacttacacaaaactgggatattaaaaggcagacccccagtcacctatatagacccttaagaggtctatttacaacccggaaaaaaagccaaaactacattaattgtttagtcacacttgcgaaggatcgaccccaacggacttgtgggtctcgacacgaggggtattagtataggcctctccctgaatgggactaaggatttgggggggatcaaggtagcttccctcttgaacgggcgccacctttctgaagaaggatttcttcataaattt

SEQ ID NO: 124301 - DNA, 266 bp, Glycine max
  Clone ID: PAT_MRT3847_83250C.1
tgaattaattcatggcgcgcgtacacatctgactaggaatgtcggccgcgcagtgtattttttttttttatgaacctccactcatattatgctgattgattgtatatagcatgatgtcgctaagcatgggagaacggaatcaattaacttataacataagcggaggattcatggattattgatgcaaagccaagctaactttagggagacactttgtgacaccaacttttttctgtctatgggtgctgcctaacctgaagcttgat

SEQ ID NO: 124302 - DNA, 244 bp, Glycine max
  unsure (1)..(244): unsure at all n locations
  Clone ID: PAT_MRT3847_83251C.1
aattaaaaacaaccactatttttcagaccgcnagccccngcaacncggcgcgagagcgctcgaacagagagcgagacgcacccccccaagggcggcngcacaaagcaaaccgcccggcaggcaccgcaccccgaccgccgccaacacagagcgggcaaacaggggccacagcacacgaggacggcggncaaccgcacgacaaagaagccgagcccccacacgggaactggccgaccccgacccc

SEQ ID NO: 124303 - DNA, 265 bp, Glycine max
  Clone ID: PAT_MRT3847_83252C.1
gccacgcgtacggctcatacgacggacgtaagggtcaacgccagcttggctaccgcactgacaccctacatggatcaaatagcgaactactcgccgatatctctagacgaaggtagtgcagcacgtggctaaagatctaccgacacatcagatgacttgcaaacgaatgatacatgctctactagtcagcatgtggagaacatcagtgcaacaatcggacaatcactgacagagtcaacacatgtagctaaaataggttcatggg

SEQ ID NO: 124304 - DNA, 264 bp, Glycine max
  Clone ID: PAT_MRT3847_83253C.1
tttgggtttttttttttttttttttttttggggcaatcaaataattttggaaatgggactatttggtgaaaatagctccaagaaggcattacaatttttggcccaagtgaaagaactacaccgtggatttacttttgcgtccttagctcatgcttttcaggagttgatatataactatccagataagcactgtggggatctaaaatatgctcttgatcttaattcaaccacgaggggcccacattactgctaacactactagta

SEQ ID NO: 124305 - DNA, 289 bp, Glycine max
  Clone ID: PAT_MRT3847_83254C.1
ttttttttttttttttttttttttttttttattttttttgacccgggggggtttttttaatagaaaaaacccggacccaaaaatttaacccacatactttcattaaaaccccctcaaattgactaccaagaacacttttttaagaccttaattgttcatggaccaaaaatccaacccctttaaggcttgaccctccccatgtaatgggggtaaaaatttaaaagccattcttgaccccctaacaaaaatatggaccatctacctcccctcccaggaatcccccaggggg

SEQ ID NO: 124306 - DNA, 240 bp, Glycine max
  Clone ID: PAT_MRT3847_83255C.1
cacccaattacactgttatttaaggagaaacgcacctagtatagataatgccacatctaaacacaagcttcttcctaacggactccttgcaagattagagagcttttgccttcgttcttatgctgattggctacacttttctagcaactgctaagagctagatctactacgcaaattttgagaagtgcgttgtagagtcaagtgatactcaaccttatgctgatgcaggacaatactttg

SEQ ID NO: 124307 - DNA, 344 bp, Glycine max
  unsure (1)..(344): unsure at all n locations
  Clone ID: PAT_MRT3847_83256C.1
gcggggnnnnttnaaaagagcgaaaagatttcacttcatgtttataatatgatataaacaatacaaacgtttttacattaaaacaatcaaattccctttactaaaaaaaaaccagcttgtttccaattttttaagtgccacccgttttttctttaaacaacattcaagcctatcaacggttgaacccccggacaaaaccttaaaaaaaattgccaaatcaaaaacccccccattttttttaatccaagcaagggtgagagggagttttccatcagggggcccctcaaaagccacatcagaacccttcaattggaacctttttggaaattcactttagtaaacaa

SEQ ID NO: 124308 - DNA, 362 bp, Glycine max
  Clone ID: PAT_MRT3847_83257C.1
aaaaaaccatgggaaaacccccaacccttttgaaaccgggggcttgggaacattacaatccatgggggccttcaaaattgcaaacaacacggggggcccaggtcaaaagaacttaacccaaggggcttgaaagaacattttacccccccccataaaattaaggcccggaggaccaaaaaaaaaaaaacagggagatgggggggggttcaatttttccccaaaatgcggttgggtgaaaaaaccttcccccaaaggtacaaaaacaaaaatcttaaaaaacatcccccccccctttgtcgccaaggggatccccctggggcttacaaacggggggtggcaccaatttctctccaagagggggg

SEQ ID NO: 124309 - DNA, 407 bp, Glycine max
  Clone ID: PAT_MRT3847_83258C.1
aatttaattttgtatttgtttggctttgattgaaaatcttctctgacagagacttgatatttactctcaaattaggattgatatagataacccttataaacagaagttgaaaacaaacaaacggaggtttgctaaaacatttccactctcccttttgcgttttatctatgttgagccgttagatttaattttaaaattcgtacacaacaacttaaattgcaaaccaaacatgttaatttttaattagatgacattataaaatttcttttaactttcaattcatttactatttgcttatttttataatgaattggtttttgtttaagtattactacataaaaatatttttttgttaatataaagttaatattttggtcccatcaatgataaaatgtttattttataat

SEQ ID NO: 124310 - DNA, 297 bp, Glycine max
  Clone ID: PAT_MRT3847_83259C.1
gtaccggggggctttccccgtttaattaaatccagtccctgaaggctaccaatatttttcttaaaagagcccggctgaaccaaaccgaaatcccgggcaaaacacccccctgtgcgaagcggtattctagaggaaaagccaaaaacggtcccaccgagaaaacaaaaataacataattctggggggacaaaagagccccttaaccaacccaaaaaccggccgcccccggggccaaaattaaaaaagagaacgctgccctaaagggcgaaataaaaaaaaaaacaagggggggcaaaa

SEQ ID NO: 124311 - DNA, 685 bp, Glycine max
  Clone ID: PAT_MRT3847_8325C.1
cccacgcgtccgtctctgtatgctctttttgcttttttcatatatgcttgccaacccaacttcctgattctcctagactagaaacaaatcattgaagtttgaaggaatcgaagaggttatatatataggaagcaaagcttagaagagcaactagtagctagttcctgaaagtaataagatattttgatgcccgaaatactaatgattcagggcttgaaagtgagaagccatgagaaaaacagtgcacacagagatgtagccattagccaacctttttgacaatgatttaggttctcttttctttcactattatcctcttgccatttctttctacaaaagtcaagttctcatcattcaatcaagtgtaccgcatctgaagaataagcagaatacaacacaacaatccatcatttcgatccgcacaaccagctcacggtttcaatctccacaatcaccatccacccaactcaactcttgagagttgccatatatatagcaaagtgggaagaaagcaaggtaggtagccatggagcagtcagaaaaatcgcccacgaaaatatcaccactaagatcatcatttccgagagatccacgtggctcactcgaagtgttcaacccaaacacttcagctttagcttcaacttcaaccaacgcccgcgtgcgttcacagcctctttggaaatcg

SEQ ID NO: 124312 - DNA, 420 bp, Glycine max
  Clone ID: PAT_MRT3847_83260C.1
cgctcttgtgattaaactcgtcgggtccgcttaggggttcccatcgcaatactcgtcacgcattaactcgtcgcccttaaagggtcttatagtcgtgtgattgtgctacaattcatagctcacaactcaatgcacacaacatctcaatgcacatatatattacaagtcaatactgttagaccctaatttcgtccgggaactattattcactgatgttttgattctcactaattgaaaggtgttgttgacaccagtttctacacaaggcgtgagatcgttcgatgttttggtcaaggatgcgaaaaatacctaaggggaggggaaaaatttcattttaggcaattttctggaccctggctcgcctggccccacaaattgcttagggctgaaagaaccaactcacctgggcgagccagtttc

SEQ ID NO: 124313 - DNA, 323 bp, Glycine max
  Clone ID: PAT_MRT3847_83261C.1
gaggactttataatcatgcctcttttgttaaaaacaactatagccgaaacgaagattgaatagtagtgtttgtgttgtgtgtatgccaatgatttcaatcttggtggtttgttaaactcactttgtgtatgagattcatgctcactattatttgctgaaccaagttttgtgtttggatagcttaaagcatcaatcttctttgcatctttttttttttttgctggtactcctttttatgtatatatacaagaaggtgatcctttttatatatcatgcgtttgtagactttttataaagcttcagctatgtgatgatggggggga

SEQ ID NO: 124314 - DNA, 351 bp, Glycine max
  Clone ID: PAT_MRT3847_83262C.1
tggtttcaccatcctggcctgcctgaaggagaaccggaccaagatctcgcaggcctgcgaccaagttctgaagaaccacaaccagtaagctcggccactggcccacaagggcggccccggggccgcctttttcaggccggatccgcagggcagccttcgagagacaggattggttttgcggccgtattcccctatatgggggccgcggcggcatcgccggcacgagcccgcgcgagcgaaaaagctcttcctgtccaaacgattgtaaaccagccctcgatgacctctgcgagcgaattgcgatccggcaagggtgaccgcgacgagaattttcccgtcgcgtcctggacc

SEQ ID NO: 124315 - DNA, 633 bp, Glycine max
  unsure (1)..(633): unsure at all n locations
  Clone ID: PAT_MRT3847_83263C.1
ggtagaggggtgccacgtggcgcttgtgaacgcgaaggagtaccacaggaggcacagagtttgcgataagcattccaaggcacccaaagctgtggtcttagggttggagcagagattctgtcagcagtgtagcaggtttcatgtggtgtcagagtttgatgactcaaagaggagttgtaggaggagattggcaggtcataacgagcgaagaagaaagagctctcacctttctgttactaggaattctagacaagggtgtgctctctctcttctgtcatctgggagtagtagtgaaaattggctatctcatcatgcggatttctccacaagatgcagtgcagcattgcgtgaattgatagcagaaaaccgtgctgccctaatcactagacaacaacaacttgtttatgatagagactggcctcatgttgtgccccaccatgatgctgcagtggaagaagaagaagaagactttgaagacttacaacaacaacaacaaccacctgagcccaattattttccacaacaacatatgtttccacagacataataataataatagttcctgaacttggttggaggtgaccccaaatatatctaatgcactttacacagagtgtntgtatgttgtgtagc

SEQ ID NO: 124316 - DNA, 316 bp, Glycine max
  Clone ID: PAT_MRT3847_83264C.1
gcgcggacgcgcacgcgttcgcccacgcgtgcttacaggtgcgacaagacgacactaagggactccaaaacaccggagaaaacctccgttgtgtatctgtggattttcaaggccatctgatcaaacttttcttgagtctctctctcacattttgctattctgggggatgggtatgccccgccgctgtttccacacctcccacatcactgtaattatcatgaccagctttttccgccacaagggtttaattacaacaattttcctctattatttattaacccaccacctttatagcccgttgcaatggggccctaaa

SEQ ID NO: 124317 - DNA, 439 bp, Glycine max
  unsure (1)..(439): unsure at all n locations
  Clone ID: PAT_MRT3847_83265C.1
ttggagctaacactctgataagacaccaagagaaggtccttctaaaaatgctttcgaactatcactgcacatgagaagacgtatgaccgtacacttatcacacacttgtctggcgtgcacaggattataccttcgacgtggcataaggactgcttcgtcgtgacgagacctatgttctgcacggaattaaagatccatangacatctgatggagactgggtcatctataggacgttcgtccgacaatatcgagttcgttgaacacaccactcttaacgattcgaatctgacctactgcttttacttggaaccatctgaggctgatgctgtattgatgcataatgagattgacagtaagtctctggaagcacatcagattatggatcacagtcttctactatgtgttcattatcgaggtgcccaactactgcaccataac

SEQ ID NO: 124318 - DNA, 394 bp, Glycine max
  Clone ID: PAT_MRT3847_83266C.1
aattcggctcgagacaggtcttacggaacaagccggatttccgacggaaaccatggcctaccataagcaatgctgcaaaagattttgtgaagaaattgttggtaaaagatcctcgtgcaagatatactgctgctcaggctctatgtatgtatccaactgtttgttttcttattgtgagaaggctgtttattaccatatcttgtttcctttccttgaaataaatataattacattttgattgctgcctaaaatttagggcattcatcaatgctttaagcactgaatttatagcatttgaaaagctgttcattaaaaaggctacaattaattttaatgatgcttgcttaaattaaatgtatgttactgtgttgaattactattgaaggtaaaaata

SEQ ID NO: 124319 - DNA, 793 bp, Glycine max
  unsure (1)..(793): unsure at all n locations
  Clone ID: PAT_MRT3847_83267C.1
ccacgcgtccggaaagatcccataatgatttccattcccactgcctcacttgcttcatttagccaaagagaagaaatggttgaccgtacaaagagcaaggttcttatcagagaatataatgaagataaagatgctaaaatggtgagaaaactagagaggaactgtgagggtggaaccaaaaaggtggtctccatttttaccaacatgacgggtgaccctttatctaggattaggtttttcccccttcatgttatgctggtagctgagcttcttgacacaagggagcttgttggagtggttcggggaatcattaagaatatgggcactctttctgggtcattcttgaaaatgggttgtatcttaggcctcagagtctctcctacttacaggagaaaaggggttgcactaagacttgtgaccgcagctgaagaatggatggtgagaaatggagctgagtatgcattcttagcgactgaaaagaacaatggtgcatctaaaaacctattcaccatcaaatgcanctatgtgaatctcagctcacttgtcatatttgtccaaccaactagttcccttacaaagcaaatttccacggatcttaaaatagagaaagtggacatagatctagcattttccttgttccgaagaaccatgaggaccaaagatttgtttcccttgcacatgggttgttattctgaaggagaaactcagctttggaacttgggtttgcttctacaaggaagagggatggcttaactttgtcgggccggggttattattgaagatcttttttatt

SEQ ID NO: 124320 - DNA, 1277 bp, Glycine max
  Clone ID: PAT_MRT3847_83268C.1
ccctgctctcttactttctttccactctgctgctactttgctccgccagcatgacgacggcgtcgtttacggagcttgacgacgatttggttcgaagcatgtccataggagccgtcttctccgacttcggtgggatgatacattcgattgatttccatcgaaaggatgatttacttgtcacgtctagtggggatgactcggtgcgactttacgacattgctaatgctaagttattgaagaccacttctaataagaaacatggtactgatcgtatatgttttactcatcatccaagctctgttatatgctcttcaaagtacaatttggagtctactggagaatcattgcggtatttatcaatgtatgataatcgctgcctacgatacttcaaagggcataaacagagagttgtttctctctgcatgtctccaatcaatgatagcttcatgtctggttctctagaccacagtgttaggatatgggatcttcgggtaaatgcttgccagggcatcttacatctacgtggtagacccgctgttgcgtatgaccaacaaggcctggtctttgctgtagcaatggaagggggagctattaaattatttgattctcgttcttatgacaagggtccctttgacacctttctagttggtggtgacacagccgaagtttgtgatatcaaattcagtaatgacggcaaatcaatgcttctgactactactaataacaatatttatgttcttgatgcatatggaggagagaagcgttgtggatttagtttggaaccatctcctggtaccccaatagaggctacatttaccccagatgggaagtacatggtggcaggatctgggagcggaaccatgcaagtttggagtattgagaccaaaaatgaggtggcatgttggaccagccatattggtgtgccttcgtgcttgaagtgggcccctcgcagggccatgttcgctgctgcttcaagtgttctcacattttggatacccaataatgattcaaagctggaaacccagtatggtggcacagatgctgaagctggaccttaaccctaaccacttctccattataactgaatatgctgttcctctcccagcccatctacaattttgttttgttgttgtatcaagaaactaactaacgcgttgtgaatttggtaagctatacatagttttgatacatttcatgaaaattttgatgatgctccaaggatgttgtcaattgtaaatcccatcaccaaatgcaatttattttaaagttttagctac

SEQ ID NO: 124321 - DNA, 1203 bp, Glycine max
  Clone ID: PAT_MRT3847_83269C.1
tgatcgtatatgttttactcatcatccaagctctgttatatgctcttcaaagtacaatttggagtctactggagaatcattgcagtatttatcaatgtatgataatcgctgcctacgatacttcaaagggcataaacagagagttgtttctctctgcatgtctccaatcaatgatagcttcatgtctggttctctagaccacagtgttaggatatgggatcttcgggtaaatgcttgccagttgagctcaaggtttaaaaatgtggaaagccatcacatgatgctggcggccattgctaattgcattaggctgtgattgcaaaattggattgatcgcagttggccttcaacaaccacaatgcaaccatgacagtaatcgcaattaaaacccatgttttcagggcatcttacgtctacgtggtagacctgctattgcctatgaccaacaaggcctggtctttgctgtagcaatggaagggggagctattaaattgtttgattctcgttcttatgacaagggtccctttgacacctttctagttgggtggtgacaccagccgaagtttgtgatatcaaattcagtaatgacggaaaatcaatgcttctgactactactaataacatatttatgttcttgatgcatatggaggagtcaagcgtgtggatttagtttggaaccatctcctggtaccccaatagaggctacatttacccaagatgggaagtacttggtggcaggatctggaaccggacccatgcaagcttggagtattcagatgaaaaatgaggtggcatgttggaccagccatattggtgttccttcgtgcttgaagtgggcccctcacaaggccatgttcgctgcagcttcaagtgttctcacgttttggatacccaataatgattcaaagctaaataatggtggcacagatgctgaagctggaccttaaccccaacattgaattaaatatgctcttcctgtcccagcccagccaaaactttgtttttgttgttgtatcaagaatttaactaacgcacttcagaaaaaaaaaattgactaacttgggaatttggtaagctacatagttttgatacatttcttgaaaattttgatgatgctccaggatgtttgtcaattcaattcaattgtaaatcccatcaccgaatgcaatttatgttgaagttttagctaaaaaaagaacgacc

SEQ ID NO: 124322 - DNA, 236 bp, Glycine max
  Clone ID: PAT_MRT3847_8326C.1
gggcccagaaaaacattcattattatttgcagcatgcaacgctcgtcccatatattgaacaagccattctctttcttattattcaagaagaaagaaaaacatgcaaacatgcatcgcttacttattgaactaaactatcccttgcgttgagctcacaggaacattgacacaattggagttcgcgctcatgataaaaccctactcaacctcacacgatattgaatgtgtaccgggcc

SEQ ID NO: 124323 - DNA, 288 bp, Glycine max
  Clone ID: PAT_MRT3847_83270C.1
ctcgtgcaactcccacctttatatcatacaccgaacagaaagaaaaaatgaggggtcttcttgagactttatgctgtgtggtggaagtaatgataatctcatggatctctgatacatttgcccattatataatataaaagagttagtttaacaagttattcccaaactataggtaaagtttatatattcatacaatttatactcaactaattcatgaattgctatactctggtataacaggtcaaaataacgaacactgatgccaacccatacatagctcaaaaatac

SEQ ID NO: 124324 - DNA, 572 bp, Glycine max
  Clone ID: PAT_MRT3847_83271C.1
tacctgcccagcaagttccacaaatccaacaggttcagcctcaaagtcatctccaaggacaagttctccaccagcaacaaatacagcagccttctttgtcttctttgttccaggcatatggagttacaggcccccaaaacgtgcaggaagtgggatataagcagttgcaggcatcggttatttctgctggtgatccaggacgctactcgcagggtattcattctacacaagaattgatgtggaaaaataagcctgcaggagtttgaacatttgatggattgagcttgaggcagcatatacagatgtcgcagcttttaaatggctgtgaaacagaatctcttatttaatgcttcaaggtagggaaccaccgcttcattttgatcccatgtgaccctgtaacaatttatttgcattggcgagttattttggtcctcgttgtcgaggtttcactatcacttactggctcagcactaaggatatgtgggattcaaaatacatggcagggaaatgccctacccagatcgtcctgtaccataatatttgcttaaatataaattttaaccattgatttt

SEQ ID NO: 124325 - DNA, 1208 bp, Glycine max
  Clone ID: PAT_MRT3847_83272C.1
cctccaagcctctaagccggccctctgctttggctgctgcatttcctcagaccaatcttgaaaccggcatgcaatcgggtgcggctcgagcttcgccaagtcaaccgcaaggtcctccctctgtgctgcagcagccccttcagcaatccccttctccgttagctctgctgttgtcacatcaaacacagacttcccgagcaagccttcattcatcttttgcaggccttctcccagcttcaacaacaattacaaatgatgcaaccttctagtcaagcattaacattccagcaaaatgcagaagctaccaacaagccgtctccatgggctgggcctgggactgctgtagcacaagcagtggccagcactcgtgcagctgcacctgctgcagatgtgccttcatccacacctgctaattctgccttaccagcaataaaccagaacatggctcttgtcaaatgtaattggacagaacatatatctcctgagggcttcaagtactactataatagtgtcactggtgaaagtcggtgggagaaacctgaggagttggtattatatgaacagaaaaagcaacagcaaaggccatctgttcagcagtctcaaactcagtcacaaccttcaatactacctgcccagcaagttccccaaatccaacatgttcagccccaaagtcatctccaaggacaagttctccaccagcaacaaatacagcatccttcttctttgtcttcttcgttccaggcatatggagttacgggccctcaaaatgttcaggaagtgggatataaacagttacaggcatcggttatttctgctggtgatccaggacgctactcacagggtattcattctacacaagaattgatgtggaaaaataagcctgcaggagtttgaactttgatgggttgagcttgaggcggctaatacagatgtcacagcttcaaaaggtagggacaaccatcttcattttgatgcttcaaaaaggtaggggactaccgtcttcattttgatcccatgtgacatgtaacaatttatttgcattggcgagttattttggccctcgttgtcgaggtttcactatctggctcagcactaaggatgtgggattcaaaatacatggcaggggaaatgccctacccagatcgttctgtcccataatatttgcttaaatataaattttaaccattaattttagggacacatcttac

SEQ ID NO: 124326 - DNA, 358 bp, Glycine max
  Clone ID: PAT_MRT3847_83273C.1
gggaagccagagtgaatgactttattgagtgagccaaatagaacctgaaagcccagctttgatgctattttgattgcaaccctaccttggttcttagccacaaccctttccagaggaaaatattcatcaaccttttccacaccattcccaaagcatatcctgatatgggcttcagagttcttcatcttccacaacaacctggcggcgggtacactggatcttcgacatgctacacgcttaccccttctccaccttcaaactgcaccgcgccttctgatcccgacaggttttcacggggaaccccaacgttgtccaacagattctcaagaacaaatttcctgtttaccccaaaggcctg

SEQ ID NO: 124327 - DNA, 398 bp, Glycine max
  unsure (1)..(398): unsure at all n locations
  Clone ID: PAT_MRT3847_83274C.1
caaaaaacgagaatcgccaacgtgttcttcttgnactttatggccgcaacccaaccagcgtggatatgctacaaggtcctacaacagactacacatcattttatccttcacggataccaaggcatgaaacgtcttatgagcaaactaaaaaagctggttctttatatcgatactactgattctctttatagcaactgttactctgctctacttaatagacaagcactttgaagctatatctgtgctaaatgccactcaacacctgcttttcattcagtttttcggagctctaaaagagctcatgagaccgatgtaaatgctgatgcatggcacatctcagaacagatctgggtgtagttctaacatatgttactaccacctctactagttactctatg

SEQ ID NO: 124328 - DNA, 635 bp, Glycine max
  unsure (1)..(635): unsure at all n locations
  Clone ID: PAT_MRT3847_83275C.1
gaatagggaaagactgcagtgtggcaccagtgaaggaaattacattaaacactgggatattatgaagaaaacaatgatgaaattcatacaaagttgacagatttgccgctttcatctgatttgtcacataatttgtcagttaaacacagcccaataaatctgcttcactgtaggaaaactaagggaaaatgactaagatagtttcaagtattgaagaactgagaaattcggtaaaatataaatggcaaacaaattttgtggttattgatcagtcgtccatattctgtgaaagtaaaaaatttgcagccaaattttcgtttttctcacaggcgaagtatgcttgaattacaaggtgttctgggaatcctaaggcctttaacctctcaattgcttccctgtcctgagcagaaatttgaatgacaccgggtgcatcttcaaatgcattgccccctcttcccccaccacccctgccagcagctggtactgcaggctcattagcactaccagatccatctgagggcgccgcnnntgcgctccctgcaggttcattgagcatattcacaaaagcctcttgattttgggagataagctggaggagtgcagggtttgtctgaccaatctgttgcagcactgtg

SEQ ID NO: 124329 - DNA, 221 bp, Glycine max
  Clone ID: PAT_MRT3847_83276C.1
ggaaacaaaaggagggtttttacctttaaaaaaattgaactttgggatgcccaacatgcggggtcttttaaaaatggggggcccccggaagactaataaattttaattccttgaaaaacataacataaactttgtttttttgggcccaatttttcggttataacgtggggtagaaaaatctgcgggggtccgcccccaaatatgggttcccacccgggggg

SEQ ID NO: 124330 - DNA, 160 bp, Glycine max
  Clone ID: PAT_MRT3847_83277C.1
tttgaccccttttttgtttacttcacaaccttttgctgagttcttcactgatccctttggaggctcaacataagaaacattcttaaggagctttttttggacaaaaccatttaacattcaaatttttacagctttttgcttttaatccaaactttttttt

SEQ ID NO: 124331 - DNA, 428 bp, Glycine max
  Clone ID: PAT_MRT3847_83278C.1
aaaagagaaaattttatttttgttttttgaaaactgtttcacaacaagaaccggggggattttgcctttagggggggtttgggagtattttatttccccctcaccccctaatgccctaaaacccgaaggcccatttgggcatttcaacccggttgtgccggtgtcccttcaaccaattttggccttttggccctcaaaattggggaaaatccttttcaagaaacttgggtaaattcaccccacgaagtgtggggtatattacatttttttttcaacagccttttttttcaacccctttcctttaaaaaagtgagaaagagtctgagccgggccccttgaaaggttttttttttccaaatacggggcttcaaaattggggaatgggggggggactaagctttgttgggtttttttccaccaacatgggc

SEQ ID NO: 124332 - DNA, 453 bp, Glycine max
  Clone ID: PAT_MRT3847_83279C.1
tctgtgtgtgcgtttattgcggtgaagttcccttcgcttctttcttttaaacataagttagaagattccaaatctatgacgaaaccattaggatgatcgaggtctcatgcacactgattaaacatacactcagaataccttcgtttagggactgatttaagccaaaacaatgtgtattatagatatgaccatttgttcctgcgggaaagagtctgttgggacctattaagaagctgattttattttgggtcttttgcctctcgaagtttgtcactgcggcgttgataaaccaaggaaaaacgttatactccggaatcatgtgctgtgtgggagcacggactgggcgacaacgacagcgttatgaagacaatatgcgactcgcttctggatgtattccctatagatggaaaaagggaaaagtagatcaaatgggagatgcagaggagataatag

SEQ ID NO: 124333 - DNA, 126 bp, Glycine max
  Clone ID: PAT_MRT3847_8327C.1
atgcaatcacaaggactcgcactacctcttgaggatgaggttggtccttctgctggtcatgttagcacaaagaaaagttatgttgatccctatggggaggacccaaaaacgagtgactcagaaaat

SEQ ID NO: 124334 - DNA, 251 bp, Glycine max
  Clone ID: PAT_MRT3847_83280C.1
gaggtgagttttttttttatttttttttttcttttttttttctttttttttaacaaaaagggggaaaatcacccctcggggcttttgacagataaaaacttgagaaaaagtgccttgtctcttggggctcttttaaaggcccttgggaaactgagcccccttctggacaagacgttaaaacacaccccttgtattcaaagggcacccccccttattaaaatgggggggcatccaacacaaccgcggccccc

SEQ ID NO: 124335 - DNA, 398 bp, Glycine max
  Clone ID: PAT_MRT3847_83281C.1
gggtaaagaaacccccccgttaatcccaaaaaaacagggggcccgggaaccccccccgggcttgggaaatttacccaaaaagaaaaagaaaagggcctaggtgggcttcaaatttcacaaaggaatatcccccgggaagggggaaaccctgagcttaaaccataaaccccccttgctttgggcccagggggcccaacccgaaaaggttaaaaagaaaaaaaaaaaagggggcgtttcatttgggaccctttcccgggggtgaaaatgcaagcccaggccaagggaagaaatttccggtaacaaacccttctttggccctttttaactggcccgggtgtggggcaaaaaaccccacggggcccccaatggggccaccggggaccattcctggggggggc

SEQ ID NO: 124336 - DNA, 432 bp, Glycine max
  Clone ID: PAT_MRT3847_83282C.1
gctgtattttttatggtgtagactatatttgtatgttcttagacttcatttattgagaattggaggggattacttcctataattctgtctgagagactggagccatgatagaagctcctgcgggagcttgcctttgtgaggagagagcagatattcttagctgtgcagcaggcttagccattactggattgcgtggaggaagatgtcttggatgcgtaccctagaggggctaggtgacaccgctcctggtgttgagacgattataatgatgactttgagtcccacttgacagcctgaagtgctacaggaacctgcagattcagactcagcttggatctctgcaagtaggcttatgagcctgagagagcggacgctcctacagctcgaacagcttgctgatttggagaatctagaggatcctgtacctgctgc

SEQ ID NO: 124337 - DNA, 379 bp, Glycine max
  Clone ID: PAT_MRT3847_83283C.1
taagctgggaacgccgttcgtgtttttttttcctcaaaaaattgattgtttttaaatgtggcaaaatattaagggtagggaaattctctgaatcaaaggagggcaaaacccccccatttatgggaaatcatgaactttcggggcgcctaatcaccatgcagttcaatattataggatccacaattgctcattctttaataggatgcatgggacagacaccacgtctattcaataaatataaagaatttttcttaatgacgtgtgaagcatttccatcactcttattttacccgacggctttttggacgcccaccttcactccttttgatagacaaggcacaacactttttaaggcaaaagagacctgggatataaactg

SEQ ID NO: 124338 - DNA, 896 bp, Glycine max
  Clone ID: PAT_MRT3847_83284C.1
agcttcaactctgggagttattaatatcatcagtttaatttcacagtactgataaagttttttctttataaaaactagactagtttggtaattttataaacagactgcagtaatttggtgttaattgaaacaaccattatgattaccataaaaagttcctgagttattaatgacaaccatcttactttcctcatcatcatcatcgatgagagtgttccctttcccttgcttgaagaggatatattgatttcctgtaaacatgctctgaacaattgaattaatatgttttggtggctctccatttacttggcactgaatcagtgaaccagattcttcatcaaactggccgaactcgcttctgaaagggcctttaaactttgcggaaagtcccgtcactttatcacacactatgttcaccttaaatgtaaaataggttttaaaatctaccttataccagtgatcaaccttccaagaaccaagcattccagtgcgacgccccacatgaaaactacaaactttcctttcacagtgataatcgaaacatgcctcgtcgaaaaggggtgttttggcttgattgttagtgccagcttcaacaattctaactacccgaaagttgaaagatccgtagttatttctttcagcagtgacctccgtgtgaagtcgcactggatgattatcgcacaaagagtctgcgaatctgaatagcaccttttctggtttcacgctcagacgaaaaatgctaaaatttgatttatcagtgagggatgtgtatatgagagcatgctcttggggaaattccacacttgaccatttgtaaagctcaattctgagatttgcactgtaagtattacccatgttggtaggtagttcgatctcgtttgtatttgtgctcgtgc

SEQ ID NO: 124339 - DNA, 427 bp, Glycine max
  Clone ID: PAT_MRT3847_83285C.1
ctccctcgactttatcattttcttttctcttgctttatcacgatatatctatgtcctttcctcggtgccacactaatattattggaaagaacctgggcccaacactctcattccgactggactgctaaagctactaaagactatacctgcaggtgcttacaccgaatacctcccttggcggagtgatgatacgcattacccaactacttacttgtgtatagagcacctttatccacgccaaacaatgaaaggacaattctcctaacgtccctatgcacaaccttatgatgtatatacttggctaacggatattaaagacacctgtaaagaaggatatggtcttgaagagatatgcgtcaagataaattcgtttgatggagaacagaagtgttgagcaaaatccttgtgaccactcatgggtcttgca

SEQ ID NO: 124340 - DNA, 430 bp, Glycine max
  Clone ID: PAT_MRT3847_83286C.1
aaaaacacaaagcctttttcacagggggggggggtttttaaaaaaaacaaagtaaccttcccttccctggggcacgggttggcccaaacccccggatttcctaaaatggccataaagggacccctgggaaaacaaaaggcaaattcccaaacgattttttggggaagagccaacccccattatttcttatcaacaaaaatttgggggggggcccccaaaaaaccgattcctactcgcactagttttttaaaacaaccccaatttaaatggaccagaagctggagttaaaaacaggggggctttttgaggccccataagaaaggggggagtcccccttggaggtccccaaagtggccttggagtaacccttggcttttccaaaaggggtttccggagcctttttaaaattttttttttttccgccccatgc

SEQ ID NO: 124341 - DNA, 435 bp, Glycine max
  Clone ID: PAT_MRT3847_83287C.1
gatacatgactgtacttgattgtgagcaggacatacgcatgactccactactatacagaccatggcagtgatgtgaaaaagtcagtctgcgccttgcttgatagaacaacagcaggaataacttctgttgttctattaaacattgcctatacaggctaaattgtatcactgccatggtttgtaagatagcggaagttagacaaactgactgaaatcttgagagacacagatgtattacacgtgaggagaagtccctgaagcctaatggtattatggcggggtaatatctgatacacatgaatataccgtggaggccgattcctagctaacttacgcacgcatgcataaatatcggtctggtatctggaggcctaccatcaattcattgggcgagtcttaacaaagcttggactggtaatacccttaggtgacccc

SEQ ID NO: 124342 - DNA, 217 bp, Glycine max
  Clone ID: PAT_MRT3847_83288C.1
tatactcatgcctcaaagggttgttacttactacaaagcaattgagaagcaaccactggacaagcctccagtgtacaagctaccactatacaaaccacaggtttataagacagaaccaccgttttacaagatgaaaccaccgggttacaatccaccttcatcgatgtcaccgttcaagaaaacacctcatgcgaactaccctccataagaggacaac

SEQ ID NO: 124343 - DNA, 357 bp, Glycine max
  Clone ID: PAT_MRT3847_83289C.1
gtgcgagtgactatttccgatggtgcagtgatattatggggaaatatgcttcaagagaactcaaacctccatgcagccggtgcttcccgtggaggtgggaaggagtcctcaacttctaccttcaactccaaaatgggctcttacctaactcacataatatatataaaccaacttttatgatcataattctcgaattatcactctctctgaacaacaagaataatatcccttctcttttacttcctccttcaactacatttattaattaacatattatttctttattaccattctctaatccatattctcacttattttcataaatattattcattttgatacttctactaacttcac

SEQ ID NO: 124344 - DNA, 693 bp, Glycine max
  Clone ID: PAT_MRT3847_8328C.1
gtgaaactgagacccctcaaccaatttcattgcatataaaatatgagaacacatattgatgatagtgcatctgggaagaatcaccatcttccaatgctttggttttttgattcttctctgaggctttgtgctattcctctatctgtggcaaccatgtggatcactgtgactaacaaggaggacaacagcagctatggaatgctgaaatataacaacctctctgctctaaagtatatggttttagtcagtgccctctgtgcttgctatgctcttcttgctgcagcttgctccttggtcagatgttttgtatccaaagcttggattttctttgtctctgatcagattgtggcatatttagcgatcacatcagttgctgcagtaatggagatgtattacctggcttacaatggtgctaaggaagattcttggagtgaagcctgcagttcctatggcagtttttgcagcaaagtcaagttggctttgatactccatacgatcacattttgctgcttctttgttatagccgtgatttcagcttttcgagcgtttagtgtctttgatcctccttttgtcaattctcaagaggtgcaaggagattgagattacttaggattgctcatttgggtcttgaaggggatttgtttccatgatgctctagtatctctaatactaagattgcaaacatacatggca

SEQ ID NO: 124345 - DNA, 312 bp, Glycine max
  Clone ID: PAT_MRT3847_83290C.1
cagatatttcatgtatgtgctattgttgtatgtattttttgtctagaactctccatatgtaaactaaaaaataggcaaatggaaaaaaattcagacgattttgatatttataagttctttcattatgttcaaaaaaaaaaaaaaaaaaaaaaaaaaaaaccaaaaaaaaaaaaaaagggcagacaataaaaaaaaaaaaaaaattcatacccgtacatgcaaaaaaataattcttatatagtgataccaaaatttaattcattggtcggggaattaaaacaaaataactggggggaaccctttaaagaccca

SEQ ID NO: 124346 - DNA, 618 bp, Glycine max
  Clone ID: PAT_MRT3847_83291C.1
ctcgagccgattcggctcgaggcggcttccgtgaacgttctccctccctccgctcccaagtcccaattccgttcttcctccacacttcttattccattcccttgctcaaacccttaatcttcaatggatcgagcaacctcacaatcccaagtttccattttgacgataacccactatgcaaaactaagatcaaaaaccaaaggaagctcttttggatcataatcaccgacaacgacgcctccgatgaagaacaaaacaacccaacaaaaacaccaagagtgaagagagaaattacacataaaaaaatcgtcatcgttctttgccgctgggtaacaccatgtttgtaggtggagcttctgtgactactttcaaggagcttgcgtttttactttgaattggtttaattcctctcaaaataccacaacaaaaaaatgagttttgttagaaaaaatcaccaggtcatggctatgtcatcattgctagaaaaaaatgagtttattatgcatttagcggtattataaagtccagaacttgaatcgaaaagtgtttgctatgaatttctaatatctcttttctgttatgtgcgatggaattgtagatataatgtttggttatgga

SEQ ID NO: 124347 - DNA, 201 bp, Glycine max
  Clone ID: PAT_MRT3847_83292C.1
aaaaaatgcaaacaatattagaaggctacgtgtgataattagttaattatatggattacaattccataatccccggctaactaggccatagcaaactcaagtctcacgtcggaagcttaggcaaaagaaatggaaagtagtccttgtgaatataacttatagtctaccttgaaatttaagaaggggtcaattacccggatt

SEQ ID NO: 124348 - DNA, 264 bp, Glycine max
  Clone ID: PAT_MRT3847_83293C.1
cgagaagggaatgcgctatgcaatgccaaatgctagagtaatgattcatcaacctcaaggtggatctgagggtaatgtggaggaggtgaggcgacaggttggagaaaccatctatgctcttgataaagttgataaaatgtttgctgctttcaccgggcaaccacttgacatggtgcagcagtggacagagagggatcggttcatgtcttcttcagaggccatggatttcggattgcttgatgctttactggaaacaagatacta

SEQ ID NO: 124349 - DNA, 406 bp, Glycine max
  Clone ID: PAT_MRT3847_83294C.1
aaaaagagaggcccaaaagggcccaaattttaaaaattttgggccaaccaagggggaaaaaacccccaataagggcccaaagaaatggccccatcccccaaaggggggggtgggaacctttagggggcccccaaattgggggttttaattaccccaaggaaaaaaaaaacgcccaaaaaaaaattccaattttggaaaaaaaatgcctttaagaaaaaagggcccaaaaaaaaaggatttttaaaaaaaaagccaaaggccccacaaactccttggggaaggggggcgccggggcaaaataaaaaccctttgaaaataaaattggcaacccagggttgcaaacccaaacaaaaaagaacccggccccaattaaatatgggggggggggcctaaaaggaaaaacaaa

SEQ ID NO: 124350 - DNA, 427 bp, Glycine max
  Clone ID: PAT_MRT3847_83295C.1
ttttcatgtgtttttgttttttatttgttttgttgtttgtaaaaaccaaacacgcccccaacggtttgcattggaccaatttgtttcttgagcaaaaaataatgtacaatgatgcctccaaatagacagcaatggctacacaccgggaaactgatttgaagaaaggacctttattgaattgaaaaaaaaacctatacgtttagccctcacatccctttgcccgtgggtgactgcttgatccaacatcaattgtgtatgcgaggtaaattgttctttttctccaattttgaggggattttttggtattcatgggaatgcttctttaacattaagaccttttttgggagaagactcaaaatatggaaaattttcttttgatgcaaaccaagcccgagcctttttttttggcacctggccacaaaaactt

SEQ ID NO: 124351 - DNA, 437 bp, Glycine max
  Clone ID: PAT_MRT3847_83296C.1
acattcacttataaaattaaatagataaatacaagatgctgtcttgtctgttctttgaagcatcagaagctcaaagcgcatgtgcttgcactgcagacagcagatcgtgtgacttgccgctgtgccgctacccagctctcagctcgaaccctgctacggcataccactacctctgcatacacgacaaacacgtagtcaaccgcattttgatcttcttggaattgtaacgacgttacgactttctagtgcatggatcggctcttacagtgccctccacctgtcgttatctccccgcggccttcttcgctaggtaggtgttttggcgggtgcgtggtgcccaaacaagctactgctgctacctcttggctacccactatgcatcctgtctcagtctcacgccgcgtgccctgctaacaccacgcccttccggatagatg

SEQ ID NO: 124352 - DNA, 446 bp, Glycine max
  Clone ID: PAT_MRT3847_83297C.1
tgacaatgtaaggttggtctgatctacatgattgtggtacccattgctgatgattctacatagtgctcactgttgcagagccccatctgttttggagcctcagagtttatgcatacaagaggggtctttgtagggactttggtataatctgaaacggaggcaacatagaatagaattgaccgatttggtggatgcttcatccacctatagagatacaaatggctctgcttgtggcgggtgaatctggaatatcattgatctatctttctcactaggcccttttctcaacaggcgcactattaggactgacgctgagaaagattgtgtatggctattcgaacaatagcaggcattaggcttcagcagtggtttcaccaacgtcagaacgacagatatcgaactcatatctggaggcttatggctccatgcacctattgctgcaactg

SEQ ID NO: 124353 - DNA, 210 bp, Glycine max
  Clone ID: PAT_MRT3847_83298C.1
ctctgtttctaactagtgttgtagtagtagagtttgagtccgcgcgtgagcaaggctcctgatatcacagagtttcaagcaaagaacttttcgtacaaatcatgaggaatatacatctgctacatatttggactatattataatcccgaatctgttgtttgcgtgtgatatttactgggatcattgcatgcttcacccttattttaatgt

SEQ ID NO: 124354 - DNA, 366 bp, Glycine max
  Clone ID: PAT_MRT3847_83299C.1
aaggaagggaacatagaacttgtgaacttgagacagcgcacaacacaacaaaacacaattacagcagaaacaaacctaaatttccttgataatgattcaagaactcatgatagattgacgcatggatcctgacagcaaaaaatttggtggagatgcacactatttatacaatgtagtaggtgacatagaaatcagaaaaggagatgggatgcagttggatcaacttattcaagatacatctttgtccagtggttctaattatcatatacaacctttggacctcgatattctaaaggaggcttttcaactcaaggaaactgttcccattgatttgcctgctgccgagaaggggattctgactgttgc

SEQ ID NO: 124355 - DNA, 545 bp, Glycine max
  unsure (1)..(545): unsure at all n locations
  Clone ID: PAT_MRT3847_8329C.1
atggcatgtctagctatctcgtgactgtcaggtctgtcacaatgctcgttgcactgcgccggtacatccactgtgctggtgcacccccgattggcaatgatggtccccaaatttagttttagtaagtggaggcgcctgcgtaggctgcacaggcggtgcgcccaccgctacacgatgatacaaggaggaagccttgcaagggtcaacataaatggtagttccgccgttaggcgatttagcccctggctaaagcagttacattacgtgcgtatgcgtgaaccgcaaccaaaggaaaaagccaccatgcgtgagcggcgttacgtggccgggtgatggttacgtggagcgtatgccacaacagttgcggcacaattggctaaaatagtgtaacgatttgggccgtaataatggctgtatgcngtagggtcccagtggtgcacacactgttaatgtgtgaaagtaggtagtggtagcgggggtgttaagtggatggaagcgataagatagagtatgcacagaggaaccntaggcctgggcngttggcc

SEQ ID NO: 124356 - DNA, 482 bp, Glycine max
  Clone ID: PAT_MRT3847_832C.1
gttggggggtggggggggttttttttttttggggggtaattacagggataaacattgagtccaagcccaataaaaaaactcaaaagggttagacatcccatgagacaaattcctgggataattttagccatcaagaggggctaaaccagaaaacatgagcatagggggcgggggggctcaaaagagaaccaaaaaacaaaaccagataatattcacccctggggtccacaggacacccaaaaaggatgaagccttattgggtatgggggtgggaagcgcaggcaaaccctggtggggagcgtgcgcagggggggggcaggggggggggggggggggggggggggggtagggtgggaggaggggggggggggcgggtggggggtgaggtggggcgggggggggtgggggtggggggggggagggtgggggggggggagggaagcgggggggtgaggggggggcggggcggggggggggggggg

SEQ ID NO: 124357 - DNA, 741 bp, Glycine max
  Clone ID: PAT_MRT3847_83300C.1
ggggagggagggaacatagaacttgtgaacttgagacagcgcacaacacaacaaaacacaattacagcagaaacaaacctaaatttccttgataatgattcaagaactcatgatagattgacgcatggatcctgacagcaaaaaatttggtggagggccaagagaattgacaggtgctgtggatctattaaatcacttccaattactcccacattttgagtttttctgcaagaggccacttcctgtttcaatttcagatgcacactatttatacaatgtagtaggtgacatagaaatcagaaaaggagatgggatgcagttggatcaacttattcaagatacatctttgtccagtggttctaattatcatatacaacctttggacctcgatattctaaaggaggcttttcaactcaaggaaactgttcccattgatttgcctgctgccgagaaggggattctgactgttgcaggaaaatcaaaaggtgaatctaaagatgtggagaagaagcataaaaaacacaaagacagggacaaagataaggacaaggagcataagaagcacaagcatcgtcaaaaagatcgaagcaaagacaaggaaaaggagaaaaagaaagacaaaaacaggcatcgtgattctagtgctgatccttcaaagaaacacaatgagaagaaaaggaagcatgaatgagatgatgatcttaatgttgtgcacaaacacaaaaaaagtaggttctcatt

SEQ ID NO: 124358 - DNA, 584 bp, Glycine max
  unsure (1)..(584): unsure at all n locations
  Clone ID: PAT_MRT3847_83301C.1
cggtccggaattaccgcgtcgacccacgcgtccgagcagctgtatgatgagttcttagtgggagagaaatcagtccctgttagtattcttcaatacgctgacgatactatcttctttggggaggctactatgaaaaatgtcaagactatcaaatcgattttgagggctattgaattgtcatcaggacttaaaataaattatgggaagagcagctttggggtgttgggccgttctgaacattggaaactgcaggctgctagttatctgaattgtagaatcatgcctctgcctttctcttatttgggaataccaatcggggctaatccaaggcgttgtgggttatgggatccaatcctaaggaagaccgaatcaaaattgtctaggtggaagcagagacatctatcttatgggggaagagtgaccctcataaaagcaactctaacctctattcctattttctatctcttttttttcagaatccctaatagggtagcggaaaaactgacccaaatccagaggaggttcctatggggtgggtgccttgatcagaagaanaatgcatgggttaaatgggatactatctg

SEQ ID NO: 124359 - DNA, 651 bp, Glycine max
  Clone ID: PAT_MRT3847_83302C.1
caaccaaagcatttcttggcaagcaaaagattccatgagtaagtggttgagttaattttcctggtcattggtcaatgcttgtaatgcacacatgggagttgggtattgattatgaaataattgtaggtttcatagttcaccaatcaccagtagctttggtggccttaattgacctagaatcagcacttgtggcaaggctagattccattagagcaagtagtggcatagagtgaatgcattgcatacttttataatagttggttattggtaattggtaattgggtaccaaatcatgctttgctggctaatgttgtgtgtttatgacagtgagatgcatttgtttatgtaaaaaaggacaaagatatgtctgtcagtctctggtcaacattacgacagaatgaattggcatgggaatcttccttggctgttggaatttgctaactttgagtcacatactgtagattccctattcaatatttttttctcctttctagaacttaattttttcatttgtatttctggtatcttgaaaatagaaacaagtgtacattcatgatccaaccatttaagtctacttccactcaattgtatgtatatcttcctgtcacagtacaacttcagttttcaatagaatttaatattccatttttt

SEQ ID NO: 124360 - DNA, 571 bp, Glycine max
  Clone ID: PAT_MRT3847_83303C.1
tgtttttttggagaaaagatctcagttagggtaatccaaaagctgctgaatcattggttgatcctgatgaatatcctaatttgtttgatgattggcaagttgcactaactgttgaatctaaagctacggaagcaagaggtgcttaccctcctgcatcggaatatgtgaaccaggctgtttaataacatattacccttgttgaagcttttagaaacatgcagatagaagaaggggatcagcctcttgagaacggggactctaaccatgagttgactgaacaaaatggagaagagacgcataacataagaacggttccttttaatgacagaagaatgattccttttaatggactacattgcacggactgacctataccatgtttataatcacagatttatagaaactacacttgcggatccacagatgacatgttttcactctaatctcttccatattaaaactcccagtgaatgcatttgttcagatttgtaaataaatagattttcactaccacaattaattcttattattataaagtaagttcaggcaggactatagataccgtgatgac

SEQ ID NO: 124361 - DNA, 498 bp, Glycine max
  Clone ID: PAT_MRT3847_83304C.1
ttatttttttttatttggggttttttttttttttttttttttttttttttttttttttgggggggcccaaaaatttttttttttaaaaatgtgcctttagaaagaaccctggggggaaatctccaaagggaagggacaaatggaaggtccttaaaaaaaaaaaaaacaaagttatttttttttgttaaaaacccatggtaaaaaggaagggggggggttttaaaccaacccttttctttgtataaacgggaaactgggaaattttaaacctccccctaatccataaaaggggccccaaaacattggcaacccttttttgtgggggaacaagggccataattgtcaaaattttcggaaaaaaaaagggtaaaactttggttaaaaaaaaaatttggaaaaacctttgggtgaaggaaacccttaatggggggcttaagggaaaaagggggggaaaacaccctccatgggccccaaagggaatttttaaaacctttaaaa

SEQ ID NO: 124362 - DNA, 489 bp, Glycine max
  Clone ID: PAT_MRT3847_83305C.1
ggctcgagcttgctttacatgttgcacattgccttttgcattttagctgcagttgctccaccaattatcttcaaaggaaaatctctcacaggcattttggctgcgattgatgtgttgggagacaatgcattggttgggatattctacttcattggatttggccttttctgtctcgagtcagtgctgagcatctgggttatacagcaagtatatatgtacttccgtggcagtggcaaggctgcagttttaaagcgtgaggctgcgagagggacaatgatggcagctctataacatggcacttacaattgttttcctaatggatatacccgaaaaatgatttcttgagttaccattaccagttctccttacaaactttactctttgtttaatactgggatgcgttttcctaggtttgtgtcaaaccacataattaagatagaagcttagttgtgcatatatagaaatcattgtttgagatagccccttacc

SEQ ID NO: 124363 - DNA, 507 bp, Glycine max
  Clone ID: PAT_MRT3847_83306C.1
ccaaaaaaaaaaatatatatttttttttctttcaaaaaacccaacgcccctttttttcttcaacctatttaaccggggagaaaaaaaaaccgcccgaatggggggggacgggtccccggggggggttttgggaaataaaatggggggaataaatagatggggtcaacgacgagaccgtccaacctgggttttttgaaaaccccacatccggaccctaatttgaaagggcatggtcgccgccagcaacgcccccgtccgggggggactaaaaatccccaccaccttcctaagggccaacgcgcgaagctaatgggttttttccaaaaccttttaaagcgccttcccgagcccctaaagcgccgttcctgttccattatttggccgtaaaccaccctgggaggttccagaatccgccgactcgccatgctttttggaacggaagctactgcctccgtaagctccctttccgcccttttggtgtggcccctggttctctccaccctcccc

SEQ ID NO: 124364 - DNA, 271 bp, Glycine max
  Clone ID: PAT_MRT3847_83307C.1
caaaggcattggttatgagcatctaagtttggcagcagaaattttgatcaccctatggtgagccattttgctcaagaatttaagacgaaaaacaccaaggatattagtggaaaagccagagccttgaggatgtagcaaacaccatgtacaccacaaccctggactgacttctacggtgatcaaaccaccccaaacgtcgattccctgtaacaaggtattgacgaccacacatacctatcccgtgcctgctctgaaaaacctcgcatgggtt

SEQ ID NO: 124365 - DNA, 1483 bp, Glycine max
  Clone ID: PAT_MRT3847_83308C.1
ttaaaaatagaaaaaccctttatttaaattcagcagctcacagctcatttccttctgtttttttccctataaatcactccccttgtcccctcgaactttctctcttcgggttctcgtcaaaacgcaaagatgcaagttccattgatcgacatcgacagaatcaacgatctccaagtgggtctgaactctctgcagaacccatccttcccaatcccttctcagatcacaacctccctcgcttacaatttctgcaaatggggcgcagtcattctcgcccttgtcgccaccttcggcagcatcatcaacagagtcactatcttcatcatccgcttccgcgccaaagccccttctctcccatccctaaccctaaacgacgacaatttttacacctcctcctcctctgacgacgacgacgacgacgataacgacgacgacctaacctactcctcttccgagcccgaagacgagccctccgcgtcttccagtttcatccgtttggacgactatttccgactcagaggaaccgataataataataataataacctagacgacgagtttcagactcaaaacggcacgcacaaacgatgtcgtagcatcggggatattttctccctctcggaactagccaacagcaagagcgtggtgaagctctgggacaccataggcttcggcctgggcttggacttcgatgattacgatggttactacgttggtaacgcggcggttccgacgagctccaccgcgtctccctcggtggttgtctcggcgggggaaggcgcgtgcgggaatctggcgctggagatctgggacacgcggctgcggcggcggaagcccacggtggtggcggagtggggtcccaccgtgggaaagaccctgcgcgtggaatctggtggcgtccagaaggtctacgtcagagatgacgggcgttacggcgtgacggtcggggatatgagaaaggtcagcacgccgttagagagcgtaacggaatctgacgcggatacttggtgggatgcggacgctattgttgtttcggacgagtcttttggcgaacagcaatcaatgttgcaacaaccaacttgaataataattgcagttcctttttcggtgctggaaatataattataataatcgaaaaaaaaataaggcgccaccatccgagattttctcaagagaaattgtttatttgtattattattcaatttaaaatttatacattgtatattcattaattagttctttcattatgtgtacatatcatgcgtgtggtcggaaataagcgatcttaattctaggaaatgtagtgcaagaatggtagttaaattaattattgattgcttccttataatgaaagtttcgtagctggcttttcaaagatttaattctagtgtagtgcaagaatgaacaatataatcatttatgtattgttaatatatttagaaaaaggcatggaaatccattactttgacttgttattaatgag

SEQ ID NO: 124366 - DNA, 404 bp, Glycine max
  unsure (1)..(404): unsure at all n locations
  Clone ID: PAT_MRT3847_83309C.1
cttaagggttgaacttttaaaatttttataatcgggggnntgtgggacacaaaaaggctttcaaacttaacgggacctaaaaacgtatttaagccccttgaagagctgccaccccaattttcacatacacaagcgggggtggtattctgagtgcaaacttgaaggtacacatttttaaaatgaggttggcaaaacaagggaaaaagggccaaacaacaggggggtgggtattggagggtgtttaaagcattcacgagaaatgtgccatcattagacttttattaaacaagcccaaaaaggcgtgggggtcgggaacatggggttggactgaacattttgcgtactaggtcttaaaggaaattccggaaccactgcctttagaagaaaacccaaacttcaaagta

SEQ ID NO: 124367 - DNA, 559 bp, Glycine max
  Clone ID: PAT_MRT3847_8330C.1
gagtaggattagttgatagaggatacctatggtaaaaaagaaaaggaagcaacttttactcatttgtttactgcaaagctgctttaatatctgatcatccaagggtacagctttcgtatattttttcaggaaattaaatatgacgtcataatgaataaggcttgccatatctggctaatttcatttttgtcttttttgtatctttgagttcttggtcttaattctcaatggtttataactattcccacccctcttcctaaaacagcaaagattgggaaattgtgaattgaaatattgttttgttttttttattgacaaatattaattattaattgttattttttttaaaaggaaattcaactcatgacttttccactttcgttcttccttaactgccaaactcatcttatatctacttgaaatattgtattgtaagctaataaaactctgttcgttttctgattttagtcaaacataaatggttgttttgttctactataaaatatgatatagtataaaaagaaactgtttatgaatcagagtgaaagtatgctatgca

SEQ ID NO: 124368 - DNA, 1006 bp, Glycine max
  Clone ID: PAT_MRT3847_83310C.1
ctctcttcccccaaacgcaaagatgcaagttccattgatcgacaggatcaacgatctccaagtgggtctgaactctctgcagaacccatctttcccttctcagatcacaacctccctcgcttacaatttctgcaaatggggcgcagtcattctcgcccttgtcgccaccttcggcagcataatcaacagagtcaccatcttcatcatccacttccgcgccaaagccccttctctcccatccctaaaccttaacgacgacgatttttacacctcctctgacgacgaagacgacttccaaaacgacgaggacgacgacctaacctactcctcttccgagcccgaagacgagccctccgcgtcttccagcttcatccgtttggaagactatttccgaatcagaggaaccgataacctagacgacgagtttcagactcaaaacggcacgcacaaacgatgtcgtagcatcggggatattttttcgctctcggaactcgccaacagcaagagcgtggtcaagctctgggacagcataggcttcgggctggggttggatttcgatgattacgatggttacgaagtgagtagcgcgaagccgttgcaggcgccgacgagctccacggcatctcccgcggtggttgtctcggcgggggaaggcgcgtacgggaatctggcgctggagatttgggacacgcgcctgcggcggcggaagccgacggtggtggcggagtgggggcccaccgtgggaaagaccctgcacgtggaatctggcggcgtacagaaggtttacgtcagagatgacgggcgttacagcgtgacggtcggggacatgagaaaggtcagcacgccgttagggaacgtaacggaatctgacgcggatacttggtgggatgcggacgctattgttgtttcggacgagtcttttggcgaacagcaatcaatgttgcaacaaccaacttgaataataatggcagttccttttcggtgctggaaatataataataataat

SEQ ID NO: 124369 - DNA, 543 bp, Glycine max
  Clone ID: PAT_MRT3847_83311C.1
aaaagagttcgcttcagccggaagcggtttagtgagaaacaagcagaacaatggtgggctgagaatcgggcaagagtatatgaacaatacaacgtgcacatgattgacaagtcgacaattggcgttgggagtgaggacctggctcattgatgtgatatcctgtacatgaggatttttaacccgttttggcaggacctgaagcaagaatgtgccatgaattatatttggctttcatccaagataaagcatcaagggaagctgggattggcataataggagagaatagggatttgattgtgattttgtaattccactttcattttttttctttctaatttgattacacttttcattttttttccctatatgtagcttgcgtgggggttgagggtgagaaatgtaaattcgtggtaggttattggctcttgtttaaagtagctgcaatgtaaatttcacaagcaaatgcattcactaatttttcttttacaccagttatataataccttaagccatgggatagatggctttaagtagttaatataa

SEQ ID NO: 124370 - DNA, 518 bp, Glycine max
  Clone ID: PAT_MRT3847_83312C.1
acccggggatcctctaccagtcgacctgcagataccctacttttatcaattccttctgattagttttcctattgtaatatatttaattaaattatatactaacaataaaaacatgcgatcgttgtcacctaacaacagttgcagagctagaaccttgacccataaaaattattatttatttgcaattaatttgtatgtaatattatgtgtgtgcgcgttaaaatgttgttgtagattatttaagaagtggtaggaaaaactattttacatttacttaatttgaactccaacaaaaaatatcattaaaatgaagagttaaatttcataaaaaaaaaatgtatgatccatagacagaatattttgatataaaaaaataatactagtaatatgatcacacattcaattaaaaatcattctaacaattgtactgttagtacatcttaattaaattctgtaatttgatatccatattcgaatgaataaaaaacacatgtatgtgaggagaagttaacctcata

SEQ ID NO: 124371 - DNA, 187 bp, Glycine max
  Clone ID: PAT_MRT3847_83313C.1
cttccataagaccactttaagttaccactacaaacagacaacagacgtggtttgggagaacatcatagaagggcgtaatctcttaatctcttcttcttcttcctgctcttgatacagactatcacatggatctgacttaattaactgcagatcattaataatgtcattactattaatactcttaagt

SEQ ID NO: 124372 - DNA, 331 bp, Glycine max
  unsure (1)..(331): unsure at all n locations
  Clone ID: PAT_MRT3847_83314C.1
tttttttgattattctttggggagaggcagtaaggataaaatcgaaatgacgggaccgaacccagaggaaaatcctgaaactataaagagctaaaacgccaccttcccagaaagaaatcagaatttccaaagaaccagggaaccattttnttcaatgccaacgggaaatccaggcgcacattccaggaaaaaccctctttgcacgactagaccatccaacgggcggcactcaaaacacatggaacccccctgccccagagagaggccggcactgaccaaccatgacgggaccccctaccttcacacggacggcgggtgacttatgagcagg

SEQ ID NO: 124373 - DNA, 514 bp, Glycine max
  Clone ID: PAT_MRT3847_83315C.1
ggctcgaggttttagacaaatttttgttgtgactgccgccactggaaaagtggctgcaatttgtggttaaatatcacagagtttgtgtgtcaaaattgggtggagcacagctgcttttctgaggagtggtggaattttcttactttcctggccaggcagaaaaagttaaggagaaagattaggtggcggctaataggagaaagactaggtttcttacttgcatttgctttttggatcagagtgggtattggacatgcacctttaattggccactctccaacacaaacaatattaatcaaatataaaattctatttttgctgtggagggtttccccccattttttataattaatcatatatcatatattattctattataaaaatataaagtactctatatttaaaaatgttaatacatagtattatgtattatatgatagggacaaatatataacatataatataatatgataacatataaatctatataatcagaatgcatataaataaaaga

SEQ ID NO: 124374 - DNA, 385 bp, Glycine max
  Clone ID: PAT_MRT3847_83316C.1
tcctcaccatttcctcaacgcttctccttccctcctcaagcgttccctcatgattcagcttccttagtatacccatattctgaaatcagctgtgtttatcgagctgactccatatgatcctgactgctacttcattagcgctgcctctatctcatgattgatctatttgacaggctgtcttcgtgtttgtgctttccactggatctatcttggcctcatcttagatgtaacccgtccccctcatttctgccattgcagcgctgcagttgtcagacacattctgctacagtctcacaccttgagcattgttgacattgattcaaaaggaggtaggaaaatctcttctagtggtcgaatgcatcttgaccaacttgctgagcggatt

SEQ ID NO: 124375 - DNA, 418 bp, Glycine max
  Clone ID: PAT_MRT3847_83317C.1
cttcttgattttcttctgtaattctttagcttgatctcgattagatcgaacatttaccatgggaacatagataacaaaccttactatatgcaagccaacacattacccactctattctatacatcatggtttgagctgatcataatggatacaacgtacagtccgtatacactgaagctgcatcaattgaggatggaccgctcgatccaggaatctccattggtatgttccctatcatagcagtcatgatagggatccacatgtatgccaagcgagctggtctgtcaaatgaacacaacagttgaacccgccaacactagttaaaccttggtgaaaccccctagaacattatcgctcacggtgtttgagaccctctccatgtgcagcggaaggaaactctataggccgatgaacatat

SEQ ID NO: 124376 - DNA, 444 bp, Glycine max
  Clone ID: PAT_MRT3847_83318C.1
tcgcccttttttttttttttttttttttttttttttttttcaaaatgttgttttttttggatatttttgatattattaatccatttcactgttgtccaaaccaaaatcatcaccccggacagtgacaggaaaattggggaagcctatcctaaagaagaaaaaaactctttttgagcggtgagaaaccatacacatggtccttatatataaaagaacaaaaacagggtatccttatcacacccattttctgaggaactctacaaaaatatggatgcttactggtaactctatttaaaccttttccagggcaagcctttggtactttttctcgggacccaacccgaaaaggggggccggctcctgcacgacgtagacgaacctgagagccgcaaagaagggaggttacgtttccggagaagcaacaaaagcaaactcgactacccc

SEQ ID NO: 124377 - DNA, 404 bp, Glycine max
  Clone ID: PAT_MRT3847_83319C.1
cggtcgacccacgaatccaaaatttgcttcctctgtttccattcattcttcttcattttggtgtcttcttcagttctacttttttcttttgttttcggttgagttttagagctgctgagggcttccatcttcattttattttttgcgattttggtttgggttctttttctttgattggtctgattttttgtggttttatttttggaacaggctacagtaacaacgacaactttggcatagaagttgtcggaaaagttaagaagaagatagaggtcaattatgggaacctcatgtatgggctgatgaaggagtatatccaacataactgaaatgtcctgtctgatccctttttgccaaagagtgctgctgacactggaggaaaaacatctaccttatgaccccaa

SEQ ID NO: 124378 - DNA, 365 bp, Glycine max
  Clone ID: PAT_MRT3847_8331C.1
gcttgtcataacatcaccattactgatggtattgacaaaactagtgcgagctttgcaatttagaaaggtagcagattgtgattttctcaagagaaactttaagcagatgtctaatgttttgtgggtggctcttgaggacaaggtgagtttatggtcacaactgaattacgactcttcccaacatttgaacatgcacgaggcttatagtttcaatctagaaactgtttcaccctatttccacatgttcaacttagtaactatcgtctgaatagaccagatttgttttagcaattgtttatcactattaaaatatttccaaatgcacttatcttttgttgccctcttgtaagcactttctttgtaaa

SEQ ID NO: 124379 - DNA, 518 bp, Glycine max
  Clone ID: PAT_MRT3847_83320C.1
ggcccgaaagagcccaaaaagagacttttaaaaatttaagggaccccccttgggttttagtcaaaaacttaagaaactaagctggggaaaaactatgaaccaaaaattctacataaattttacataaggcctacattcaagtcctaccccaaggcttggaagcttcaactaacccccctcacaaagggaaccctaacccataggggcggggggggggaagcagcaacaaattacaggggtccttggaaccaaaaccaaaaatttttttttctcaataatggggggggatgccttggaacattccaccaggagggctccccatcggaatctggggctgggggggatggccccataaaggggggaagcctttctgggagccttcaggggccccccccccagtgcgggggggccccctcccaccataataaccaaaaaccggcccgcccatttgggaataaccatatccaggggcatacccgccagcaccgggaacgggaatttgttttttatacgggggc

SEQ ID NO: 124380 - DNA, 375 bp, Glycine max
  Clone ID: PAT_MRT3847_83321C.1
cccacgcgttcggtatatctgatgcaaacatcattacaagtatgtcgaactctgtgacgccacttatcgacttacatgacaaactactatatggcgaccaggtgctctttctaggacatgggtatagaggcgtatgtatgtcatatccagtggttaacaaagtccaaggagaacaacaaggacaacttgtgcgactcggcctgcgggaaacactaccctctgattgtcggtttggagctgccacaattcatgaaagacaaccaataccttcttggtcttacagaggcaattggcctttgaagcaagctttctttagcctctttcgatggcataacgaaaccctaaatgtttggactcattaaattgggtttttac

SEQ ID NO: 124381 - DNA, 289 bp, Glycine max
  Clone ID: PAT_MRT3847_83322C.1
atgggagattttttactatgattaagctgtataccatgtttttaaacgagcggcacatgaagaatgttaacttctgtacaccctaattatgcaacttttaatggctaagttcatgagctagattacatgagattgcaagaaagcaaaattttgaaaattacatgctacaaagctatatttaatcctacatcttttaaacactgactcctagtgaaaaactcggtctgacaagcatgcagaaagggaaacctatatcggaattctataacatccttttagcgtcttacat

SEQ ID NO: 124382 - DNA, 222 bp, Glycine max
  Clone ID: PAT_MRT3847_83323C.1
tgtcattgaagccattcttgcctcatacttctctttcaacccaagtctcattctccaacatatggcttcctttggagaacaacactctacccaatatccaaccccagagaggcctaaacacaaactttcacaacatgagaaaaaaccactttctgcatacatctgtcatgatccaagaagctatggttcatctaagcacaaggcagagaaaggcacaacaca

SEQ ID NO: 124383 - DNA, 920 bp, Glycine max
  Clone ID: PAT_MRT3847_83324C.1
gctttttaatttttccgtccggattttatgttgaattgtaaggggaaaacaattttttttagggcaggggtatggtatttcctttggcaagcctttatttaaatcgccttaacaaaaggtaagatggctcccctgaagggtccggtgattaaatttaatggtcggggtagaccaaattaataggggggcgcccccccctttttttttttttttttttctttttttttttttttttttttttttttttttttttttttttttttttttttagtttttgtattttgtaaaccttcttcattataaataagagtatttcatgtggtctgataagacaatacaatattactgtaaaacactattacactatggaattaagggtgttacttatttgatcagactcaacttgttccaacaatgtaggtacgacaaatataattaatattgaccttctatatagtaagcagcagccgatgttcccttctttaataaagagaggttgattttttctttatcttttgtttctgaaatcaggacatgacagattcttgttcctattcactgcaagctacttcgagttcggactctataagcatttgccatcggactttgccttcctgataaatcttcttcataaccaacaaccttgccaatgtccaaaagatataaaacctgagattctgtttgtgtttccattcactgcaagctacttcgagttcggactctatctataagcatttgccttcctgataaatcttcttcataactaacaacctgagattctgtctgtgtttcactaaaaccatcatatattcctgctcttctgtcttcagaagcctccccattatcatcttttcttccacttctgtttaaccagtgtttagataatccaaagacagtatgaggattggaattatcttcac

SEQ ID NO: 124384 - DNA, 1634 bp, Glycine max
  Clone ID: PAT_MRT3847_83325C.1
aattcggctcgggctttctctcagttccggtacgacattacataactctcagtttctcgcgcttttctggaaacaaatacctgatgtccctgatcccatcctttaccctttaccctttacccaggaatcattccatttcccaccaattaccactctcacactccgagccaacattaaccaaaccttattcccttcctttcctctctctctctctctcttgaaaaataatggaaaccactcaccattctagctttcatctgtcactgcccaggttgctgctgtcttctcggtcttccctttccagccacaccctagtcatcatctcaggcaatctttctttctctgcatgatattaatattatattcttttttctaataaatatcactactacacatcaatatcaatattcatcaatattattatgaaaagaaaaccctagtccttggaagaacgagaagaagttttcgttagcaaagctatccaagtagcatcatattagtctcaggctctgcaagatctaaagcagatccaagggtttaaagaaaagcatatcagatccatggatttagtttctgaatcaaaaaacgtcgtttcaaacgttacaaaccccagcagcaggtacaagatggagacagtacccaccccgaccaccacgaatcatccaacgacggcggcggcagtgtcgtcgccgtcttcgggaagcaacaacagcgggagcactactactccgagccgctacgagaaccaaaagcgaagggactggaacacgttctgccagtacctgaggaaccaccgtccgccactctccttggccttgtgcagcggtgcgcacgtgctggaattcctccactacctcgaccagttcgggaagactaaggttcataaccacccttgcccgttcttcggtctccccaacccacctgccccatgtccctgcccgctccgccaagcctggggcagcctcgacgccctcatcggccgcctccgcgccgcctacgaggagaacggaggccgtccggggaccaaccccttcggcgcacgcgccgtcaggatttaccttcgcgatgttcgcgattttcaggcaaaggcgagaggtgttagctacgagaagaagaggaagaggccaaagcctaaggtcactcccactcctacttaattgagaagcttgttgctaccaatgtttcaccacaggtatcaaatatgaatcgtatattattatatggtgtgtgtgtgtttttatttatttgattttgtgttttgtcctttgtatgttgatcctttatgatgggtttagtaaaccaagtcgtcgatgttttgtgctgctttctttttttttttgcaattttaaggtgcttttgttgtctctacgaagacgtgttgagatgatgatgccctttaaattgttctcgcttctggagtccggggaagtagatagtggtaattaagtgccaccaccctgccgccaactactactctagaagatatcttatcatatttgtactcaaattaatatataatatatcatgttcatcatctagtgtatttatgaagcatgcacttggatctctaccctctctcctgtacgtgagagctttttttcaaaatggtggttgaactttacagggggataatt

SEQ ID NO: 124385 - DNA, 752 bp, Glycine max
  Clone ID: PAT_MRT3847_83326C.1
ctttttttttttttttgtaatttcaaaacacagacaagataagcaaccaaaaatcacatcacatgcgagcataaaagtataaatgatgttaaagtttaataagatattctccctccagtccttatcataaggcctaaattagaagtggtgtttggttcttcttataagacccaatccataatgtcatgcattaattttttttcacaaaaatacccttaattatgaatcatttttctgagttcaataaatagtaaatgaaatacattaatgccttgggttctttggaagtttaactttgtctagtataaagagcattttcagaaccttactatgactattcacatgcatagccaataaaaattaaagtaataaatatattagtgatgaaagatattaaaggaattaaaactaataataatatttaaaaaataataataaaagtatgtctcattaatattagggataattttaaagaaaaacatatatttaagacaaacttaatactactaactaaactaactagttttcttaattattaattagataataaaaaagaatgatattttaggaggaaaaaaaagtgcagatggtataacattaatactactaactgaactaactaattttctgaatcttggtaaattagttaattgggtcttataaaaaaaaaagacaggagggagtataaaattaagatataaaaccaaataattattaattagataataaagaagaaagatattttagaaggg

SEQ ID NO: 124386 - DNA, 238 bp, Glycine max
  Clone ID: PAT_MRT3847_83327C.1
ggacctacgggccggtttttctctgtgcgcccgagggttttttcttggccacgtgaacgcgatgcgctaactcgatcactgtcgtgttgacagttacggcgtgcgggataacatcactcgaaggactgtggttcctcgtgcaagcaaacgcgcgcgagctcgtcgacgtgctgtataccggtggcgccgaacacacctggttgaaatgtaatcttcacacagagcaattccggcaggg

SEQ ID NO: 124387 - DNA, 542 bp, Glycine max
  Clone ID: PAT_MRT3847_83328C.1
attttataataatatcaaaaaaaattggcatgaaaaatataaaattataaatgtcagacaagtcaataaattttagttcatatcacccattgaaaaacattaatggttttttttataatgtttagtaaatggtatttcttggagcttgaacaaatatttaacttttaagtatatctattataacagaaacatgtgttttcaactaattcatgtggtagatgtttcccaaaaaataatgcacctcatttaggaaaatgttcgattttacaaagataagtattatttcttgtgaaacatttactgcacaaattagcacaaaacaaacatgtttttattttattggacaaaagctaaatgaaatgtattaaaaaaaatcttgattttgacataaattaagaaagtgtttatattgactaatgtattatgttatttatgttaatttttttttgtaaaacctaatattttcttaaaggaagagtattatttcttatcaaacatttacagcatgaattggcatgaaacacacaaagatatttagcaag

SEQ ID NO: 124388 - DNA, 436 bp, Glycine max
  Clone ID: PAT_MRT3847_83329C.1
ctcctttttttttctccccttatccctttttttttttttctaatttcatgttaatttcatgttcatagacttctaaattttctaaacctgagacttgggattcagtttttcacattatttgactttctttaattctctttccttctttcaactttcatccctcaagaaacatggaccggccaaggcggtaaatgcttatagctgaaaaatgcagcatccataatggaccaaatattaaagatctgcattaagtattttataattcttatgattcttaaggttttatttgtatgcatggaaatatgaattgcataccaattggactataataagaacaggtaaaagttttttttttttttacccttctagtataaatcaggaaatcaaaattcttatgattcttcaaggttcatatggatgatttttaaaatttggg

SEQ ID NO: 124389 - DNA, 333 bp, Glycine max
  Clone ID: PAT_MRT3847_8332C.1
attacccatactttctgccagtaaaaatgtttaggggggaacggtattcttatagacaaccatcattaaccaactatattttgtgtaccgttccaagattaattctctagtctattgcactgtacacaagactttcatgctctagaaccatccatgattggggcacccccttatccaatggcctcttctttacaaatattacctgaatgggataactgttccgtgtgccaaatgcttcgcacagtgcccaataagtgattgccacgcaatttgtatgcttgaggtgcctacatgaataataacattggccctttttgagagaatgtgaataac

SEQ ID NO: 124390 - DNA, 427 bp, Glycine max
  Clone ID: PAT_MRT3847_83330C.1
gggtgtgtgtgtgaaatttccttctccctgttgtttaacgtttcttcgtcttttttgtttttgttgataaaaaatggagggtgtgggttgttcggataagggtttcttcaatttgtttttgcgacctcttatttgtcttcaatttttgtaaagagttggtgtagaaggttgttctgtgttctcgtgtgtggctaaattttggagatgagtcatgcaaaagagaatgaggaagcagggcagaatgtacccttggctttggaagaaactcaacagtttgttgaagcacagattcaaccagaagatttggctgctcctgtgtccacagggggtacttcaaatcatgttgaaaacgggaaagtagaggtagaggcacgcgtggaggataaaattgtgaaaccagaagcggattcagagtgcattccactac

SEQ ID NO: 124391 - DNA, 713 bp, Glycine max
  Clone ID: PAT_MRT3847_83331C.1
cgcatgcgcgagtctcgtttgtgcgccgccacctcgagccgaatcggctcgagcctgtgtggtgcctggtgctttgactctcctcttcagtgtggcactgcgttggactcgtttggcaccgtcacgcgttccttgttcgaatttgaacttctgtgtggtgcctagtagtagtagcagcagcagctgagagaggggaccatggtttgctaaaagggataagatgatgaagcttgcaggatattccctggccgtttcatttgctcccataagttctaatgtcgttaaaagcaataaaagattcacggtaggtatatctcataggaataggtgcagctataggctgttttctactcatgcccagaaacaccaattacatgagaaacctggggtggttgccagataccaccttcctccttggtttagtgttgctccaatgatggactggacagaccatcactataggactctagcgcgcctcatatcaaaacatgcttggctgtacacggagatgcttgcagctgaaacaattgggcaaaagcaagacagtttgcacagagtcttggcaaactcgaaaatcactcatcccattggtcccctaattccaaagtgtaatatagaaaatctggctaaagcaactgagcttgctaatgcttattgctatgatgagatcaacttaaactggggggtgccctagtccaaaagttgctgggcat

SEQ ID NO: 124392 - DNA, 650 bp, Glycine max
  unsure (1)..(650): unsure at all n locations
  Clone ID: PAT_MRT3847_83332C.1
gtttttaagtgattttcatcataggcgtgatattatcatgccatgtaatttgtctcatacattggcagcacgcaccacttattgttgtgtataagtttcatagcatgaatatttggtttcttttgatggataggtagtagtagcagcagcagctgagagaggggaccatggtttgctaaaagggataagatgatgaagcttgcaggatattccctggccgtttcatttgctcccataagttctaatgtcgttaaaagcaataaaagattcacggtaggtatatctcataggaataggtgcagctataggctgttttctactcatgcccagaaacaccaattacatgagaaacctggggtggttgccagataccaccttcctccttggtttagtgttgctccaatgatggactggacagaccatcactataggactctagcgcgcctcatatcaaaacatgcttggctgtacacggagatgcttgcagctgaaacaattgttcatcaaaaggacaatttggacagattcttggcatattctccagatcagcatcccattgtgcttcanattggaggggagtatatagaaaatctggctaaagcaactgagcttgctaatgcttattgctatgatgaagatcaacttaaact

SEQ ID NO: 124393 - DNA, 405 bp, Glycine max
  Clone ID: PAT_MRT3847_83333C.1
ggaataaaaacgcccctccaaacaccccctttaagttttatacattctccaacaagaaatgctgtcaagagaataaaatctaacccctgctttgtataacatttcccgttcgttttaacgggaaatgctatctaaacccatttctcccctgattataaagggagaaaattcttatttgcttgggcaaacgggctcaaacatttttatctgggtttttttccttttctattcttttaaacagttttcatttaacaaaagggttaggggcctcaaggggatttaatgttattatttatatgaaccggaaactttccaaggaaaatccaatttaagctttccttaagacttttatttatcaaaggacaaaccttgagaaggaatgcccgcaaattatttttaaaggcg

SEQ ID NO: 124394 - DNA, 382 bp, Glycine max
  Clone ID: PAT_MRT3847_83334C.1
acgcgtgagaatacgaccgaacgctctagaggaaccaaacttacgtacacatgccatgaaaagcataacaatctgggcaaataccctataactacactagttgaccaatcattatacaacaatccatactctgacaaaccctagaccttacacaacatacatgtctaacatcacattcatctttcctctgctgacgtaataactaacaagccctaacagattccacttcactacagaccctcacacccaatttccaaaaggacttcctctggtccgttatcatgagacatacaaatatcttaatatcacctagatttacccggtaaattatccaactcttatcgcccatagcgtacgcactatatcatttgcttttgtcaca

SEQ ID NO: 124395 - DNA, 324 bp, Glycine max
  Clone ID: PAT_MRT3847_83335C.1
gaagaacttacagatcatcgatataggctgcggtcgttgtcgaggagatggtgtctgcgtcggtgagtggcgctgtgtctcaacgagtgtcatgctatttcatatttgaagactcgttgtagtattacgggaacaattgtcagcttcaatctttagcatgagctgattatttgccttatgggattgatcttggtggacctactggaagattctgcaactgctgaactactgctgacgctattgcctagctactatgatgtgacgatcatatttcaccgcatgccacagcacgaggtctagacatattgagcagtgtcaattatg

SEQ ID NO: 124396 - DNA, 161 bp, Glycine max
  Clone ID: PAT_MRT3847_83336C.1
attgttctactccacaacgaaaaaatactgtatattgtatccatggggggcaaataggcttgttataaaggagcaggaattgacagccttttttaaaagccgtacaactactaacagtggtgtgtgttacccttaaagaatttaggccagttatctttgcc

SEQ ID NO: 124397 - DNA, 745 bp, Glycine max
  Clone ID: PAT_MRT3847_83337C.1
attgctgtcttgtctgaagttatttcagcaatttttgctgaagttatgcaaggaaagcctgaattcactgaccatttgactcataaactaaagcaccaccctggtcagattgaagctgctgctattatggaacacattttggaaggaactcctattggagtctccatggataatacacgtttggctcttgcttcaattggtaaactcatgtttgctcaattctctgagcttgtcaatgattattacaacaatggtttgccttcaaatctcactgccagcagaaaccccagcttggattatggattcaagggagctgaaattgccatggcatcttattgttctgaacttcaatatttggcgaatccggtgacaagccacgtgcaaagcgcggagcaacacaaccaagatgtgaactctctggggctgatttcatcaaggaagactcatgaggctattgagatcctcaagctcatgtcctccactttcctggtcgccctttgccaagccattgacttgaggcatttggaggagaatttgaagaacacggtcaagaacgttgtgagtcaagttgctaagaggactctcaccacaggtgtcaatggagagcttcacccttcaaggttttgtgagaaggacttgctcaaggttgttgatagggagtacacatttgcatacattgatgacccctgcagtggaacataccctttgatgcaaaagctaaggcaagtgcttgtggactatgcat

SEQ ID NO: 124398 - DNA, 2439 bp, Glycine max
  Clone ID: PAT_MRT3847_83338C.1
atattattctcctcattccttcatttttaaacctagctccatctccctccactcaccataacatggcatcagaagcaaatgctgccaacaccaacttctgtgtaaatgttagcaacaatggctacattagtgctaatgaccccttgaactggggtgcggcggcggaggctatggctgggagccacctcgacgaggtcaagcgcatgctagaggagagaccctgaccatctcgcaggtcgcggcgatcgcggcccacgaccagggggtgaaggtggagctggcggagtcctccagggccggtgttaaggccagcagtgactgggtgatggagagcatgaacaagggcactgacagctacggcgtcaccaccgggttcggtgctacctcccaccggagaaccaaacagggcggtgccttgcagaaggagctaattaggtttttgaatgctggaatatttggcaatggtacagagtccaattgcaccctaccccacacagcaaccagagcagctatgctagtgagaatcaacacactcctccaaggctactcaggaatcaggtttgaaattttggaggcaatcacaaagcttctgaacaacaacattaccccatgtttgccacttaggggaacaatcacagcatctggtgatcttgttcctttgtcctacattgctggtttgctaactggtagaccaaactccaaggctgttggaccctctggtgagattctgaatgccaaagaagcctttgaattggccaacatcggtgctgagttctttgagttgcaacctaaggaaggccttgcccttgtgaatggcactgctgttggttctggcttggcctcaattgttctatttgaagccaacatcattgctgtcttgtctgaagttatttcagcaatttttgctgaagttatgcaaggaaagcctgaattcactgaccatttgactcataaactaaagcaccaccctggtcagattgaagctgctgctattatggaacacattttggaaggaagctcttacgtgaaagctgctaagaagttgcatgagattgatcctttacaaaagcctaaacaggaccgttatgctcttaggacttcaccacaatggcttggtcctctaattgaagtgattagattctctaccaagtcaattgagagggagattaactcagtcaatgacaaccctttgattgatgtgtcaaggaacaaggcacttcatggtggtaacttccaaggaactcctattggagtctccatggataatacacgtttggctcttgcttcaattggtaaactcatgtttgctcaattctctgagcttgtcaatgattattacaacaatggtttgccttcaaatctcactgccagcagaaaccccagcttggattatggattcaagggagctgaaattgccatggcatcttattgttctgaacttcaatatttggcgaatccggtgacaagccacgtgcaaagcgcggagcaacacaaccaagatgtgaactctctggggctgatttcatcaaggaagactcatgaggctattgagatcctcaagctcatgtcctccactttcctggtcgccctttgccaagccattgacttgaggcatttggaggagaatttgaagaacacggtcaagaacgttgtgagtcaagttgctaagaggactctcaccacaggtgtcaatggagagcttcacccttcaaggttttgtgagaaggacttgctcaaggttgttgatagggagtacacatttgcatacattgatgacccctgcagtggaacataccctttgatgcaaaagctaaggcaagtgcttgtggactatgcattggccaatggagagaacgagaagaacacaaacacatcaatcttccaaaagattgcaacatttgaggaagagttgaagacccttttgcctaaggaagtggaaggtgcaagagttgcatatgagaatgaccaatgtgcaattccaaacaagatcaaggaatgcaggtcttaccccttgtacaagtttgtgagagaggagttggggacagcattgctaactggtgaaagggttatctcaccgggtgaagagtgtgacaaagtgttcactgctttgtgccaagggaagatcattgatccacttttggaatgccttggggagtggaatggggcacctcttccaatatgttagtttttcttattttctgttttcttgaagagtggtttcttttctgtacacgtgtttgtgttgatattaagcatttggtttgtctatataaggctgtggcaaatcaatccacatacaacaacttcccagttttccttgatgtatgccatgcaaggaacttgtaattcataatgtaatagaattccatttgtttgccgtagctttgcgtgcaaatatcaatacatggccttccatgtgaaggatgttttctcttgaat

SEQ ID NO: 124399 - DNA, 404 bp, Glycine max
  Clone ID: PAT_MRT3847_83339C.1
caggcataaaaaactggatttatggggtatactaaaagagaataactggccaataaaacttacccatatgaggcctaaagacaagatttgtcttttaacaagacaaaatatttcctacgggaaaggggcataacattggggtatcccatctaaaaaggaaaaaaccgcaaataacatatggctaaaagcaccgttcttatcaaaggggaaaaaaggttggaatcccatccaacaaaaatcaggcgattaaaacccatttaaaaaggcgtaagggaaaaaaagttttaaaaacaggaatcggggggaaagcaactacttttagcccattgcctcaatcttggggccggccccatttccaccagaggggggagcgggatactaatcctttgttgcaccaacaccac

SEQ ID NO: 124400 - DNA, 542 bp, Glycine max
  Clone ID: PAT_MRT3847_8333C.1
cccacgcgtccgttttatataaaaaaaaaaaaaaaaaaaaaaaaaaaaaaaaaaaaaaaaaaaaaaaaaaaaaaaaaaaaaaaaaaaaaaaaaaaaaaggaaaaaaaaaaaaaaaaaaaagggggggccgcccaaaagaaccaaagctaacacccccgggcaggcaaagaaaaaactttttaaaagggcccccaaaataaaaaaaacggcccggaaaaaaacaacggggaaacgggaaaaacccgggggaaaccaaacaaaagcccctgggagaaaaaccccctaacaccaccgggcaaaaaaacaaaaaagcccgaaccaaagcccctaccaaaaaggggcccaccccgaaggggaaagggaacccccccggaagggggcaaaaaaccccgggggggggggggaaaacccccaggggaaaccgaacactggcaaagccccaagcccccggtccatggggaagaacccctactttacccgccaagaccgcagggtagccccccaaagccgaaaagggggggcccccttaaggggcccaaaaa

SEQ ID NO: 124401 - DNA, 723 bp, Glycine max
  unsure (1)..(723): unsure at all n locations
  Clone ID: PAT_MRT3847_83340C.1
ggctcgagagcacattgaggtcttcaatcaccaaaaatggtaaccactgtggcttcttacaacgtcactccatatcaaccaactcccaatgatcctttatggctatcagatagcgaccaacttggggccctaggccatgtagccaccatctacatttacaaagcaaaacccaacagcgacaccattgagaggttgagaaactctcttagaaagcttttagtgtactactacccagtagctggcaggttgagcttgacaaaaagtggtcgaatggaagtgaattgcaacgcaaagggagtgacgttgattgaagctgaaacaacaaaaacatttggtgattatggagacttttcagcatccaagtcgaccgatgaacttattccaaaagttgatgatactcaacctacagaagagattcccttactgctactgcaaataacaaggttccatggtggtgaaggcctttccattggagttcttttctctcatcctttgactgatgcgactggcctgattcacttcatgaacagatgggcaaagctgactcgaggagaagaactaaaccctgatgaaatgccatttctcgatcgaacactactcanattattaccaaatncagcatcagttccaagcgttaaactcccagagttgaagcctgcaccacanacaccaggaaaagaacagaagaagaaaagtgctgcattgctaaaactcacatcaagc

SEQ ID NO: 124402 - DNA, 2879 bp, Glycine max
  Clone ID: PAT_MRT3847_83341C.1
tatgctcggaattcggctcgagtctctctctacaaaacttagctctgtttttaattattccttgcattctcttgtattaagatggaagcaactaccatcaccaatgggagccaaaacggttcgttttgcttgtccactactaagggatgctttctgtttctctctacaaaacttagctgtgtttttaattattccttgcattctatcgtattaagatggaagcaactaccatctccaatgggagccaaaacggttctggttccttctcttcatgcctaattacaatattattctcctcattccttcatttttaaacctagctccatctccctccactcaccataacatggcatcagaagcaaatgctgccaacaccaacttctgtgtaaatgttagcaacaatggctacattagtgctaatgaccccttgaactggggtgcggcggcggaggctatggctgggagccacctcgacgaggtcaagcgcatgctagaggagtaccggaggcccgtcgtcaagctcggtggagagaccctgaccatctcgcaggtcgcggcgatcgcggcccacgaccagggggtgaaggtggagctggcggagtcctccagggccggtgttaaggccagcagtgactgggtgatggagagcatgaacaagggcactgacagctacggcgtcaccaccgggttcggtgctacctcccaccggagaaccaaacagggcggtgccttgcagaaggagctaattaggtttttgaatgctggaatatttggcaatggtacagagtccaattgcaccctaccccacacagcaaccagagcagctatgctagtgagaatcaacacactcctccaaggctactcaggaatcaggtttgaaattttggaggcaatcacaaagcttctgaacaacaacattaccccatgtttgccacttaggggaacaatcacagcatctggtgatcttgttcctttgtcctacattgctggtttgctaactggtagaccaaactccaaggctgttggaccctctggtgagattctgaatgccaaagaagcctttgaattggccaacatcggtgctgagttctttgagttgcaacctaaggaaggccttgcccttgtgaatggcactgctgttggttctggcttggcctcaattgttctatttgaagccaacatcattgctgtcttgtctgaagttatttcagcaatttttgctgaagttatgcaaggaaagcctgaattcactgaccatttgactcataaactaaagcaccaccctggtcagattgaagctgctgctattatggaacacattttggaaggaagctcttacgtgaaagctgctaagaagttgcatgagattgatcctttacaaaagcctaaacaggaccgttatgctcttaggacttcaccacaatggcttggtcctctaattgaagtgattagattctctaccaagtcaattgagagggagattaactcagtcaatgacaaccctttgattgatgtgtcaaggaacaaggcacttcatggtggtaacttccaaggaactcctattggagtctccatggataatacacgtttggctcttgcttcaattggtaaactcatgtttgctcaattctctgagcttgtcaatgattattacaacaatggtttgccttcaaatctcactgccagcagaaaccccagcttggattatggattcaagggagctgaaattgccatggcatcttattgttctgaacttcaatatttggcgaatccggtgacaagccacgtgcaaagcgcggagcaacacaaccaagatgtgaactctctggggctgatttcatcaaggaagactcatgaggctattgagatcctcaagctcatgtcctccactttcctggtcgccctttgccaagccattgacttgaggcatttggaggagaatttgaagaacacggtcaagaacgttgtgagtcaagttgctaagaggactctcaccacaggtgtcaatggagagcttcacccttcaaggttttgtgagaaggacttgctcaaggttgttgatagggagtacacatttgcatacattgatgacccctgcagtggaacataccctttgatgcaaaagctaaggcaagtgcttgtggactatgcattggccaatggagagaacgagaagaacacaaacacatcaatcttccaaaagattgcaacatttgaggaagagttgaagacccttttgcctaaggaagtggaaggtgcaagagttgcatatgagaatgaccaatgtgcaattccaaacaagatcaaggaatgcaggtcttaccccttgtacaagtttgtgagagaggagttggggacagcattgctaactggtgaaagggttatctcaccgggtgaagagtgtgacaaagtgttcactgctttgtgccaagggaagatcattgatccacttttggaatgccttggggagtggaatggggcacctcttccaatatgttagtttttcttattttctgttttcttgaagagtggtttcttttctgtacacgtgtttgtgttgatattaagcatttggtttgtctatataaggctgtggcaaatcaatccacatacaacaacttcccagttttccttgatgtatgccatgcaaggaacttgtaattcataatgtaatagaattccatttgtttgccgtagctttgcgtgcaaatatcaatacatggccttccatgtgaaggatgttttctcttgaataatacttatttgtttctttatgctagcgattagctttgagaagatgttttacatttttgtaattaaattttcctactggaaattgtcaaatacagaattagattcaaatttttgtaattcgtgac

SEQ ID NO: 124403 - DNA, 207 bp, Glycine max
  Clone ID: PAT_MRT3847_83342C.1
ccgcgtccgtttccgtcttgtgttttttttcttttaatatatttgctatttccataatgatgctatatattctttctccgattatcatgcccttattttcattcttatttttattttttcatataccacaagagcgaagttctctcacgaggaaaaaaacagctaataatggggtcgaagtggatgaggttgatattacactttgca

SEQ ID NO: 124404 - DNA, 1111 bp, Glycine max
  Clone ID: PAT_MRT3847_83343C.1
ttacggctgggagaagtacggctgcgagaagacgacagaaggggacaaaccctaactttcgagttctctcatctcgcgcggttctctccgttctcggcgccggtgccgccgcgtctcgagactgttcgtccattgcacggagccacggagcaattccgtcgcactctaagcctgcagcttcaacacgccgtcgtacctgaagcagttccgtcggactcacgccctagtctctgcatctttgtttttcagtgatgggaaagatgcacaagaataggaaacaagctggtgggcatggaactccaagagaagaaaccgatatgcaggaacaagaaatggacataaggaagattatgaaagatgtggaaaattttagctactcacatatgtcatggaaagaacgcaaaaagattgaaaatagaaatgttgtttctcttggtgggaagccccaaaagaatcagagattacctttaagtgtggcacgactaatgatgaagaaacaaaaggagagggagcagaaaatgcttcaagagcgtttgattcttggacaatttgggggaaagcttggtggtagcagtaaaagatctgctgggaagcacaagccaggaaacaggggtctgaaatcaagcgaaggtcattttagaaatggcatactcaatgtgaagcatttgttaaattcaacagcatcaagagatcgtgaaactggaaccaatatgtccaatacatggaaagggaaaggtggtaagaagaaaaatggcaacaagggtgctggtggtaagaagcaccgttcagcgcatccttgtgaataacgtgttttgggaatatggaggagtcctttttaatatgtatgacccttgggtaagcttttcagttttgacagagagtgaaatggatagaatagaaaacaggacaataatgtcttgtgtattctgataattataaaatttgaacaagaccttgtgtcttgttttgagtttttgtgcttatcaaacccactaggacattcggcgtagtacaatggaataatatatattcttgtcctgtttgaagtgtagttgttttgagttgtttaacctttttccacaatatttcacgtaacatagcttgcgatttc

SEQ ID NO: 124405 - DNA, 823 bp, Glycine max
  Clone ID: PAT_MRT3847_83344C.1
ggagtcggaccagccaccagtgatgggaaagatgtgcaagaataagaaacaagctggtgggcatggacctccaagagagcaaactgatacacaggggcgggaaatggacataaggaagattatgaaagatgttgaaaattttagctactcacatatgtcatggaaagaacgcaaaaagattgaaaataggaatgttgtttctcttggtgggaagccccaaaagaatcagagattacctttaagtgtggctcgactaatgatgaagaaacaaaaggagagggagcagaaaatgctccaagagcgtttgattcttggacaatttgggggaaagcttggtggtagcagtaaaagatctgctgggaagcacaagccaggaaacaggggtctgaaatcaagcgaaggtcattttagaaatggcatactcaatgtgaagcatttgttaaattcagcagcatcaagagatcgtgaaactggaactaatatgtccaatgcatggaaagggaaaggtggtaagaagaaaaatagtaacaagggtggtggtaagaagcaccgttgagcacgtccttgtgaataacgtgttttaggaatattcaggagtcattttttaatatgtatgacctttataaatctagtatgacccttgggtaagcttttcattttgacagtgaaatggatagaatagaaaacaggacaattatgtcttgtgctttctggtaattatacaatattaaactttcatctgtcattttatgattatatattagtttataattattagaatgcactgtatttttggttcatacagaaattcttaaccttttgt

SEQ ID NO: 124406 - DNA, 428 bp, Glycine max
  Clone ID: PAT_MRT3847_83346C.1
gcattcgctttttctcataagtaaaatattaactttatgagcgtatattatttatcaaaggccttcatggccaggcacagacattctccacacaattaagacataagttaaatatgacccttgaaccttaaatcatcactccccaataaaaaaaacatggttgtgttttctatatgcgatgatttctagcgcagagatcctataaagcatttcttagtgctccccaccggaagcacagcctaggccattcattgcagtggatggactgcatacctcccccctgcccttgaatacaggtctgttgatcacttctttaaacctgaatggcttcacgccgcttgatatgtcgaggccgtggactactgctaccgggttgcactatccgattacctatactgaggcctggaacttatgtttgcaccaacaaa

SEQ ID NO: 124407 - DNA, 511 bp, Glycine max
  Clone ID: PAT_MRT3847_83347C.1
accagatagcattgaggctactgtatctgatggcattcaacttactcctccaggacttgatagtgtgttaagtgtcaaacgtcagcaatatgccatgcattgcaatcctatacaagaagaaataaaactgagagttctggagaaactgagctgtgtgtaaaggcaactaatgatgggagaattcatgctgtggtctcttggtgggtacttcaacttgatcgtgaagggaccatctattattccactgctcctaggtggataagctcaccaacaattacaagtcctgttggttggtgtgaccactggaaacagtgtgtttggtttgttcccagcagtggtatttccatattcaaaggggaagaaattcatttacatgctactcatactgagacaagtatctcatataatttagatactcaagtacctacatctgagattgtgaaccataggtgtatgactggagatttgcagcttgtactgccaccagaaagggttgcaatctatggagaca

SEQ ID NO: 124408 - DNA, 361 bp, Glycine max
  Clone ID: PAT_MRT3847_83348C.1
ggcagagaggaggggttgtggttgctgtgcatgaggatttggggttgcttagtcagaggttgaagaatcatgtctttgctcagagtgttagcattcgaggaaccgccgatgaagagcatcgtacagggtatacgcgtgtctctagtcgccatcttggtgtgagagacggtatcaggcatttcacgtcggcgtaccacatcatcactcaagcactcgatggcactcaaattcctgagcgagacttctgaagagcatatgcatgtcaatgtggatctacatcgggcacctacagttcagcgcttatcctcgcacaccttggacttcatcactctacccgttgtgtcaggcgccccttgcctgg

SEQ ID NO: 124409 - DNA, 309 bp, Glycine max
  Clone ID: PAT_MRT3847_83349C.1
acgcgtcaatccggacgtccgccgacgcctcaggggaatcctccgtgccgctccgagacacccacagattgtgcgcttatgcagtgaagaagcttggtcatcttaaggatattgtttcagcaggctgtctactctgctcaggcttccttgactgtgcttttcaattgcttgctcttctatggtgtgaccgggcccgttttactggccgtcgtttttgatcttcgtgtactgtgaaatcctgccgttgagcaccatattcaccgttctgtagatctcccttccagtttctggagtcagttccaataggcc

SEQ ID NO: 124410 - DNA, 485 bp, Glycine max
  Clone ID: PAT_MRT3847_8334C.1
ggggaaaacaccttttcgagctcaatcaccaacgccctttattttcatgcctatgccaacaccgctcgggagagaagacatagtttcattcaattaagcattactgttagataagtttttccccggccataccccatacgtagagggaacccttttaaagttaactaaactggagttttgcaaaaaactttcaggctctgatggtaaagcatttatgacaataatgcacagggaaatgaccaatttgatttgcccatggtgcgaaccccaaactatttgagggggttacttcctagctgcataggaaaagtcctgaggattgccctaaactggctgtgtgagtatgacctaacctaaattataaacattatccccaaaagggaaggttaaaggattactcggggcaaaactctcaaagttctctagtacccaatgatgtttaatggcggcggctagcgaatacctatggggggggggacaaaggt

SEQ ID NO: 124411 - DNA, 246 bp, Glycine max
  Clone ID: PAT_MRT3847_83350C.1
gggaaaaggaaaatgaagaggggttggctaaggaaactggattctattgcttgttttgttcataatcatgggtttgatgaaactaaatgcaaagactgtgattcagtggataggagtgggatacaaagagttcgagttcattcgtataggaagcggtttaaggagctttcctccctttacaccgaacaggagtttaaagcacataaaggtgttattttgacaatgaagttcagtcttgatggaaaa

SEQ ID NO: 124412 - DNA, 357 bp, Glycine max
  Clone ID: PAT_MRT3847_83351C.1
gaaggcggcatacatattaaaaaaaaaaaaacaagcggggataaaatacaccttccacaaagaattcatttttttgaatccacccccaaggaaaagcaaaaaacatacgattactccaaccaaataaaaataaaccacctaccgaacgacgacttatgattcttccagctcaccaaaaaaatgcacgaagcccaaagtaaaaaaaaaataatgcgcgggaaaacaccattaacaaacatttttttttttacaccatacattactcgacaaccacccacgaggaaccagcaaccttccttgcttttattactgaaaaaataatgctcaaaacaacccaccattcaaagatgttttttc

SEQ ID NO: 124413 - DNA, 511 bp, Glycine max
  Clone ID: PAT_MRT3847_83352C.1
acctccaaacatcaaattatcgtacatacagcacaaggaattgcctgtgaatctcaaccttcctttgagggtcatcatacgtggcaaaacgaaccctgaagaccaatagtgcatacaccaggcataaacagcctactaaaaagtacacgaaccaaggagactccttgagagaatatagcgaacatgaatcggcggaaaaggccccatgttggccccaagccccccccctgaattctgagggcactaacgaaaggtggcggcaaataaggccctttcaaaatcctctagccacacatctatgcttgatgaaaatcttgcgtacccccacggcttgcgttgctatatcatcaccatacatactgcaaatttttcccaaccttttgcaaaagctttaccatgctctcaatcttgcaactatcgagagcatcctgctcttgcaaaattgtttgcaggggagcgcagttcatccctggccgtgcccttggcatcaccacacacataaatgccagct

SEQ ID NO: 124414 - DNA, 246 bp, Glycine max
  Clone ID: PAT_MRT3847_83353C.1
gctggctgagaaacagccagactgctacccccaggatccatctcccatttggctctagagcccttagatataggagccaggcctgcccgagccgcaagatagcagaactggagatacaggtactactcgcaaggctgatgcagaagtacaaagtgatcctggccccagagacgggggattcgaagactgtggtccagatagtactagttcccaataaaaaagagggcctgaagtgactgcagagac

SEQ ID NO: 124415 - DNA, 472 bp, Glycine max
  Clone ID: PAT_MRT3847_83354C.1
acgccctcatgctcggagactcggcatcgcggctcgagataggtctaatagtaaaacagaaactgcgactctgggactagtcaagatcaccgcttcttcttcttcttcttcttcttctacttctactactactactactacttcacctccacaagctgatgctcagaatggatagggctgccactgtcgactaccactaccacaacgacgacgatgcagactgtcctggtgccggcggaggtcgtggtcggcatagacttagaggtcgttgacatgcagatgcaacgctgcctgcgtacagcgatcgctaatgctaaggaaaaggacctgctcctggctgcatgcgaccctgagctctcatctcacgattcacgactcactgcttagtggagagagcgaataccgcatgcacagaggacttatgctgtatgatgctgccgactgtgagacccaggtgatgacctgggaatat

SEQ ID NO: 124416 - DNA, 356 bp, Glycine max
  Clone ID: PAT_MRT3847_83355C.1
ttgaatgtgttcccaggacctattcctgagaggaattaggtctacgcataaaggcttaacaaaattttaaaaaaagtttctgactgatgactaaccgcttaaaggttactacatacttccctatgttacttaaattgaatttacactcaggaaacacacttctttgggacccatacatgcaattgactacttggcaaatttatataccaaggaaagatttaccgcatgtgaagaagagtaacacactcatctctctgaagaaattattactactgtccccttacttatccttgcaaacaatacagatattccatatgcttgctctaaaaataatttctttaaccatcgggccctga

SEQ ID NO: 124417 - DNA, 170 bp, Glycine max
  Clone ID: PAT_MRT3847_83356C.1
tgagctctcgagacataaagttatagttcttttaaacttctgtcgctatatttgcttagattactgaacaggatagttccactcatagtgtccatgaaacttaagcatgacatgccggatgagcacttccatggctacgggagatccttctgcattctactatataaata

SEQ ID NO: 124418 - DNA, 1141 bp, Glycine max
  unsure (1)..(1141): unsure at all n locations
  Clone ID: PAT_MRT3847_83357C.1
ccacgcgtccganagaatcttgggtttatgaaaaatataaattatgggagactcatatcgtttgggaaagatatagctgagttacactcctccaagcttgagaggttggattttaggggtgctcttaagggtaggaaccttgcaaacacatctaactgtgatgtgtggacagagtaccatgacatgggtgttgaaggaatcaaagctgttacagattacaaagcttacacagccgattcaattttggatctgcttcattttgtcgcccccaagatgatgaagcgtggggatgctcatttttcttatgggattgctggtaatttggatgatcagaaatacaaacattacaaatattggtctaaccccttggaaacaagattaccaaatgctccagatatggagatttactctatgtatggggttgggatccctactgaaagagcttatgtctacaagttaactcctcaatctgaatgccacattccatttcagattgacacctcagcagatggtgggaatgagtacacatgtctaagggatggagtttacagttctgatggtgatgaaactgttcctgttttaagtgctggtttcatgtgtgcaaaaggttggcgaggaaaaacccgctttaatccttcaggaatccggacattcataagggagtatgatcatgcccctccagctaatcttctagaaggtaggggaacccagagtggcgctcatgttgatatattgggtaactttgccttacttgaagatattatacgagtagcagctggagcctctggtgaggacttgggtggagatagagtgcactctgatattttcaaatggtctgaaaagatcaatttgaagctctagattcacatggtaactggtaagttgactccttggccttttggcattaattgtgggcctcggcccaagtatagtctaacttggccaacttctttgtcctatcttaagtgaaaaattagattataaatgcttgaatcagggtaaatattttgatgcctctgatattcacgcaggatgtttgtattccatctcatgtggctagattactagtccaaacaaggctttccaccaatgtttataaaatgtactggagattgaactggttgtggttcaatttttagtt

SEQ ID NO: 124419 - DNA, 255 bp, Glycine max
  Clone ID: PAT_MRT3847_83358C.1
tttttttttttttttttttggggagaaccactctatcagcccaaatatgcttaacagcaggcatgcatggtggaggagatgacatgaattatccaataacaaaataaaaagccatagggtgttgtccacggcttgattaaagctgaacattataataattaatttccatttctttcttcaagaataatattttttttggtggtcttctttaagaagatattatttcaaaacatcttggtcatgcataacttttgg

SEQ ID NO: 124420 - DNA, 278 bp, Glycine max
  Clone ID: PAT_MRT3847_83359C.1
ctcacttcttaatgctttatctttctctgtttctaacgtttgtcattcttaactaaaaactaactttataatcattgaaatttcagaacttttttgcttatcctttatccttttttagcaataccaagggatgaatcatgtttggggtaaaattttctttcttgattaatatattgtgcttactatccatatccatgtccatttacactttgacttttatcaaaattgtaatttgtgtttcatctcatcagtttatgaaggggagaaatccttttaca

SEQ ID NO: 124421 - DNA, 270 bp, Glycine max
  Clone ID: PAT_MRT3847_8335C.1
cactcgtccgttcatgcattgcatccctttttatttttagtatgttttgggctttatagggaagttttgccaaatcattaggggttttaagatcatattgtgttgttttgcaacaatggctaatttctatgtttctatgatcttagcactttttgccatttccatactttaaacatatgttattactgcttaattaacaacttatgccacttgtataacaactatatctaatattgatatgtatatttcaatattttccaatgcccatca

SEQ ID NO: 124422 - DNA, 234 bp, Glycine max
  Clone ID: PAT_MRT3847_83360C.1
ggaggatgcagcaaacaactttgcccgtggccactataccattggaaaggagattgttgagctttgcttggaccgaatcaggaagcttgctgagaactgcacaagtctccaaggtattctggttttcgatgagtctggtgacggaactggctttggactaggttgccttttgctggaacgcctctcagtggactatggcaagaagtccaagattggtttcactgtcaatccttc

SEQ ID NO: 124423 - DNA, 282 bp, Glycine max
  Clone ID: PAT_MRT3847_83361C.1
tgcttctattatctgactaaagaatctacacatagggagggtttggcaaagcgagggcgagagagagacagcgagagagagagagagacagagagtgaaagggccggctatcgcggcgcatggtggcactggtatcgaccctaatctaacactcgagcgccaagaagaagccaaacaactttcaacgcactgccacaatattgcaaactatgctctaaattctaaggtaaacggcgtagacgatttcgaacttgtggcgagggacttgaaaacggaaccgtt

SEQ ID NO: 124424 - DNA, 177 bp, Glycine max
  Clone ID: PAT_MRT3847_83362C.1
tcagatgatgttgatcacgtttagtgcactcctcaggcttcactttgcattgtgcacagacatcaagcttctgatgacacacactcttcttcatattcttcttcatcatcgtgtgcttgttcggattgtgactaacatcatcgtgtacgcgagcattgctattgtcggcaatgtgtg

SEQ ID NO: 124425 - DNA, 211 bp, Glycine max
  Clone ID: PAT_MRT3847_83363C.1
gtgagactccaaataatgtgcaactgtgattattcttgcgtgaaactggaacgttagtgaaatatcagaacttgttcttttagccaatttccaagcgttcaataatgaaaagagactactcccgggacacactgctgaatattttagaacagattttactctgtgaggcgagggccatggctgctatctgacaatgctccctttcaagaga

SEQ ID NO: 124426 - DNA, 193 bp, Glycine max
  Clone ID: PAT_MRT3847_83364C.1
taacttctttttccttccaaattatataaactttttgtctcttctttcacaacttccattacacatagctactgcttcttttttattgctttcgtttacaaatcaatttaattttatttacacacatcaacctcttataatacgtctttcttcatcatacttcaaaaaacttttgtcccctcaattttaacac

SEQ ID NO: 124427 - DNA, 890 bp, Glycine max
  Clone ID: PAT_MRT3847_83365C.1
ggtggagcaaggattctccttgggagacttgcggattggcgactgattttgaatggaaaatgattgcagaacctgtgatgtcgctttatacagaagcaactgatggttccttcattgaacataaggaaagcgcaatggtttggcaccatcaagaagcggatccttattttggatcatgccaagctaaagagcttcttgatcatctggagagtgtgcttgccaatgagccagtagtggttataagaggacaacatatagttgaagttaaacctcaggtatacttaaattaaggcctaaacaattgaactgacaatgtgtgtttgcttcctcagacagaaagaaagattgttcattttaattgggattatagttgtttaccaaggtgaattttgtaatggtgattggttgaattgttgtttgttgtatgagttgcagggtgtgagcaagggtaaagtggtggaagaccttatctcaatcatgcgaagtaaggggaagtcaccagattttctactgtgcataggagatgatcgctcagatgaagatatgtttgaaagcattgctcgttcagcatctaatccagctcttcccaccataccaaaagtgtttgcttgcactgttggacagaaaccaagtatggctgaatactatttggatgatactagcgaagtaatgaagttacttgaaggacttgcaaccgcttcagcaccatctgcgtccatagcttctcaggaattgtgaggaacattatagaaactgacacagaaaaacaatcttgtacagaatgatactttcatagctggattttaaaaggtctatatttagaaatttacagattagctgattcatgttcttcataacttgcagtaaaaaaatttttttttttttatgac

SEQ ID NO: 124428 - DNA, 1872 bp, Glycine max
  Clone ID: PAT_MRT3847_83366C.1
ggtggagcaaggattctccttgggagacttgcggattggcgactgattttgaatggaaaatgattgcagaacctgtgatgtcgctttatacagaagcaactgatggttccttcattgaacataaggaaagcgcaatggtttggcaccatcaagaagcggatccttattttggatcatgccaagctaaagagcttcttgatcatctggagagtgtgcttgccaatgagccagtagtggttataagaggacaacatatagttgaagttaaacctcaggtatacttaaattaaggcctaaacaattgaactgacaatgtgtgtttgcttcctcagacagaaagaaagattgttcattttaattgggattatagttgtttaccaaggtgaattttgtaatggtgattggttgaattgttgtttgttgtatgagttgcgtacactgtttgtaggcaggggagtgttgcgttggacaaggctcttggcgttgaaggtgaggataagaaagctcctaagcagagcgttatcattgtgtctgagttcattgggtgttccccttcgctcagtggagccatcagggtgaatccgtggaacattgatgatgtcgctgaggctatgaattcggctgttacaatgtcggaggcagagaagcatctgcgccacgagaagcattacaagtacataagctctcatgatgtggcgtactgggctaggagttttgatcaggacttagatagagcttgtagggagcattactctaagaggtattggggtgttggattgggtttggggtttagaattgttgctttggatcctacctttaggaagctctctgtggatcacattgcctcagcatatagagatacacacagtcgattgatccttttggactacgatggcacaatgatgccgcaggcaacaataaacaagactccaagcaaggaagttattactgtcttgaattatttatgcagtgatcctgaaaacatggtgttcattgtgagcggttgggataaggattgcttgagcaagtggttttctccgtgtgagaaattggatctctcttctgtgcacggttacttcactaggaagtgtggctgaatactatttggatgatactagcgaagtaatgaagttacttgaaggacttgcaaccgcttcagcaccatctgcgtccatagcttctcaggaattgtgaggaacattatagaaactgacacagaaaaacaatcttgtacagaatgatactttcatagctggattctaaaaggtctatatttagaaatttacagattagctgattcatattcttcagaactggtaataagaggacactatatagttgaagttaaaccatagggtgtgagcaagggtaaagtggtggaagaccttatctcaatcatgcgaagtaaggggaagtcaccagattttctactgtgcataggagatgatcgctcagatgaagatatgtttgaaagcattgctcgttcagcatctaatccagctcttcccaccataccaaaagtgtttgcttgcactgttggacagaaaccaagtatggctgaatactatttggatgatactagcgaagtaatgaagttacttgaaggacttgcaaccgcttcagcaccatctgcgtccatagcttctcaggaattgtgaggaacattatagaaactgacacagaaaaacaatcttgtacagaatgatactttcatagctggattttaaaaggtctatatttagaaatttacagattagctgattcatgttcttcacaaattgcaaaaaaaaattcttttttttttttatgacaaggattatgactttctgcaccgttcaatgaaaacatgcgtaacagcaatctttcaacaat

SEQ ID NO: 124429 - DNA, 473 bp, Glycine max
  Clone ID: PAT_MRT3847_83367C.1
gggaaaaaccaaaacctttatttttcttagggaaactaacaggcccccctccccccttttttaacccccccctagtggccctttattaaaccggggccctcaatacataccaccccctgcatatttttatttgggccccccccttcccccgaacctaaaaaaaccccccccggaagggggggggggcaaaaaaaaaaaaagggggggctgtaaaggactggccctggacccaaactttaaaaccccccatttttgcccccaccccccccccccttattgcccctgttctttttccctttgctttgggggacaaaaccaccagggctaaggggttttgccctactactggcaaaaaccttcaggggtggggggttatttggggcggtccccaacccctttcggccaaaaaaagttccccccaaaaaaaggcgtttgggctttgttctttggtaaagcccccccttcactgcccc

SEQ ID NO: 124430 - DNA, 252 bp, Glycine max
  Clone ID: PAT_MRT3847_83368C.1
taagtaaatgagaccaagttgcgccatctctgggacgagcataagaccgacactcaattaactgctacaagaagtacaattcttttcctatcttgaaccagtcatcagctgtgtttggtccaggacgaggccttagaaatatcatcgagcctctgtacgaggcccgcacacaccacctgactctcttggcctcttttcaccaaagtgcagaacaaggtggaggcaccagacatcgaagagcgggcgctattt

SEQ ID NO: 124431 - DNA, 1274 bp, Glycine max
  Clone ID: PAT_MRT3847_83369C.1
cgacccacgcgtccgcacgatcccaattctgcgttttagctctaagctctctcatctcactaacccacacaacaccgccgcgccgtcactcctgcgaggttgccgcggcgtcgtttgacggtggcacctgggtcctaaccatctcctctctaaagcagagttgaatttctctgggggactcgccgtccctgtctcaatctcgcatcattgtcgtcgccgtcaccgtcacggaggatgctggaacagcgtctaatggcgtccctttctcaatctcacaatatggcactccctttctaaacgcacgcgtttgctgctcttcgtccggcaaggtaagtgatgatggcgagactggctcctcctttcagtatctttagacaatcccattactggcgcccacttctctcttctcacaacgccaaacgcaccctaacagctgctactaacttctccatcacctcattagctcgaacgcccaaatcacgagacgaaggaacaaccaccatcgttaagctttcgagcaaagccagaagaaaagccttctatgagtctccagaaggagtcttgttgcgcaagctaaacgagtgctcgaaggacggaaatgtcgctcaagcgctttgccactacgatgaggctcggaaattgggggttctactcaacctcaatcactacaacaaggtgctctacctgtggtgcattggaagtgctgctggttttcccaatttgggtctcaaaagggggtttgaggtttttcagcagatgttgaatgaccgagttcagcccaatgaagccacttttaccaatgctgctaggcttgctgctgccaatgaagatcctgacatggcttttgaattgctgaagcagatgaagaatgttgctattgctccgaagctgagatcgtatgagccggctttatttggattttgcaagaggggtgatgcagagaaggcttatctagttgatgctgacatggttgagtctgggattgtggcggaagagcccgagctttctgctcttttggaagtcagtgtcaatgccaagaaggaagacaaggtgtatgatattttgcatcgattgcgctctacgttgaggcaggtatctgaatcaactttggggatagttgaggactggtttaactcagagtatgctgcaaaaattgggaaggagaagtgggatgttaagaaggtgagggaaggcattgcgcagggaggtggaggatggcatggacaagggtggcttgggagtgggcggtggaaggtggccaatactcatgtgaa

SEQ ID NO: 124432 - DNA, 286 bp, Glycine max
  Clone ID: PAT_MRT3847_8336C.1
acggctgcgagaagacgacagaagggctgcccaatgcatgaggctcctgaagaggtctaaggtgggtagatatttgcagcctaaccccacacccaaggcaacagccttaccattgggcaaggcttctaagtcacagcaactcattcttttttcccaccctctgttctgctaaaaatgtagagcttttttggggtagacgttttttttcaagtctaccctaaaaatgatgcagtagcaggatagaccaacaaaatctccaaaatacccaaaagaaaaggtctacgct

SEQ ID NO: 124433 - DNA, 283 bp, Glycine max
  Clone ID: PAT_MRT3847_83370C.1
tcggctcgatgtgagagagagtggtgcaagaggactaagcaaggctgtcctctcagcctcaaagaagaggggaaggtggggcccagaagtggaggaaagactccacaggctgggttggcggcaacgactgagcccatccctggttggcaatgtgattgatccttttctgaagagccaccactcccttgcacttggcttcttcaattgggcctctcagcaacccggtttctcccacacacccttcaccttccactcactcctcaagccgatctcccacaccaac

SEQ ID NO: 124434 - DNA, 418 bp, Glycine max
  Clone ID: PAT_MRT3847_83371C.1
acgaggtggattcttttgcaactgtagttgatgaaggatatggcaacatacatttgctgttatatttttttttacggtgggataactttggtctatgaaaggttagtggcccttatgcttgctaatgttattttcaggaatcatgcgatatgatggagacttctggttcaaccatgttgatttgtctttcatttcaagcatccgtgcttgggcttccttagtttgaattggtggggctagtaagcttgttggactttgttttgaccttagatttaaatttaataaacttttgaggatgaatttcagtctgtatagagcatttctgtgcaatgcttacacccccttgtgtttacatatccttctgctgttttgatatcttcttttggctattctcaattattttcttcacttttccctg

SEQ ID NO: 124435 - DNA, 274 bp, Glycine max
  Clone ID: PAT_MRT3847_83372C.1
cccccccctttgaaaaaaaacaacttttcattcaaattaaacttaaccggcaaatttaaacacaaaaatctatcttaaaaaaattaatctcaccataccctaccaacaggagtacataaacccatgattacatcccactgaccaaccaaaaaatttcaccagcaccttaacgaggattacaaagtccagccctagtttttccatccctgcacctatcaactaaacaaacaaggaatttctcttggctcccagtacctaaggccctaacatcccc

SEQ ID NO: 124436 - DNA, 247 bp, Glycine max
  unsure (1)..(247): unsure at all n locations
  Clone ID: PAT_MRT3847_83373C.1
aatgccgcacacccctccatccnaatccccnnttgttttgtcaaaaaccataaccaatcacttcaacttcacatataaaattccttcttctttccatctcataataaatgtcatcaaagattctatatccaaatcattcaatccaaatttaattatccttctatttttttatatttctactttttacattcctcattataaattatattctctacacatatacacataataccctacctcctataaa

SEQ ID NO: 124437 - DNA, 669 bp, Glycine max
  Clone ID: PAT_MRT3847_83374C.1
ccagcgtccgaaacagagcatgaatgaaaagtggaagaaggaacaagacaagacgcgtaaacttgtccgaagaagggcataaccgtccttgggaaggcactattatgcgtttctctctatagccagctatcatcaattcatcatgtcatcgccaaactccgcccgtcagccccacgcgccgctccttctcccgcgccccgatgccgccgcccgcctccccgtcctggcgctcctcctcggccgccgcggccactccgtcatggtccgggagacggcggcgcgtgagctggaggagcggcgcgccgactggacctactcgaagccggtggtggcgctggacatgacgtggaacatggccttcgtcgtggtctcggcggtcatgctcgcctgcaccgtcaaggagaaccccaacacgccgatccgctggtggatctgcggctacgcgctgcagtgcctcctccacgtggccctcgtgtggctcgagtaccgtaggaggaacgacgcgcccggggacgaggattctgctgccaacctagattacgacgacgtcaacgacagcgacgaggacgatgttggaacctctgggagttcctcttccaccggattcacaaaacgatgtgcatcattgaataccatgatttcattactttggtggatggtgggctttta

SEQ ID NO: 124438 - DNA, 2415 bp, Glycine max
  Clone ID: PAT_MRT3847_83375C.1
gtcatctgtcatttcgttcactccatagaattgcagtcaggaacacactacacaactaagaatcacaccacactctgacctcaacgttttcaacaaccatttctcttcccatcaacggttcaacgcatcactgcacaatcacttccttcttcaaatacttctcctctcatcttttgtctcctttctcttcaatcaccgttttcccaaaacaattctcttctcttctaattctcatcacgcaaccgcgtaactaaaatctccgtttccgttcaattccttcataactctcctccactttttattattatcattatcattatttaattatttattaataatagtagtaataatttcattcccctctttgcttcgagtttaatcaaaatttcaatcatgcagcgctctcactctctctctctctagagagctcggcctgcctcgagccgctcgagccgggaagaactaacaagaggcgtaagcgtaaacttgtccgaagaataacaccgggaaagaaagagagtgaagaagggtataagcgtccttgtgaaggcactagggtgttctgaactgatcctctccctgggtctggcactgtaaaattcaacgtcaaccccataatatactttgaagaaacgcttccatcttctctctatttgtttcaacttcagttatgcgtttctctctctagccagctatcatcaattcatcatgtcatcgccaaactccgcccgtcagccccacgcgccgctccttctcccgcgccccgatgccgccgcccgcctccccgtcctggcgctcctcctcggccgccgcggccactccgtcatggtccgggagacggcggcgcgtgagctggaggagcggcgcgccgactggacctactcgaagccggtggtggcgctggacatgacgtggaacatggccttcgtcgtggtctcggcggtcatgctcgcctgcaccgtcaaggagaaccccaacacgccgatccgctggtggatctgcggctacgcgctgcagtgcctcctgcacgtgggcctggtgtggctcgagtgccgtgggaggaacgacgctcccagggacgaggaatctgctgccagcctccaatacgacgacgtcaacgatagcgacgaggacgatgttggaacctccgggagttcctcttcctccggattcacaaaacgatgtgcgtcattgaataccatgatttcattactttggtggatggtgggcttttattgggttgtctctggtggtgatattctgctgcaagatgctccacgtttatactggttgtctgttgtctttttggcatttgatgtcttctttgctatcttttgtgttgttttggcatgcttgattggaattgccctctgttgttgtttgccctgtattattgctattctctatgctgttgcaggacaggagggtgcatcagaatcagatctcagtatacttccaaaatacagatttcaattgttaagcaatgaggaaacacctggtgagggagggggaggatcaatgattcctatggagaccagcaatggttactcggtgaatgaacgaacactttcacctgaggatgcagaatgctgtatatgcatctcatcctatgaggatggagctgaacttcacgttatcccttgtaaccatcatttccactatacgtgcatagtgaaatggttaaagatgaatgcaacttgtcctctttgcaagtacaatattctcaagggaaatgaacaggtgtgacaaaatactaaaggcgatcaaagatatataatatcaagctgagcttaattatataacagctcagggttttcaactgctaatgtgtatatgtagataatatcaagacatgaaaaaatagaacctctcccaatttgctcggtttagctgtcattgttttgttgcttaattgcttcagtagagaaaaaggtagaggtaagaaggaaaggtgccgtatagagatcttttaaataagttaacgatttcatttgatccttatttctcctttattagtcatttgaaaatcgtcatatttcttgtatcaaatttgtttatatggaagaaaacaatggaaagtgtggcagtctaactttcagcttatggcaggtgtggattttatggttcttaaaaaaaaaaaaaaaaaaaaaaaaaaaaaaaaaaaaaaaaaaaaaaaaaaaaaaaaaaaaaaaaaaaaaaaaaaaggcgtaacgttcgaagggatccaacgtaataaccgctggtatagcgacacctaagttcttttaacgggccacctttttccaacgcacggaccgggatttgccaggggtttcccaggtaaatccccggggaaaccaaccccattccccttgaaggccgtatagctaaaagccccggtccgatagccctttaggcccgttcgcgcaccccctt

SEQ ID NO: 124439 - DNA, 404 bp, Glycine max
  Clone ID: PAT_MRT3847_83376C.1
ggtcttacagtaaatttataacacattgaatggtatggatagtctatcccataaactagatgggacgatgcatagttggccgatcattgtgcactatgtcgcttaggcgcttacttagtctaacttggaggattgtggaattcatacttagaaagaatatgtgatgactttaagagatttggctgactattgtgccaatggatgatgataacctttttcgtacttacaactcaatgagagacactatatcaggaaagaacagcaaattggagcttcattaccctcgaatcatgttggtgtacaacacgaactcgtatatattatgctaatgagacagatgtgagctggaggcagagagcaagaatatatctaaatatagatcgatatatgtcaagcatatgctt

SEQ ID NO: 124440 - DNA, 317 bp, Glycine max
  Clone ID: PAT_MRT3847_83377C.1
ccacgcgtccgcccacgcgtccgcccacgcgtccggttttggttcacagtggaggtgtgcatggtggacattattatgcttttattaggccaaccctcttttaacagtgtaacaaattttattatgagagggtgacaaaagaatgatttatatgagctatttaggtggtttatttgtttttgtcagtgttattatatttatttcttttttatattataatatattttttatattttttttttattatattcgtattcttttgtattatgtttgttttttttcatttttatattttatttataattaatttttttata

SEQ ID NO: 124441 - DNA, 158 bp, Glycine max
  unsure (1)..(158): unsure at all n locations
  Clone ID: PAT_MRT3847_83378C.1
cccantcattgntgttttctggggtgttancgtgccatgcattcgtcaattttgtnntgccnaagttcgacanttaancattctgtaanaattgattncttgtatcagattgatttatgatggaaanaaaaaaaaaaangnaaggaannagnnanaga

SEQ ID NO: 124442 - DNA, 456 bp, Glycine max
  Clone ID: PAT_MRT3847_83379C.1
tttaactatttttgttacttttttactttctcaattgtcctttattctgactggatcggattacttcattaaactctcctgtaccctttttacttatattttttttctaatacgtagcctatctagcacaacaaaccagggccccttagaactaaaccacccctggggggccaaaaaacgggggggggcacttacaaacggggaaaaaaaaaatgtccttaataactaaccacaccacggaaaaaaaggaggaaaaaaaaatttagcaaaccgttcccccaaaaacataaaaaaaacggggggaaaaagcgccttaccttttaccaaaaaaaaaaaaagggggaaaattccccccccccccctccatattaagggggggggggggataatttggcatgttgacccctcaaacccccccaaaaacaatataccgcggggggggaaaacaactccagt

SEQ ID NO: 124443 - DNA, 429 bp, Glycine max
  unsure (1)..(429): unsure at all n locations
  Clone ID: PAT_MRT3847_8337C.1
aaacattacatttcatttactggagagattgattgtcataacatccataagcagtttaacaaaataaaaaactatatacaaaaacagtttatatcactgccttgacggaggctggatttcatctaagtccatgtcaaatacagcattcccttgtttcagcatcttcattgccagcatacatgcaaattatgtatggatctaattttgacaccatgcactacacattactaatgagtagaattcaactcagcagattatatattgaaatctcctagagtcagagtacgcgagggaatgatattccgccatagttggtatctagggaatggcacaccaaagactggctgcacaccatattctccaccccaaactggaggcattctanaatggttgggtgagaaaataatgttccttgaaatcccccgtcgt

SEQ ID NO: 124444 - DNA, 469 bp, Glycine max
  Clone ID: PAT_MRT3847_83380C.1
gtgaaccaagtgtaggtgttataagtccagctctttcacgagctttatgatccaatacctccaacttgaaaagaagacgctcaaacctatccagcaaatggggtaaatgaaaaccagaagataaagatagcagcatgtatgatgcagatcttatattatcagtacaggatgatatgaaaagtgacacaaccaaaagcataattaaataaaggatacacaaaccaatcagaaaaaaaaacttgctggagcaacacaaggctttcaagtaggtcatatgttgggcaaaactcaaagttaaacatagccccgttcaaacactaacaatcattattttgaatgtctaaaactctacaaccacaatataaattgtgttatctttgcttttcttcaacataatgctattttgattcaaatttctaagggtacatttggataaacactttaattaagcacttgttgtacaagtact

SEQ ID NO: 124445 - DNA, 488 bp, Glycine max
  Clone ID: PAT_MRT3847_83381C.1
tttgtgaaagagacaatagaattccaattatggctacatgaagcaatgctatatcaactcctcttcaacagactgtaaaaaataatcgaatacatataaacattaagatatactaaaagcttatattggtgctggtggcttcatgttaggatatatatataaaccatgtccctctccacgcagaacaaatcctttatgatgtaaaagcagaaatgcccgctattacaaaagaaccaaacgagtataatactagatttgaaatatctaggaattttagttttaaacgtttggtatgccaccaactcacgacttctgcatcagacgctctacatctcccatttctacctcactttcttgcaaatcatcctcgtctttaaagagtacttcaatttcctccaaagtcttccctcttgtttctggaacacaataatgaacaaaggcaacggcacaacatgaaacaatgccaaaaacaaagaatgttcctgcta

SEQ ID NO: 124446 - DNA, 106 bp, Glycine max
  Clone ID: PAT_MRT3847_83382C.1
gataaacgtgcaacgtcggggtgaatctactcagagcggcatcaaaacaatgcctggttggacatggctttgtttcgataccagataagagcagttttaaatctaa

SEQ ID NO: 124447 - DNA, 332 bp, Glycine max
  Clone ID: PAT_MRT3847_83383C.1
aagagtgatgaatatgattcaaaatacaaaacgacagccctatgtaactgataacgcatcattgcacacatgttctagccaatgatggcaacgggataagcgccatgggtctaaccactctatctatatccaactttcttcagcattatcgaagctaaactcaatttcattagacagatactgacgaacctccatacaaggtcggacctttatattccaaagttctaaagacaagccaaggtacttgcccattgtccacatcctggacaacgtattcaagtcaatcaagccatatggattcccatccactgattatgccagttgtcaacagg

SEQ ID NO: 124448 - DNA, 366 bp, Glycine max
  Clone ID: PAT_MRT3847_83384C.1
gcttggtttgtctataatttcgttgacccgtgtgtgtgaaattgaaaattggaaagggagttaggtctgtgatttgcagagcatatttttacgacatgactgctttgtgtttaggcaactcctcatattgatcgagtggtgtttaaagccctaaccttaaatcattggggtttgggttacgcacacctccatactccaattgtaactcctcagatgtatttttttttttattgcggagttgaaatgaggttcagtcatgttttggaggatcacatattttttttaagaagtgatcaaattattttgttcacccttaaattgaaaacagaacctaatgagattactcccttttttaaaaaataaatt

SEQ ID NO: 124449 - DNA, 251 bp, Glycine max
  Clone ID: PAT_MRT3847_83385C.1
atgcggacgtgaagacatggctcactgctaaaaaccaactttgcatggaagctgatacatggtacaacgccaggtcaaacctcatttaggcatcgacatgctctgagaagggcaagagagacgcagccgacaagcgcgccgagaaagctcccaggagagggcttaaaccacttacgcaaggtaacggatcaagaggcaccagcgagcaaagcgcacagcatgacgtattgaagctcccaagaacccaagcg

SEQ ID NO: 124450 - DNA, 2086 bp, Glycine max
  Clone ID: PAT_MRT3847_83386C.1
ccggaattcccggctcgaccccgcgtccgcctggtgttacaacaaggaaatggttaacaggaagtttaatctactagcctttacactttttctccaaaaggaagctacaattcttggatctcaggatgaatcagagtggcccacacttcctgtgctaccatcatatggcagaggaagggatgctcctgatggacaagggtgctaatatgaaataccaggccttacatgatcgagattatgttctttgatcacatccagatatctaatctcactttgatcaattctctatctttgtttgtccatccaatttacacaagttttgacaagaattttcatttgccttgatgattaatcttaatgcacagcgttttcttttattcttattatcccctatctctgcagcgacattataattcaagggctgaccattcttgctccaattgattctccaaacactgatggaatagatctagcaagagggactctctataccatctgttatgtaactgtgttaacgtggttcttgctgtaaatcattgaatttttgcggattgagtttcttcaaaatcagaagactcggtgtcggtgttgatttacttggccggagcgatggcaactttgtcccatgctgattctagaagaatgtattcatgatggtgggacagtcacattagccccaagaactcgaaatggctccaagtcgctagaatctgacaggagtaccatggacagaagaagagcaccgaacgttccttgttggacttgagaagctgggaaaaggtgattggaggggtatctctagaaactatgtgacttcaagaaccccaacccaagtcgctagccatgctcagaagtactttattcgccttgcaaccatgaataagaaaaagagacgttcaagtctttttgacatggtatatatatacatagatccatcatgatcaacttcctaattatctcatcttatatcaatcacatatccatatatatgcacttaaattagttttttttataatacattttatacttttactatattctaattacttaattgataattaatttaattgataacaataaatttatcttaaatttataattttttaaaattatccttattattaatacttttctcttaattatttactaatatattattttttttctttgaaaaatatttgtagtttaaaaataattaatttaaaaaatattatagttccagtattagaaaagaaaaaaacaaacatcataggaagggaggcaataaataatttaattttctcgataccatgtgattggatatcaattatggcaggttggtaacggcatcacaaatccaattagcagctctaactgcaagtcttccaaatgtgaaattgaggatgatgtgaccttgtcacttgttcaattacaagatactaaattagatgagcagaaagatagtgataaatattgtgaagctggaccagcaggtgctgaacatgaagctgtgcctttgtggcttcatcttcagatgaaatcttcaaataataatgttgcagcagtagttcctgatctggagctcactcttgcagtctccaagggcaaggctaagaccctgctaggcctggaacaaacacaaacaaaatcatccccagattccttccttcttggaccaattagcgtgacttgagctatgaattctctagggttaatgcagttgcacccctcggcccctctttatttgttgtcaagtacaagatcttctgttcaaaaaagaaattaaacacatttttcttgttggtagtcattaaccaaccactaatctatgcaattacatcccttcatgatatataccgtacgttacatagagtagttgattactttatatacatcaatcaaaatctctctttgcatcactgcaaattaattagttcaatctgttcaacggaattattaaccaactatgaaattttagatacttttttgttcgcaattggcaagtcatccataccttcctaccgaatattatgtttcatatataccttttttcttttctttctaagttatgtttaatatatacctagtgtaccaaaagcttgttttc

SEQ ID NO: 124451 - DNA, 729 bp, Glycine max
  Clone ID: PAT_MRT3847_83387C.1
ctctttgcgaggaagaccttcatctgagttcaccagtgtgaactcagatgtaagtctctttgcgaggaagaccttcatctgagttcacactggtgacagcagatgtagaggagaaatcggttataattggtgagagaaatagagtagcaatagaggccctgagagcagcaatggacaagggacacaataaaattgcaatactatatgggggtggccacatgccagatcttgggaggagattgagagaggattttgatttagtcccatctaatgtacagtggataacagcttggtccataacgaaaaaggacctaaatactgattcatttccatttctgaagacaattgctaaggcctcaggctggccattgaaccgctatcagaccttggcattgctcatcttttcatcagtcttagcattggatctgtggttctgggagctcttctttggcactgcagtgaattgggtttctgaacttggctcagaacttcttcggtatgttgataattcaccgatgatatgatcattgcggactcagaaaattcatactaattgctgaataggatgaagaaatgttgtatgtgccactgtaaatatcaaaagcttttatatttttatttttattgacaaatataaaattccagatgttcccatttgtcaaagtgtttaaatgatacgattgtttgcattcaatgaaccttagccattaagcatatgctttattagct

SEQ ID NO: 124452 - DNA, 256 bp, Glycine max
  unsure (1)..(256): unsure at all n locations
  Clone ID: PAT_MRT3847_83388C.1
ccgggacgacccacgcggacggacacacataaaaaccataatccacgaagatctcaaaacagtgagcancaaacgaacnctttgtgttttgtgctaaaaacgagagggggcgagcttttttttataaccaaacnccaataacccacacaccaacaaaccaccaagccacaccaaaaactaagaaacaaaaaagcacaagccacacacactcactgtaaaacagccccacatcccacgccccaagatgaaacacaca

SEQ ID NO: 124453 - DNA, 486 bp, Glycine max
  Clone ID: PAT_MRT3847_83389C.1
aattcggctcgagcttgtttcgtatatgtttttgtgtttgcatgtgtgtgagttatcgaacatttcaatgatttatttatccgtttgcattttccttgccaatattctgtggatctgtttgtctttttatgattgctttacttggaaattatagatcttgttttccctgtgactatactcttgatttttcgaaattcgcttttgatgcaatgttgtatgtgtggatattagatgaattttgttgtttggtgtttcaattgtttaagtttggatcttgatatggttggttaccttgttgactggtaatgaacattttgagggtgaattaggcaatttgcattgccgatgtgttgctttgagtttaggccttttgtgttacgcaggttgctgagaagacataaaaaatggtaaagatttgctgcattggagctggctatgttggtggcccaaccatggctgtgattgccttgaagtgtcctgagatcg

SEQ ID NO: 124454 - DNA, 1141 bp, Glycine max
  Clone ID: PAT_MRT3847_8338C.1
acacacaaaattgaagaattctgaatcatgtatcctaataacatattcctattatcatattcaaaatgtataaccaaagactaaacaaataaaatggccaaataattctgaattctaacccaaaaaaaggcctatgaatcaatattgattaagaatatttattcacaaatcacaaccaatcatttatgatgcattcactctagcaatgtattttccacatggaaggagaaaggagaaaggagaaagaataaagtaggttaaccataccatgcactacacattactaatgagtagaattcaactcagcagattatatattgaaatctcctagagtcagagtacgcgagggaatgatattccgccatagttggtatctagggaatggcacaccaaagactggctgcacaccatattctccaccccaaactggaggcattctaaaatggttgggtgagaaaataatgttccttgaaatcccctgtcgtcgaaaaggaaccgctcgacacctcttcttcgtttcccaggacaaagcaaacaaatccttgaaaagccacccttttctatctccttcttttccaaattcctcctcatactttttcttccacaactcgttgctggtggacaagtatcgcagctccgaacaagtacaagccactttggccaaatcaacacccggaagacgctccaaaatcaagagcttaagctccatcggtagccgcataaaacaaggcggaagatccaccccagccttctcacaaagatcaattaacagtggcaatgcaagcctatctttccccatcttccacatttcaaaaacttcatttccaaagacaatatcttccccatcattaagactacccttggtttcagaattagcccgcatcgcctctcgggtcccgacatatttacgtttatccaaacaaacaaaatgcaacctcgacccaacatcatcagacaacgacccacaaacattcacaaaatgccccaatgtctgaaatttcaaattcacactgtgagaagcaccattagccagaatctcaggcagggcatacctcaaagatatcaccgaagaaaaagccggaggagaatcatcaagaaggtgagaaccagtaaccgccataccacaatccttgtcgattcg

SEQ ID NO: 124455 - DNA, 356 bp, Glycine max
  Clone ID: PAT_MRT3847_83390C.1
tgttaaccaggtcctcaccagcttttaaatacttaaatttcaatcaatcccaattttctcacattccctttttgccctttctatctctctcgtctttctcccacaatgaacgatcttctaacggcatgcctatcccctaatgtttcacgccaaagctaagggaagtcctattttaatatttacaaacttatgagatttttacagaagctgtattagaaattctttatttgcaatatgtattgaatgcagttagacccttaactttgatttgtacaacgaattgggctgtaaattcaatccttcaattgactgttactgggtcacaaaaactgaatacctgtgcactaatgaaaatt

SEQ ID NO: 124456 - DNA, 528 bp, Glycine max
  unsure (1)..(528): unsure at all n locations
  Clone ID: PAT_MRT3847_83391C.1
tatttgtttttctttttcctgattgctttcacctctcacatcatttttcttttcatcagtacctttcttttcagcaaatttcttcttggatacaacattatcctcatcctccgcctccacaaacctcttactccttgtcatcacatctttacattcctccttgggattcttttctgtattcaccatgaaactgttggatgacttgtcagttatctgcttggccagttgtcccacctggacctcaaggttttctagtgctgactcagtgcttttatgatttgacattattactttcataaactgagtcaaagtctcctccagcttnntagtcctctgaaagatgttaggcccttgttgaattggcttgttggaaggtccaccctggtccttgttgaattgattgctagggtgtgatctccactatccttgttggttataaggaccctactggaagcctgaaaatcctccttgatccttgtctctgttgatttcccatatagtgaacttcttgagtgttttcttcaatgg

SEQ ID NO: 124457 - DNA, 716 bp, Glycine max
  unsure (1)..(716): unsure at all n locations
  Clone ID: PAT_MRT3847_83392C.1
cgaattcgagctctgtacccggggatcctctagagtcgacctgcagtgtatgtaaatcaaattaatttataaaataaaatctgctaattttaaatgtgtttgtagtccttaaatatgcctctttctgctttagatccctaaatttttctttttgtttatttgtgactttgacaaatttaaatcttctattttatgccttttgttataaaattaattgcatagtcactctgtttgtgtattgttatataaccatttttatagtacatgccaatgtatgaagaaaccttgtaaacatttttatagtaaaaaacaaaaaagttgaatattatataaaaaagaatatatatatatatatatatatatatatatatatatatatatatatatatatatatataaaagacgaaaactagaaagagacatttacataagaaatattaaaaatatacacacactctaatatacatactcttttaattaaactcactttatatactaantattgagtaaaaattatttgaaattacaaaaactttgtgatctcactccatatttaatgagtttcctttatgattttattgtttctaataagtgtcagaagtaagaaagaaaaaaaaagtgtggtgggtaagtgagaaaataaaaaagagtaataacactaaattaagtatcaatgggagattaatcggaacatagtgttctttaaagtatgtaac

SEQ ID NO: 124458 - DNA, 244 bp, Glycine max
  Clone ID: PAT_MRT3847_83393C.1
ttcgaccgaatcggctcgagtacggcgacagaagggaccggactgaatcaagaataaatttgtatgctataaatgtggtatcttattgaagtcccccgaagagggcatcgtattgttttcgacgagaccttaattatacactaacaacaaatataattagacattattgtgtcatatgaaaagtattcactttgattaaacgccttatgaagagaaccgagttgatgtgtggacaaaaagtatg

SEQ ID NO: 124459 - DNA, 257 bp, Glycine max
  Clone ID: PAT_MRT3847_83394C.1
ttttcatgtagctacaacgaggggtcctggtgatgaacaaggatggattcttctgacatcagcctgtatacttgatctcaaagaaccgtacgacagaatggctcaaccgcaagctgatccagtagcccaagatcagcaacctcaagcacttttacagacacaggtattgaatttagaatcagatatctgtatctttccatgcttaagttgtaagattaaattctatggatgacactcggaattggtggtttttcaca

SEQ ID NO: 124460 - DNA, 536 bp, Glycine max
  Clone ID: PAT_MRT3847_83395C.1
tagtcatgctaaattgtttaatgcctcttgaggagcttctggcatcttgtgaacatcttcaatatctggcagggttgcttttcctcactgacattttgcatgattaaagctgagagccaaatgaggctcagggtgtattcagtcttgaagggaaggcctgaataatgataatatgttaattatattatattatcaaatgatatgctagttgcattaatttttttttggtgctttttatacgtacttcacttgctaaaattgttttagacatagataattcttatcatcagcatcctcttaatttttatagattgatgaaagtttctaaattatagtgataggaactaatgtaaattgcttgttactttcaagttgctcttctagtgtgtctgtgtctgtgatagggaattgggtattatggggtgtcctaactcccacatcaagtagtatgagatgcatggtattttaatggcctgattctcctccctttacaacttgcttttagcaagtatttgggtgcttttcaattggtatca

SEQ ID NO: 124461 - DNA, 336 bp, Glycine max
  Clone ID: PAT_MRT3847_83396C.1
agcttaggaggcagaagaaccacttcgatggcagcgtgaagcacagacctgacatactgctgaggggtgaaactacactcgctgtaggcaggagcaccaaccagattgctcaattactgtccctgagctagagtagttggtcctgcaccagggtggcccataaaaaatcggttatgtttccgaggatctaactttggcccaccgagaatcatctgaacaccatgggcataatgccttaggtaagggatccacttctttgcgatattttcatagctggcctcgcttatgagagaataggcaagcatggaaacatcagctcctgcatagctcaagggg

SEQ ID NO: 124462 - DNA, 327 bp, Glycine max
  Clone ID: PAT_MRT3847_83397C.1
gaggggccccttcattcaattgtcaaatcaattaaactaatccaaaaaccggacccttaaaaaccccacatgaaaaatgggtaaaaatgattcgcgtcctaaacacccaggtttgggcaaacatttttttcaactgggatacaattttaaaacggtggggggtattgaaaaaatataaaattttccgtattaaacatagctaaggggggacacattgcccccacctttatgttgttggttgggggccattccctttttaaaccccaagttttttttcccctttttgaatcactgggaaaaaccgtttttccccaaaattagggcttt

SEQ ID NO: 124463 - DNA, 544 bp, Glycine max
  Clone ID: PAT_MRT3847_83398C.1
tcatagtttccaatagcttcaaccaccaacttgaagcttcttgaattgaacattgaaagaaattccattcctaaaggacactgttctatctactaaatgattcttgcccttgcttcttaccgcaagcataagttatgcttgttttttccttggcctttttctaatttaagagttatttatggacttttaaaaaagaagtagatccgtgtggtccttgacacttttggccttcttggggggagtagccaaaaaaaggtgccacccgatgctattgaactaacaggccttattctacatccaaaattgatacatttttgtacctactcatccttttcttcctcatcatcattttccacatacctcagccaatcatgaggtttttttttttagtttttctcttctcacaggcttccttgatgaagttccctactctgggaggatttttcttacaagaatttacatatccccttgcccatttggcatctcctagctctagtaagggtagaagactagaaccctacatgtgatctgaattggatcactc

SEQ ID NO: 124464 - DNA, 371 bp, Glycine max
  Clone ID: PAT_MRT3847_83399C.1
aaaaaaacaattttcaattaggtgtaaagccaacaacagaaaacgggcgggccgcttcaaggccgcgaggccaaccacaccccaagaggaacaagacatacgcgcttataagcgcgagcacttcttcttcacaacctcaaagctgcttaccctcacggtctcaaaaatcacaagcggctcgccaacaggcccacacctaatgcctctaacacaaacaaaggccctcaactccacccttaaagaactgggcaccctaacaggaaaagacacacgggcccaagacaatgacatgaaaccccggacttatctaccagcctttcttaaagacaacacaccaggcatcctaacaccccccaaaacactcaccggac

SEQ ID NO: 124465 - DNA, 793 bp, Glycine max
  Clone ID: PAT_MRT3847_8339C.1
aaacattacatttcatttactggaagagattgattgtcataacatccataagcagtttaacaaaataaaaaactatttacaaaaccagtttatttcactgccttgacggaggctggatttcatctaagcccatgtcaaatacagaattcccttgtttcagcatctttattgccagcatacatgcaaataaaatatggacctaattctgatttctaacccaaaaaaaaaggcctacaaatcaatattcgcaaacattatttattcacaaatcacaaccagtcatctatgatgaattcactagcaatgtattttccacatgtaaggagaaaactagaaaataggtgaaccataccaggcactacacattactgattagtagaattcaactcagcagattatatattgaaatctcccagagtcagagtacatggaggaatgatattccgccttggttggtatctagggaatggcacaccaaatactggctgcacaccatattctccaccccaaactggaggcattccaaaatggttgggcgagaaaataatgttttcttgaaaacccctgtcgtcgaaaaggaaccgtttgacgcctcttctttgtttcccaggacaaagcaaacaaatccttgaaaagccccccttttctatctccctcttttccaaattcctcctcatactttttcttccccaactcgtttctggcggacaaaattcgcaacttcgaaacaatacaaagcccaacttttggccaaacaacacccccgaaaaccctcccaaaatcaaaagcctta

SEQ ID NO: 124466 - DNA, 958 bp, Glycine max
  Clone ID: PAT_MRT3847_833C.1
tttttttttcctttcaatcatggcaagatatcaccatcagagtttcctcataaagaacttatgtggtccactcgtacaaatcattctgttcaaacatttaggatgcactcctagatggtggacaatgaactagactgtagatcaagacgaaataagtcatgttatatctgaggctaaattctaacgaaggggcaaaacacaaaaacaattaaatatacttcttacagcaaggcatttaaatacacatttttttacacattaaaggcagcagttgacatttacattgagggggcactaagtaagaaaatttcaatgagacttacacttgataaggcacctgttatctcccctatgaaacaaaatttggaaactaggcacattgcatatgaacagacaaaaaaaaaatctattttcctagttttaagatctgtctgtctcatgctcgatgcttaaaatatgtctatgatcatcatcatcccttttcatcatctgagaaggtggactccttctagaagtttgtgctggatgaagttggggatcatacttctgagaagctaggtaatttagagctgtaaccacgtcaactattacaggccgcatattaggctgctcttgaacacacatagcagcaatggcaagagcttggtataggcctctcacgggatattgaccttcaagtaatgggtcaaccattcgtgaaaatttcctcctgtccctgaacaagggtcttgcccatgcaattagattttgttctttggcaggttttgtatggtcaatggctttccggcctgtaataagctccaaaagaacaaccccgaagctgtaaatatctgacttgaatgtcaactgacctgtcattgcataatctggggcacaatacccatatgtgccctcgtcccttgttgaaacatgggtcttatcaccacttgggcctacttttgccaagccaaaatcggac

SEQ ID NO: 124467 - DNA, 573 bp, Glycine max
  unsure (1)..(573): unsure at all n locations
  Clone ID: PAT_MRT3847_83400C.1
attgatgttatncacaagagcacgaacgggaagattgcccatgagagataggctgatactcgagcagcacannacacagcangacacnnnnaggtgcntgctactcatgagcggctcgagatccagctcctacacaaagtgcaacaaactcgtacagacgcttcnnnnncttaaagttcatacgccatgggaccgctgaaaataaataaaaaaaagaagaagaaaaagagtgagtccgtacacaacaatctgcttgaataatttgatacactagtacggatcggtattgacgttcatgcgattcaacagcacttgtcttagttttgggactagatcattcaccttcattttgtacgcgtcacccatctgagcgataatagtaataccaagagttgaattcccaaagggcaatacgctgctggcggtgacacnnnnttgaagattttcaaagtggtccaatattttgagctcaaccccatcttccttctcgcaatggatctcaatgagtacctcattctccatcactcttgcttcaacatcnnngagcatttcgctggctctacancaatcctc

SEQ ID NO: 124468 - DNA, 693 bp, Glycine max
  Clone ID: PAT_MRT3847_83401C.1
aggtacttactcaaatcttgtcacaactttatgcagctaggtctctgtatggttgtaacggttcaccgtaataagtttcagagaccaatcttgattatgcgtgtccctctagacaaatcagcctgacatgtgctctacttgtacggctgcgagaagacgacagaagggcttaataaagtgatacaggagcagaataacatgcttgcaaagaagatcaaggagaaagaaaaggttgcagcgcagcaagcacaatgggagcatccaaaccacggagttaatgcatctttcttgctaccgcagccacttttgaacatgggtggcaattaccgtgaggaagcatcagaagtagggaggaatgaacttgacctgactctggaaccattatattcctgtcaccttggatgcttttgaatactttctttgaggtggatgatattatatagctttggtatggcatttgacaacatatttgagggcttatatatgcctctatgttttgtggttttccctactctgcagacgttaatgtttattgtgtgttgtaagtttataatttggtcacaaggctaggctttcttaagtggaagctttgctatatatagttaagttgctgaaagacaggtctcgtatctgaactaattaagcgttgagtttaaaaaaagaaaaaaaaaaaaaaaaaaaaaaaaacacaaa

SEQ ID NO: 124469 - DNA, 756 bp, Glycine max
  Clone ID: PAT_MRT3847_83402C.1
cctcgccgaagtcgatgaggccgtgtgcgctgtgtcagatatcgtgactcgcatgcgcgccagctcccgcgccacggtcagggagcagacctcgtgaaaatcatgatccgccgctctccggacacgggcttgtcaatctacgtgccaaaaaaggatatcgaagagtcaatcgtggcctccgagtacgagaccctatggggcggctggatcaaagtcgctaacggttgggtgctcgatttgcccgagatggcgagcgacacacggtttacgatcacaatcgacgcgaagaagcgggatgagagcggcgacgatccatgaagcgctcacggagatgagcgctgtagaaaagataaaaaaaaataaaaaacatgacactgggaggattcaaattgggaggattcaaactcgtctatgacctccttattactccaaaaaaaaaaaaaaaaaaaaaaaaaaaaaaaaaaaaaaaaaaaaaaaaaaaaaaaaaaaaaaaaaaaaaaaaaaaaaaaaaaaaaaaaaaaaccaccctttaaagcaaaacactccacccggggaaaaaggaaaacgaacaagaaggttgaaattggcaaggtggggggggaagaataataaaaggaggccaaaaatttaaaaaaaggcgggggggggggaaaccgaaggggggaaattgaacaggtttcctggggttcggggaagggggtaaaggtcaaggaaaaaaaaccagtttcttaaaggggttgggaacccaaaaaccaa

SEQ ID NO: 124470 - DNA, 541 bp, Glycine max
  Clone ID: PAT_MRT3847_83403C.1
agaaagaaaaggttgcagcgcagcaagcacaatgggagcatccaaaccacggagttaatgcatctttcttgctaccgcagccacttttgaacatggggtgacctttcaataacaagatattataattatgttacatcttcgttatatggcaattaccgtgaggaagcatcagaagtagggaggaatgaacttgacctgactctggaaccattatattcctgtcaccttggatgcttttgaatactttctttgaggtggatgatattatatagctttggtatggcatttgacaacatatttgagggcttatatatgcctctatgttttgtggttttccctactctgcagacgttaatgtttattgtgtgttgtaagtttataatttggtcacaaggctaggctttcttaagtggaagctttgctatatatagttaagttgctgaaagacaggtctcgtatctgaactaattaagcgttgagtttgtccttgtttgctaattgctaataacagtatatacaatatataattattttaaatcga

SEQ ID NO: 124471 - DNA, 2236 bp, Glycine max
  Clone ID: PAT_MRT3847_83404C.1
gcgcccacgcgtgcgctcaaacatgaatgaatcactcaattcttttatattttccgccacgcatccatttcgaacattgaaatgaaactaaagttgatgtggttatgaaatatgagtttgattcgaagacacaagagttgttgtgagttaatttaaagtgaggttttgcgcactttccttgttcccgggacaggacgagagtgttacataaagcgttagcctcactcatcactgcgactccaatggagcctcccacatcctacatttccaccgatgaacttcgcaagcataacacgcgccacgacgcctggatctccatccacggcaagatctacgacgtctcctcctggctccaccgccaccccggcggccccctcccactcctcaccctcgccggcaccgacgccaccgacgccttcctcgccttccaccctcccaacaccgcctccctcctcctccccgccttctccacctcccaccgtctttccgaccacaccgtctccgccgcctcctccgactaccgcaagctcttctccgacctctccgcgctcaacctcttcaaccgcaagggccacacaacctccatcctcctctcccttattctcaccctttttcctctctctgtctgcggcgtcctcttctccgacagcactttcgtgcacgtgctttccgctgcattgataggctttctctggattcagagcggctggataggccacgactccggccattacaacgtgatgctcagccgccgcctcaaccgcgcaattcagattctctccggcaacattctcgccggaatcagcatcggctggtggaagtggaaccacaacgcccaccacattgcatgcaacagcctcgactatgaccccgatctccagcatttgcccttcttcgtcgtctcctctaggtttttcaattccctcacttccagattctacgacagaaagttgaatttcgattcctttgctaggtttttggttagttaccagcactggactttttaccctgtgatgtgtttcgctagggttaacttgtttgcacagtcttttttcttgttattgtctaagaggaaggtggagaacagatggagtgagcttttggggctgcttgcgttctgggtttggtaccctttgttggtttccttcttgcccaattggtgggagagggttttgtttgttttcgtgagcttttctgttacgggtattcagcatgtgcagttctgtttgaaccatttttcttctgaggtgtaccttgggccccccagcggcggcgattggttcgagaagcagactaaggggactcttggtgtggactgctctccttggatggactggtttcatggagggttgcagtttcaggtggagcaccatctgtttccaaggctgccacggtgccatttgaggaagattgcgcctttggttaaggatctttgcaagaaacataatcttccttataattgtgtgtcgttctggaaggccaatgtgctgacgattcagaccttgaggaatgctgctttgcaggccagagacggttccaatccggttccaaagaatttggtttgggaggctgttaacactcatggatgaatgggggacctgagtggagtttcgtgtgattttgctgtcattgatagtttgatggaggtgtggtggtacttggtaggtagggacgaaattttatgtagttacataggtgcttttggtggtgttctcctatcagaattggagttttatatcattattaccttggattaccaaggtaaaacttcaaatcctgttggaggaaaagaccaaacgcatctaagaaactgcataagttttgtccggtaggtaatccttggtgagaataattgatttgcaaattgcttagaggcttcggttactcattgtcttggtagcgggaatggctagtctccttttggaaataggtaatgctcagcacttcatgcttgggaatgtaagcacggtttattctcgctttggccgttggccgtttgatttctttataagccaagggtctctattgttacataaccatttgtgttatgcctttgaatacattgtcatttggagcaagaaatgtactgtatgttaatttcaggttcagattcctgaatgaatgtcattccctgcttcttgtttagttctccaatcagtctagtataagtctttgtagttgtacaactagatggtagcaaattgtagcttctattatgaaataaagtttgttattt

SEQ ID NO: 124472 - DNA, 1228 bp, Glycine max
  Clone ID: PAT_MRT3847_83405C.1
ggattaacttgtttgcacagtcttttttcttgttattgtctaagaggaaggtggagaacagatggagtgagcttttggggctgcttgcgttctgggtttggtaccctttgttggtttccttcttgcccaattggtgggagagggttttgtttgtttttgtgagcttttctgttacgggtattcagcatgtgcagttctgtttgaaccatttctcctcggaggtgtacctagggccaccgagcggcggcgattggttcgagaagcagaccaaagggactcttggtgtggactgctctccttggatggactggtttcacggcggcttgcagtttcaggtggagcaccatctgtttccccggctgccacggtgccatttgaggaagattgcgccattggttaaggatctttgcaagaagcataatcttccttataattgtgtgtcgttctggaaggccaatgtgctgacgattcagactctgaggaatgctgctttgcaggcaagagatggttccaagccggttcccaagaacttggtttgggaggctgttaacactcatggatgaaggggatttgagtggagcttcctgtggttttgctgtcattgatggtttgatggaggtgcattggtaggtagggatgaaagttatatatagttgcataggtgctcttggtgttgttctcctatcagaattggagtttttctatcattattatgtggattaccaacataaaacttcaaatctgattggaggaaaaaaccaaacgcatccaagaaactgcatataagttttgtcccgtaggtgtccttggttttgaagagagaataattgatttgcaacggttactcattgtcttggcaggggattggctaatctccttttggaaatgggtaagaaagaaactactgacacttgtcatatgtggtttagtaatgctcagcacttcatgcttgagaatgtaagaacggtttatcctgctttggcctttggcagtttcattatgagcccaagggtctctatattattatataaccatttgtattatgtctttgaatacattgtcatttggagcaagaaatgtaccttacgttaatttcaaattctctagatgaatgtcatttcctgcttcttgtttagttctccaatcagtttagtataactctttgttgttgtacaactagatggtagcaaattgtagcttctattatgaaataaagtttgttatttat

SEQ ID NO: 124473 - DNA, 275 bp, Glycine max
  Clone ID: PAT_MRT3847_83407C.1
tttcgttatattttgatgaaccgcgaacacaggttgccgttccttaaaaccggcaacaaaagcaattgtgacttgaattcaagaaatctgtcaatatgcttcctacttctttgtgaacgattttttaagggaaagaaaatcactctctgagctggccacagacgttgggaataattttgttttccactcttagtttattagctgaacactgatctattggatatacgactttatgtcagatctaaacttcactctgtctctttctcatgatctct

SEQ ID NO: 124474 - DNA, 459 bp, Glycine max
  Clone ID: PAT_MRT3847_83408C.1
gtcggtggtcggcctgtcgtcttttttttttttttttttttttttttttttttttttttttttttttttttttttttttttttgggttgaaaaacagcctttttttttcaagacccgtttttttaaacccggaaacataatcattaccaaccaaaaacccaaattcatttgaacaacccaacacaaaacttactggggcgtccatggttttctagcccaggaaccatggcccccttaaaccaagtttttagcaaggtttgtagttgaacaacccatgggggcaaaaagacccttaattggaaataaagggccttacccaagctagcaaacttttgttacggggaatgggggacaaattattcttccccgggttctgaatctgcattttggagcccacccatgaaagggggggcctttttccaaaacccaaaggttttggtatcacccttaaggcccttt

SEQ ID NO: 124475 - DNA, 944 bp, Glycine max
  Clone ID: PAT_MRT3847_83409C.1
tatcataaatgactcccagcctgcacaggcgtcagaacccaagggtttgtggatgagttccccaatgatatcataaatgacctgcttgatgatgaacatggtattgggaagacggccaaggcaagttcagcattccagtctttgaatagtggaccacagttgctgaatcgacagtttcacttttcctggggacctgggtgcagatgatgatttgggatcttcaaccagttcttgcaggtttgagcgatcacaaagtttccagcatgaccatagattccaaggagggtatgacttgtctggtgggcattatgattcactgagggattatattcaaccgatgagtagtgtgcctggcgtcaatgggcaggttgatgggttgattcgaaaccaatggcaggtggccggttccgatgtgttgtatttaggcatgagaaacacagagaatggtagttatgcatactatccagattactcaaatatggcatgtggtgtcaatggttatactgttttcaggccatcaagtggtccttagagggttacgaagcgtacccacaaatgagtggtcactaacaaatgtaatgtatttgaggaaattgttgggtctttttagattggagagaggctgtaatctctcttataagaaaaacattttgtaaagagtgtttttgagttatttgcttccagctttattttttttttcttccagttcatgtctttgtctttgccttcctgggattatggataaatcttgatgaggtttgaacacttttgtcttaataaaataagcttgccatgcatcccctcattttagatgcatgctgcagaattccaaaaacaaggctataaccctatgagccatggatattaataggacagttaccctatatattttgaaaacaatgggttgtaatttattaattttatatcaggaggctatttttggc

SEQ ID NO: 124476 - DNA, 1636 bp, Glycine max
  Clone ID: PAT_MRT3847_8340C.1
ggctcgagctagacacaaaacaaaaagccgaggttccgggtggaccgcttcctctggagtggggcgggcacgcagagcagagggaggaagaaaggatcgaagagaatgtgggaatctattgttttgacggtagttgccaccgccggcaacaacatcggcaaaatccttcagaagaagggcactgtcattcttccccctctctctttcaagctcaaggtcataagggcatatgctttgaacaaaacctgggtgataggttttctaatggatatatttggggcattgttgatgttaagggcattagctcttgcgcctgtctctgtcatccaaccagtttctggctgtggactggcaattctctcagtcttttctcatttttatctcaaagaagtcatgaatgttgttgattgggtgggcattaccttggcaggttttggcacaataggtgagttggtgctggaggtgaggagcaagaggctgctgctctatctattttccacataccatggctggcatttgttgttttcatcttgtttataatgcttaatggatggcttcgtatatgcaaacgtaatcgaagagaacaagagatgatggaatatgatgttgttgaggaaattatttacggcttggaatctggaattttgtttgggatggcatctgtaatatcaaagatggggtttctgttcttggagcaaggcttccccaagctgttggttcctatttgcatcatcataagtgtctgttcaagtggtacaggcttttactaccagacacgtggtctaaaacatgggagggctattgtagtttctacatgtgccgcagtggcatctattttgactggtgtacttgctgggatgcttgctttgggtgagcgactcccttcggccccaaaagctcgctttttacttcttcttggatggctacttattattgttggcgtgattttacttgttggttcaacaaagctagtgagattctttcgattttcttcacaccactttaaaagaagcagcgttgataagaattatggccctagaagatctggaacttcccgtgttagggaacctagcccaactgctgtcattcaagcggctaccttaaatcatttactctcatcatcttccaaagaaaaagcttgatttgacttgagctggaaaatgatccttcatccattctcaggattcaccctcaccccttaaagaagaagaccccttttgtaaggctagattgtttgtgtacagtggttgctttatcagagggcatgaatttttagggatcgttccttccgactcacgtattttgcgtgaaaaatcattatcttttctgatgccacttgtataattcatgaacttccaatatttctcgatattgtatatgaagatggtatagcaagatgctgaatgctagcattgcatggaaacaaattgcagggtgcagtgcagaacaatttattcctaatttcctatgctaatgtagtagcagtgttctttgagattaggtctgatttctgttaccaagtaatacgagaaggctgtactttatcctctccgttgaagggaaatataatggaaagtttactatttgacatttcaaaaaagagaaaaatattaaatttccttttaatttaaagtta

SEQ ID NO: 124477 - DNA, 488 bp, Glycine max
  Clone ID: PAT_MRT3847_83410C.1
ccacgcgtccggtttagctgagaattcaagaacagaacctcgaagaggcaatggtccaaaacctgggtcagacatgaagatgaacgcgattaggtcagggatagtggtgctgggagctcttgcattcgggtacttgagcatagaaattggcttcaagccttatctggagaaagctcagaaccagaacgcgctctaccaatctgacccttctcaggaagaatcatcttcagctttctcagaacgcccttcataaccacacacactctgttcggcttaggagaaatggaaggaaattttgttgccccagttgtgtgttggtaattaactagttttgtattgttcaactttatttatctatttgtatttgctcacataataatatcatgcatctaccttgaggcttgtgtggttggtgatgatatcatcctgagttgttatacggttttatgtgtttggaattggcagtaatatttgttatcattactccc

SEQ ID NO: 124478 - DNA, 339 bp, Glycine max
  Clone ID: PAT_MRT3847_83411C.1
gtcgggggcccaaaaaacaaacattttaattaaattcgggtgggcccaagcaaaataccgggaaaacatttattttccccgggccccaatttaaatttttttttccaggtttatcaaataaccattttaaaatttcttatacctccaatttaaggggaaacaggaggggctttagaactttttcccccggaatttgtggggaaccctaatcccctccccaaattttttaccccccaaaccattggggggcctccccttccttttgaaggcgaaaacctcctccttttgcatgactttttttgggggagctgtttcatttttggggaccgccctccaaat

SEQ ID NO: 124479 - DNA, 281 bp, Glycine max
  Clone ID: PAT_MRT3847_83412C.1
ggctcgagccgccctttttttttttttttttttttttttttttttttttttttttttggtttatggatttttttatttttaattttggagtcataagtcagaccattattattaagagcctaaacagaacgccgggagaaccacaccgagccacgcggagaccgcgcccatcaacacagggaccacccaaaagccacaaacaaccagaggcgacgagcacaccggagacgggacaaaggagacacgaggtcaggaaaccccggaccgacgagaaacaaggc

SEQ ID NO: 124480 - DNA, 427 bp, Glycine max
  unsure (1)..(427): unsure at all n locations
  Clone ID: PAT_MRT3847_83413C.1
cggattcgtgtggatgacttatnnntacattaaatgtgcaggctctttcttcatagcattggggaatttggctgatgacactatcaattgtgaggcttttccccacaagctggtgcagttgggagagattcaggaaaatgttgttatgaaattttcacaagaggaatttcttacagcttgcacaactcaggtgcgtgctgcaacaactctgttagctgatgggtgtccatatcaggatgctatggtgcatgatagtgcagtgtctacagtaccaggcgattttgttattggtgttgagttgacaaccataaacaatatgtgtgcatatgggctcaatcctggtatttcaggatcttgtcttttgggaccattccttagtccattatacagcaaactgttaggaatcaaacgggaacagggagaacac

SEQ ID NO: 124481 - DNA, 425 bp, Glycine max
  Clone ID: PAT_MRT3847_83414C.1
ctggaattcggtttcaggcccttcttgagaagaatctggtaggggggtaaagtagcttcctttctcaagagcaagcactcttcaagcctgaacttgctagaatagaagctgcaactcctccaccacaaccagaaccaacaattactacatcacattatatattcagggtattgtttttagaatctatagcaacttcaagaccttcctcaataagagactaaggcagactcaaggtactctcttccattgcttccactatgcccttatcaagaggcctttatgtgtgaacattgctagttggcgtgatcccatcagagtcaacttgatatcctatagctgcccatgctgggtggagaccattgctaacacactgaacaaaagggagaattttgatgaggccactgcacaaacagttcgatagacac

SEQ ID NO: 124482 - DNA, 232 bp, Glycine max
  Clone ID: PAT_MRT3847_83415C.1
tgggatagcgaatacagtatgtctcggtcaccctgaatcatagatagaaactcaacacattcagcctagacattggagagcatcggcttaatgcaggttcataatcattgtgagatcaaggaatctttacaatcgattgtgtcatcagtcaagaactgagtcatggagtaaccctacaagtataagtccgatgttgtcatagatgcctcgggtcaacaggacaaagacattg

SEQ ID NO: 124483 - DNA, 385 bp, Glycine max
  Clone ID: PAT_MRT3847_83416C.1
agcgtatgcgataagacgactgactgcggcctacactgaatatctaccagagtgtgcttgaatatgtcagatgatcatgctgaatacatgctttacaagtgagaggagtcatcgagacgagctcagaatgagttgatttcacccttattgtaagtggagacagaagttggaaagagtattctacgttctaggaccatcgaactgttattatttgcccatgttatgctatgacgtgaagagtcagtattgaacagagcaggactagacagataatgatgtggatcaaatgatctaagaacgaactttcactttgaataatacggatcttatcaataaacatgagaatggggctggttatgctacccagggcattgcccttactgat

SEQ ID NO: 124484 - DNA, 270 bp, Glycine max
  Clone ID: PAT_MRT3847_83417C.1
ggctcgaggttgtagatcgcgagcggccgggcgagttgatggtcacaacttcattatgagaggagcaataacacggaaatgtactacgtttatttaggtactttgaaaacagagtttcgagagttgtataggcacaatgcaaaggaagctcgccaatcgctaaggaaagctttatctagcattgtatggacggtaaaccgctgatgtgggttccataacacaaattgttaagttatatcatgcgcaaatggtgctgaatgctcatgattt

SEQ ID NO: 124485 - DNA, 360 bp, Glycine max
  Clone ID: PAT_MRT3847_83418C.1
gtgcggaccgttctggaccgccgcacgtcgaagggaacagggtcaactaacacgtttacctgatcccctccaatcaagacagtccgccaacgggtctacaaccgcccaccatgttccgtctcataaccaacctgggaatcgcgcccctgaccgtcttgctcgtcgctacgtacttctccttcttctgcgccgggatgcttgaggtcatccgccccatccccatcatacagaacaaggtctctgcggtgaacctgaagccctcgcacagggtggccatctggtctcgtttcttccaacgggctgcggttgctataatcggcgctgcattgaccaacaccgtggtgtccttctacactgcac

SEQ ID NO: 124486 - DNA, 738 bp, Glycine max
  Clone ID: PAT_MRT3847_83419C.1
gagctcaatattttcatagacttaatctgagtcatcaatgaaactaatcatcaatttaaatcttaattacacttaaaatttctcttatctttctaaaaatatattttacatcaaattcaagttctttcctcacaaacttgacatacacccctttgcttttggaacatagccccaaacaatagggaaacgctgcaaacaatagaaaatccttcctcactccgtcactcggcataacagtgcttgatgcaactattctgcattttagtcataacattgacgagatttggtacgcaatacgacacgtgttatcttccgcgatattaatgcgacttcctaaagcctccattttaagatataaactccagatttatgaattgatgcatgtgaactgcaaagcgaactccacgcaagaaaaagacatctaggctgcaacaaagcaatcaacccacctgtaatgggaccatgcaatttatatagctttgagccccacagcattctctacaagaacaaaagtaccatacatgttgaggcttggcatattggaaaaagtacattagtagaggttcagctttcactgcctccaacattttcataatcaagactttttacccctcaacttctgccaaacaaaatctgtcaaggacaatcaccacggatagtttataaagcaggagaaaatagaggtacagattcaaattacattccagcagttgttatttacatggatatacaaaagca

SEQ ID NO: 124487 - DNA, 385 bp, Glycine max
  Clone ID: PAT_MRT3847_8341C.1
ttttgaactagaacctactttttgttggaatggtatatcggagatattttatactataaatttcaaatcaagttaaatcaaacattttattgagtgcaagaaaaagggtgattacagctaattgcaactaattagtaaccacaacataaattgccacatggggctgatgggtgtcacttaactagagtacaaagaaaacaaccgtatggacctattagccgcttgaataaaataaggcaggatatagaagtttccgatgacacgataaaacataggctgagatttatgtgacatgataattgttgtgcgatacaaatggcctaccagaaaaaacacattttcactatgacctttaaggctaacattttttatatcatcctatttc

SEQ ID NO: 124488 - DNA, 141 bp, Glycine max
  unsure (1)..(141): unsure at all n locations
  Clone ID: PAT_MRT3847_83420C.1
gatgggattgccctggaccagcagagttttggttctttgagagttctagttatacagtgtcatacagagagacctanagaaacttagaagctgcactggaagccagagcaggcattagtgagtcagtgtcccagcagcgag

SEQ ID NO: 124489 - DNA, 355 bp, Glycine max
  Clone ID: PAT_MRT3847_83421C.1
gaattcggcacgaggttggtgctgcagtttcagtgaggaataggttagcttacgttgggtacgcatcattggataatttttgttacagctcagagtttccgcggacggcgaaatattggacttgtttttttctcatttccttttacatttctttcatttgtgagttttttcttttttcttcttctttgtagttaacagtaagaagtggaagttgttgtaatttttggttgcacgatactttgtagagtcatgttttctgggcaaaaaaaaaaaaaaaaaaaaaaaaaaaaaaaaaaaaaaaaaaaaaaaaaaaaaaaaaaaaaaaaaaaaaaaaaaaaaaaaaaaaaaaaaaaaa

SEQ ID NO: 124490 - DNA, 268 bp, Glycine max
  Clone ID: PAT_MRT3847_83422C.1
ctctttcaagaagcatctgagtggatactataatgtaatatattcatatatagtcactccagcttcgaggatttatgactgctgaatcagaatgggaagcaacgtgaggtcaacaaggcttccactcttagcatcgactgcatcagggcatgctcaagtacaccgtgggattaatgcggacagcagcccataagctgatcgaatggacccaaaagagattcatgaccatatccctcaggctccatcaccagcagctgcattaataaga

SEQ ID NO: 124491 - DNA, 318 bp, Glycine max
  Clone ID: PAT_MRT3847_83423C.1
cggccggccttcactttttttccatcctttcctctctctctctccctctgcatttcccatgagcagatattaaaaaatggcactaggctgaagatattcaaccccttgtttgctacaatggaactggaatggagaaggcaggatttgcaggagacgatgccccacgtgcagtggttcctagccttgctggtcttcctccccacactgaagagatggttggtttgggccagaaagattcttgtgttggcgatgaggcacaatctaaacgtggcattctgactctcaagactcccattgagcatggttttgatagcaact

SEQ ID NO: 124492 - DNA, 473 bp, Glycine max
  Clone ID: PAT_MRT3847_83424C.1
tcgttcatgaatatgtcacgccttactctagtggttctaaattgaaaagctttatagctggtcataatatcaccattactgatggtatcgacaaaactagagcgacttggcaattaagaaagaatggcagatagagattttctcaagagaaactacaagcagatgtataatgtttcgtgggcggcttctgaggacaaggcgagactatggccacaacttcattatgtttcgggtaataataatcaaatgcaagaagcttatcttgtcaatctcgaaaatgagttacaagaattgtatatgcacagtccatacgaagactctcaattgagaaggaaagctctctctcgaatcgaatggatgcaaaaagctgatgtgcctaccatatcacagattgaagagtttcattcgatgcagaggatgatgaatgctcccgattcaaatgataatatagatctactgttgagcattgattt

SEQ ID NO: 124493 - DNA, 544 bp, Glycine max
  Clone ID: PAT_MRT3847_83425C.1
atcatccttaatgttacagacgttgtcaatgctgagaccatgtaccactttatcatcatcatgtgcttcatcaagaagacttgctctctttcaccttgtctccactggtggcattgctctcccacaagctcagttatttggtgcagaaaaactagcccaaccagagaagaatttgtttgactgggtcaaaaatgacaacagaaggtttctccatgttgtgtaccgtgttggagacttggagaagactataaagtatgctgtactttaattttggaaatgatgcttcattgatgctttagtataaatgtgtgtgaaattcgattcggtgatgttgtatgcaatttgatgacattgttggggtgctggttctacactgaatgccttggcatgaagctattgagaaaacgtgatatacccgtggacagatattctaatgcttttcttggatatgggcctgaagagtccaattttacagttgaacttacttacagtgagtttcagacttgaatgccactcctttctgcataatcgatttacaagagaa

SEQ ID NO: 124494 - DNA, 179 bp, Glycine max
  Clone ID: PAT_MRT3847_83426C.1
ggggtcgaaactgtttatttttttttgttgcatttaaaatagtttcaccgcctaaattaaaaattttaaccaaccaaatattttggatggccaacatcaaaaagggctccctttttgatatttaaatagcctcccgatattaacctttggcagccctggttcccttaattaatgatgac

SEQ ID NO: 124495 - DNA, 252 bp, Glycine max
  Clone ID: PAT_MRT3847_83427C.1
gcggttgctaaagggaaagctggtggtgaaagtttgatagcaagtgaacgattgattgaagctttggatttagctaaatcagaagaagaacgatgggctatacattgggaatctgtgaaaaaacatgcacttgaaggggatgaaaaaaaaactcttgacgaacccactcccaatatcttattacaaggacaaacatccgaacaatatgtatttcgtaccttatcacaagttcgttctgtggaattggaagag

SEQ ID NO: 124496 - DNA, 714 bp, Glycine max
  Clone ID: PAT_MRT3847_83428C.1
cataatgtagcattgctgaactctagaattacactgatgaatgaaattcttactcagaatgtgcagtaaacttagtccaacttgacactttgatacccctatttcaaacctgatcttcaaaaatcaatatcctacaaactattgcagtaacattttctagattcaagagaaatgctaccaacacttttttgaacactcttgaatacaatatggactcttgtggaaattacacgaaggaaaaaataaataaaagattaatcttaacaaataatatctaaacaactattgcatttataaatgcacaaaacagtactaacttctgttctatttataacaaacaagttgtaatatattttatatcacaacttgtttcttataaataggaccagaggccatatcaaaatcaataaaagttccattgaagtctcgtatcagttataaatgcaagaattgtgtaaaaattgcatctcacttctcacatatgcatgctacaatctcttcttttctccccatgccttttccctctcaccactttcaccaaactcaatttgtccatagcccccacaaaagctttaaaaaacttctgcttgtcctttgcaagatcctcaacaatgggcttggttcgtgggtccaaagccaaggtctggtcagatgccaacaagcccaacttcttttgcaagttaccataataggcatggtcaaataagaatgggg

SEQ ID NO: 124497 - DNA, 1593 bp, Glycine max
  Clone ID: PAT_MRT3847_83429C.1
ctaaatctatcctcatataataataataaaatgtatgtaatgtaatataaatttggctttaaatgtcacacacgaagacatgagggattgttcctgatttggctcgaagaatatgtgtgctgagaattgaatgtgtttattggttttaacaatgtagagaggaacccgttgttgattgaggaaggtggtttttgactttcggttcttttggttcttttggttcttttggagttgtcggtggtggttttggagtgttgcagaaatgaatgattctactgtgaagaatttggccatcacggagaagaaggtgcagcagcataaacctggtggttgtgttggcattttctttcagctcattgattggaagaggaaactctccaagaagaagctcttctccaagaagcttcttcctcctgctcgtgcaaaaaagtttaagggagatgaaaaaatgccgaattccaagcttcacttgattgctaatgagaacagtggaggttttcctggtgctaaaaaagttgggaatcatggtctagatgtagaacaaaagagtgaaatgcgagttccgagtctggtagctaggttgatgggtctcgaatctattccggcagctcagcgagacaagtccaagaaagccgtgtgtgctgatgggaagaaggagtcttcggctgatcatggtgagttggataggcaaggtgtcgatttggaaatgggagttgtaaaacatgattcaagacctcagaagcttcagaaaaccggggtgtatgagagaagggcagtgactaggtttggagctgaggcactgcaaattaagagtgttttgtcgcgagcaagaaaatataatcatcatcatccaaagcttgcttcttctttgaaaagtccgagagttccttctggaaaaagtgcttctcgaagcgctaggttaataggagcagctacaaaaattttggaacctggactgcaaagcagaagtagagctaaaaattctctcacatatcctgcttccttgtatcctcataagactggcattgtgtcaaatggtgtggaagatgggtcagcgattatgcaaaatcaatcttgttttgaaaccagctcatgcaagcaattgatggggcagacctcttgcaaaaactgtggtaatttgctagatgttcttgactgcaagcttgaggttgggagacagtcattggttcctccacccattgtttcagatgtgatcactgctacctctatggtatcattagagaagaagggaaagtcattccctcctcatggacatgaaagagatgtagttcttccgagaagtcaggaaaagctcatatctcttgttactgaaggaaaaggaaaaaataatgcacaacaatcatggagtgaacccactgccagaagaatgccaatgccccatgacggtccagctaaatggaattcatcttgccaaccatcaagggccctagaggatgatgcatcttcttttgccttaaaacacaaacctcaaccacaagaacagatgttaagcagtgaaagaacgtcatctggatctacaacaagcgatatgcaagtaaaaagggtattgtcatctatgagtgctgtgaatgg

SEQ ID NO: 124498 - DNA, 740 bp, Glycine max
  Clone ID: PAT_MRT3847_8342C.1
gtacggctgcgagaagacggaagcagggggctactgactcacattacacacaccacctcgcactcgcagggacagagagtggggaaggaaaaacacagactaaatggcgccaaatgctctctttctcttctctttcctcgccatgctcctccttctgctccgctcaaccgccgccggccacaactaccgcgacgccctccgcaaaagcattctcttcttcgaaggccagcgctccggcaaactccccgccgaccagcgcctccgctggcgccacgactctgcattgcacgacggcgccaccgccggagtggacttgagtggagggtactacgacgccggggataacataaagttcgggtttccgatggcgttcacgacgacgatgctgtcgtggagcgtgatcgatttcgagaagagcatgggggcggagctaggtaacgcgttgaaggcggtgaggtgggggaccgattatttgctcaaggccacggccaagattggctccggcgttgtcttcgtgcaggttggtgacccttactccgaccataactgctgggagagacccgaagacatggacacgctgcgcaccgttttcaagatcgatgggtcccaccctggctctgacgtggctggtgaaacaacccctactcttggcctgaagttccgacattgttgacttaaacaatggggtccaattcgttgaaggattatcttaaaaggttcgaaagtaacccttaagaagg

SEQ ID NO: 124499 - DNA, 407 bp, Glycine max
  Clone ID: PAT_MRT3847_83430C.1
tgctcgagctctagccgaaaatggtatatgcatgtaggggctgtacaacctgtagagcgagccctggtcatagatgatcttattgtcactgggggaacgtttggtgctgtaattaatcttcttcaacgttttcggggcgtattgttcgtggattgcgcttgtgtgattgaattgccagagttaaaggggcgggaaaggttgcgagacatagtgtttttagttttgattaatgggggagcctgatctatttccctagtgattgtgttattattagcttggtcttgttaggatctttattgataactgcttagatctacttaagatacattctgatgctgtggaaactgaaagcttgcttggtttgagcgcgctcagttctggtcaaattataattaccattatcttct

SEQ ID NO: 124500 - DNA, 588 bp, Glycine max
  Clone ID: PAT_MRT3847_83431C.1
gagttttcactctctaaagaaagctttcttctctctcttttcttggcatgagaaatagtcttcaagggagtagataaagacacaaacactaaggactatattaagtactaatagagtccacaaacctaatttttgtgactttatttccatgatcatatgtgcaggtgttggggaaatttaccataggttgttgagtttagatggacagttcatccaactttgatgacaactctgatgtggggtaccaaccttcaccttcttctgtggatcaaaatgatcattcaatcaccgaaaccgttggatactcccctttattaagtggcgaatctttcgcgtattgccggtctaattcggaggtctctaacttctctgagcccattgatgacaatagctttgcaagtgatcaaccttcaccttctctatggacaacaatgaaacatggagctagccaagcttctctttcaagattaggaatgaagcagcacagaaactcactggatgagaaatctgatgaccttgacctcttagagacaggttggtttgcactcacagctagtgaatttttcctaggcctaaatatgtttaaag

SEQ ID NO: 124501 - DNA, 443 bp, Glycine max
  Clone ID: PAT_MRT3847_83432C.1
gagttttcactctctaaagaaagctttcttctctctctttttttggcatgaaaaatagtcttcaagggagtagataaagacacaaacactaaggagggaactgtttcaaatgatgtttattttagctagccactattcaaattcaaaccaaagccattaaaaaggtgttggggaaatttaccataggttgttgagtttagatggacagttcatccaactttgatgacaactctgatgtggggtaccaaccttcaccttcttctgtggatcaaaatgatcattcaatcaccgaaaccgttggatactcccctttattaagtggcgaatctttcgcgtattgccggtctaattcggaggtctctaacttctctgagcccattgatgacaatagctttgcaagtgatcaacctttaccttctctatggacaacaatgaaacatgga

SEQ ID NO: 124502 - DNA, 278 bp, Glycine max
  Clone ID: PAT_MRT3847_83433C.1
gtacgtaagctcaggattccgatcctgaatggttcaaagtcgacgtcaaatgattccgacggaaaggggttgaatcacttttagaccagtttcaggggttgtccaagcttttactaaagtagtcctatgagatctccggtgacttcaggttcaatgagtattctgtgtgataaatgctaccgctcagtattcgtcacactaggtaacccgaaagcatcaagtctttggcctgaggtgcccattgactgagctaattcacatcatttgccatgtgcgca

SEQ ID NO: 124503 - DNA, 440 bp, Glycine max
  Clone ID: PAT_MRT3847_83434C.1
tttacatgtaatggactggcttggccaatagattactgagtaagggcaccgatattctgtgtcgcgatcatgctagatttgatggtttgattaccaagcaagctatgagcaagatggccgaaacgataaacagtctatgcggtggtgatgaaaaactgatgcgtgaaaggacacacatgttgttggctagttgttcaaggatggcattttgctaaaaagatgttcgtagagttgaatgtgaaaacccttctggattttcgctcacagttattcgcaatagcattcttaatgagatgctcattagatatagctatgaaaaattactgcgccaggctaaagctgcaagtatgtttctacaatccttaaaagattcttctcttttgtgtgtggatggtgatgataactaaattggtgttaatgaatatgtctaggcatacttt

SEQ ID NO: 124504 - DNA, 574 bp, Glycine max
  Clone ID: PAT_MRT3847_83435C.1
gtctcgactcacgactcaaaaaaaccaaggcatcaaatcaaaccctcaaaagttctctctctctctctctctctccttttatatcatcatgttcttgtattgctctagtctcctctgagagaccttggagatttttccaccaacgcaaggcttcaacctccgctacgaaagcatgaggctcgccggttgaagtactctgaaggataagttccaagtgatcgacgctgattccagagtgaagcgctttctttctttccaccatggtttcgctagggttttgtcctcgcttcgtttgaactctggacgttgtttaggggttaggttttttctcttatgttcttgtctctggaaccgagcactgaaggatgttgtaccacgttgtgccaaagtcgaagttgtgcgcggtgcattgcgcgaacatcaagttcttctcagagtttgatttggctgctcttgccttcgatgtcgattataggagcattttattctacccgcactctcctctgtcgattttgaatcgcacaatgtctccttcggcagaaattttagcatccaagattgattaggggttcac

SEQ ID NO: 124505 - DNA, 227 bp, Glycine max
  unsure (1)..(227): unsure at all n locations
  Clone ID: PAT_MRT3847_83436C.1
ngcgnngcacgcgnacgnaagcacggaantcggcncgagaannacnanaggangagnnnnccaagacnnccngaaagngcagagcggngnccncanggngaaaanccacngcgatggntgngngcaaaaagncaagancacngcagcagaaaatcgaaggngnncanncngtgagaannnngcagatgaagggaaagnggnagtggcaggagacgtgganccagcgn

SEQ ID NO: 124506 - DNA, 736 bp, Glycine max
  Clone ID: PAT_MRT3847_83437C.1
tgtctcgttgaatatgcaacttttcggcagtacatgagggaacttccgaagaatgcacctcagaagctgaattttcggaagatgcgtcaggggttgattgccctagggcggcactgcgtaggtagcagatttgaaacagatttgtacgagtcggcgacgagtgaactcatggccaatcattcttgtctttcagggcgaaacatttacggtgtggattccttttcgttaaccagtgtcagtggaacgaccgccactttattgcaggaaagagcttccgagcgctggatccaatggttaggccttgaaagcgactaccattgttcctcctccagtactcggaatgcgggagacgtagtagcaggtcaaatcatcatcaaaaatttttgagggtaacgcgaaaaaggccccgagagcccaagagtacaaacgatccccttgctagcgctaatttcacagacaggatagctgcgtggaataatattgttgagtgcacatttaggaccaacaatgcaaagttgggttacctcattgtagatgagtttcacgacttggaaacggagttctaccggcagtcgcaatttggggggcatgactaacctcgattttgacgctttcgagaaagcaatctctttgagcgacacagcacctgaggctgtagctgatgctgcgttgcagcgcattgggcttacgagactgaccaagaaatcgatggacatcaacgagctcaatcggtcgg

SEQ ID NO: 124507 - DNA, 554 bp, Glycine max
  Clone ID: PAT_MRT3847_83438C.1
gagcaagttcatagcaaaaaccgcgggcaacactatcttgaacattcctcgaaaagtttatgcagaaccagttgttaactgttcccccattaaccattttcttattcatcatattccattgcccaacttgaggaagacaatccttttctctgcccgtatcgtgatatttgagccatggagcaggaaggatgcgagcttcaacttgagcaagcttctcactgatcttgatcccaaattctttggcataaggatcttcatggtatgcattgtggtgtactgtctgcatgatatcacgctccctctcaacaggacgctggcatgtaactttcagcaaagcggtgatttgcctctcattaagcctttttgagtacctttgaccttccactatcttgcaaacctccattggcaaatagttaggtctctgtgtattgccaacttgcagacaaggccactgagtatgttgaatgacaaacccatatgtctcatagaagcactccacaacagatttcatggttcccctttcatctactgggaatgtcaattctctggttgcc

SEQ ID NO: 124508 - DNA, 304 bp, Glycine max
  unsure (1)..(304): unsure at all n locations
  Clone ID: PAT_MRT3847_83439C.1
ccgggaaccagngnngaagaggcnnacaacaagcnaanagnngaacnngagaaaagggnnccnacaggggnnggcanngaagggcccaaggangagaaacnnccncgncgcaaaannnnggacaaaccnaagacgcgcngcnncacnanncncccnanggaggggaancngggggnccgncaaaaggggnnaaannnngngaggggcannangaagaaaagggacaaacnnagnngncaagggggaancaacccanacnccanggaaaggacgggnnnggccaanagannacggagnaagggca

SEQ ID NO: 124509 - DNA, 733 bp, Glycine max
  Clone ID: PAT_MRT3847_8343C.1
acttcccgtgttagggaacctagcccaactgctgtcattcaagcagcgaccttaaatcatttactctcatcatcttccaaagaaaaagcttgatttgacttgagctggaaaatgatccttcatccattttcaggaatcaccctcaccccttaaagaagaagaccccttttgtaaggttaggttgtttgtgtacagtggttgctttatcagagggcatgaatttttagggatcattccttttggctcacgtattttacgtgaaaaatcatcaccttttctgatgccacttgtataattcatgaacttccaatatttttcaatattgtatatgaagatggtatagccagatgcagaatgctagcatatcatggaaacaaattgcagggtgcagtggagaacgatttattcctaatttcttatgctaatgtagtagcagtgttctttgagattaggtttgacttccgttaccgggtaataggacaaggctgtactttatcctctggaaactatcatcgtggcaaaagtgctgattccatcaaaatttaggccacaaaccctccgttgaagggaattataatgatgatttgatcctgattgttaaatgagggagagtttactatttgacatttttaaagtgaaagggtatatttatttccttttaatttaaagttaagattgtgaggtattttaatcaaaatcaaaaggtagatatatttttaccttttccctttcc

SEQ ID NO: 124510 - DNA, 234 bp, Glycine max
  Clone ID: PAT_MRT3847_83440C.1
gctactgcaatgcatgtggagttctatagatattatctttgatagtttcgcaagtcctgattgtaacatagttggtgcaatgcttatggttgatacttatcataccaatcctgaaaatgcagttcgtagtatttttgatgcgcctttcagaggaggcaggcccattcgggcggttacatttccgaatacctttgtgttactgaacctagactgacttcaaggttccagcttttg

SEQ ID NO: 124511 - DNA, 433 bp, Glycine max
  Clone ID: PAT_MRT3847_83441C.1
cttgacctcctcatgcataccttcacacatttgtgatttggtgctcgatagtgaaggtaaccttctagataatggaggcacatattatatcttgtcagacataacagcatttgatggaataagagcagcgccaacgggaaatgaaagatgccatcttactgtggtgtaatctcacaatgagctagacaaagggattgtaacaatcatctcgtccccatattgaatacgctatatcgccaaaggccatcctttgagccttaagttctattcataggcagttatgatgctgtgcgcaggaatttctactggagtggcttgtggtgaggatctacctaatggacttgctgttaatattggtgagaacaaagatgcgatggatggttggttcatatttgagagaggctctgatgatggattcaataactatattctt

SEQ ID NO: 124512 - DNA, 233 bp, Glycine max
  Clone ID: PAT_MRT3847_83442C.1
gacagcaaaaacaattaataaagatgagtttgaagaacaacatggtggtgctaaaggtgtgtttgttgcttcttttccttgtgggggttagagctgcacgcatggaactgagcttcttcagaagtgatcagtcagcaggtgaggagcaggagtacgcaaaaccatgcggtgatctctgcatgtcgagacgctcaatgccgcctcaatgcggctgtgaagatattaggctgaat

SEQ ID NO: 124513 - DNA, 656 bp, Glycine max
  Clone ID: PAT_MRT3847_83443C.1
cggtccggattcccgggtcgaccacgcgtccgaagaaggcccctgaatcagggccaattttgatttgtgatcgagaagcaagcgggaaaaagaaatcgaaaaagttttgaaaaaaaaaaaaacgctctttctctctcctctcgttgctgccatagttctctactcgttctctctctctctctctagtctataccacacaagcttcgaacttgtcagcaccccattttgcgtttccaggggaatttcaaaaccctaattttcgttttcggagttctctaactcctcgctggaaaactgaaaccctagggttttccccctttttggttcttggcgtctaaatttgcttcattttcatgatttgtgtagcgatttcttccacttaagatgactaagggtacctcgaaaccggggggtagtggaaagcggtggcttccacgcggttcacgcgggagcgtgacctagaatcgaattgggaagttgacctcgccaagaaacttgaggagtatttgcttaaaatttgttccggcgagatcattggcgaagaagaaggacatagtcatgtgaactttcccgaagctgctctgctgcttcagggttccattcaggtgtatagtcgagaggtggaatatctctacaccttggtcttgcgggctgtt

SEQ ID NO: 124514 - DNA, 493 bp, Glycine max
  Clone ID: PAT_MRT3847_83444C.1
ggaattatttattccaattggatgagtaagatgttttttaccctaaaactttaaagttcttttgttagtttcaactttacttaaaacttccattttatttttatcatttttttaaaaatagaatggatggtttttggaaagtcaaacctaaatgaagaactttaaaattctagagactaaaatattcgtctcgatcatacaaggttactttgaaggtttatccctggaatatgagacttgtttctaccacgtccccttctcaactcgtgctctctatcgtggtggttctcttacaatgttttcggtaagaggaatcatcatcaacttaaaaaagcattcgcgtctgttcctttttatttgcagacagaagctgctactatagcctctgattaagtaacgttgtctacgtcttctcgtacaaatagaagatgcagtgtgatgtgaattttagtgtgcataataaaatcctgaaaaaccagttgttttttatatg

SEQ ID NO: 124515 - DNA, 296 bp, Glycine max
  Clone ID: PAT_MRT3847_83445C.1
ttcatagggggcctttcttcacaaactgtctatcgtctttggcaaaaatctgcaaccattctaccatctaacaactttttcacttattctaacaaacttgtcactaatttgtataaaggttctattttctgatctaatccgcaccatgctgtcacatttgggatcataattgaatattatcattaactatatctcgttttgatattttggcttaaaaaaaagctatatattattttattgtataatggcgataattattcccgtgcatttctggctgattttgaatgttttatttt

SEQ ID NO: 124516 - DNA, 996 bp, Glycine max
  Clone ID: PAT_MRT3847_83446C.1
ctacaagcaatcctacccgggataatcttggaggagtaatttcatctcctgagggcaagaggagcatgatgaaacttgctcaaaggatggtcaccgatttttgtgccagcattagcacatcaagtggccatcgatggaccacgctctctgggttgaatgaaatcgtagtaagagtcactgtccacaaaagctcagatcctggacaacctaatggtgtggtgctaagtgcagccactaccatttggctccccacccctccacacactgtctttaatttcttcaaggatgaaaacaaaagacctcagtgggatgttctttccaacggtaatgccgttcaagaggttgccaacatagcaaatggtttgcaccctggtaactgtatatcagttcttcgagctttcaacaacagtcagaacatgttaatactacaagaaagctgcatagattcctatggttcactttgtggtttattgcccagttgatctgccatccatcaacacagcagtaagtggtgaagacccttcatacattcccctactaccaaatggatttaccattttgcctgatggtcagcctgaccaggaaggagagatggagcatcaactagctctaacacagacaacaggaatatagtaaggtctggtggttcactagttacaattgcattccaaattcttgtgagcagcttgccatctgctaaactcaatatggagtcggtgacaactgttaacaatcttattggctccactgtccagcaaataaagtcttccttaagttgtcctaccctacctagctagttcctgatgcatcaatttgctcatgccatccttaaatatatatgctctccatatataagtggttcagacttcacgatctatttctgcttgatgggagaagtaatattttttggtttagttgggactttgaatgctttctcatctgaagaaaaagcctcattatttactattgctagttgttggagtggtggtggtggta

SEQ ID NO: 124517 - DNA, 347 bp, Glycine max
  unsure (1)..(347): unsure at all n locations
  Clone ID: PAT_MRT3847_83447C.1
caaaacttaggttctctaatttgantatagnattgatacccttgttcctcaaaattattaatantntncatgntatatatattgtntanngaatcatgtnttgaactagagttttgngctgtngcaacnngcaagccctttcttctttagatgtctaattgtttgcgactaagtggaatctgtnagtgnggagatcancctccgngtnnccanagaagtgtgtntngctnaggaggaacngnncgtggtggnagtccatgaganatntcngngtgttaacatncaggatgaagcatctggannaaatgaattntnaaggaatatgttctgaagccaatnangagtct

SEQ ID NO: 124518 - DNA, 752 bp, Glycine max
  Clone ID: PAT_MRT3847_83448C.1
ccacgcgtccggaagaaagaagcaaaaatcaaataagctaaaattagcttatgtataaactactttatagaagccttttcatattagcttctcctaaagcttatttctagcttatggggaagcttatttcattttgtcttattttcttctcctataagtgtttatggagaagtttatccaaatagggcatcaattacatttcgttcattgttgtttatttaattttccatacaaagtctatttatatcctgccgcagattatattcgaacttcttgtcttaaaattttctgtattaactgccatgatctccatcattgtgtatttttaagcaaatatgctatcatacttaaaagtaaatgttctcttcaaataattgatgtttgactcaattcaatggcatcatttgatctatgccgtggatctcacctagtgggaaaaggttatggttttgctgacattgtaattccatatatagttttaaaagaataatggatataatattctagagacccatgtactcatttgcggtaccttcatattttggtacaggcacttctgcattcttcccacatgtatcatgaggctaaacatgcatttgccaaccatggggtcaagttttcatctgttgaggttgatttgccagccatgatggcccaaaaagataaagcagtttctaatcttaccaagggtattgaaggtctattcaagaaaaacaaggtaaactatgtcaaaggttatgggcaaatttgtt

SEQ ID NO: 124519 - DNA, 199 bp, Glycine max
  Clone ID: PAT_MRT3847_83449C.1
atcttaatatgtggacatggaagaggttgaagatggtagaccatccaagaggaaaggatctactccgagcataagccgatgtcagaaattacttctggtttgcatcgtggaatatatcatcaagggaaacttcgtgttaaccgttataatccatttgaagcatatgttgggagtgagagcattggtgatgaaataatta

SEQ ID NO: 124520 - DNA, 105 bp, Glycine max
  Clone ID: PAT_MRT3847_8344C.1
ttgattgattgtaatgttttggatccttggttaccctgatcatagtttcaaacaagcattcttacccgaaagaaatatatgcattagagaaatcagtattggttg

SEQ ID NO: 124521 - DNA, 722 bp, Glycine max
  Clone ID: PAT_MRT3847_83450C.1
gaattcgagctcggtacccggggatcctctagagtcgacctgcagttgctctgctagttgttagctgttatacgcagcaagtgcacactcatctgttatataacagaagtaactaacgaatcagtttaactgttcagttaaatagtgatcaaaactcaaactgttttgttacaactctgttcaattgaactgattcagttgcaacagtttaggttgcacagtttcctgtacatttagatttgcactcagcatacaaatctaattcttttcttgtaccagaaacacagttataccgaaagaatttcaggctctcactcaattttctgtccttttctctcattctctgttcacttgaacttcaacaattctataatctatatgtcaatcttagttattcatgctgtcgaagcttgaccctattctatgtgaagttatgcttgctacttttttttttattgatttgaataatgaagaaaaaggaagagctctactgatgactcaaatgtgagcacaaagatttcgatggagagattgacaacatgaatatattaaattgcataacctcttttatttctaatatgaatattacgaaaaagtttgaatgtatggaattcttgacgtatttattaacttatatttggtatctatttattgtcaaatggaattgcagcactttattttgtctatgtattatatgaattaagggtttgagctttaagtct

SEQ ID NO: 124522 - DNA, 531 bp, Glycine max
  Clone ID: PAT_MRT3847_83451C.1
gatatataattatatatacagatatgaacgaagcagattggtttctcctttttttccctttttccttttaaggccttcggcccaacctctgacaaacatttcaattaccctttttttttcccctccttttccttctttaccctctactttatctatctttagattcccaattttctctacgaaaggctcccctctttgaaagccaaatctgcaacctcatccaatttttcctaaacaattttggatgagcaagcaaccccctaaatctaaggagtaaaaaattacaacaaaaaaaaaaaaaagaaaaaaagaaagagttatagctgcctatattttacagatattcctttcaaggaactatttctcaaagaaaaactgcttcgcagacgattaaaccatgacaatttcatctcacccgagccagtgcattgaccctccccttccccgtcactgctgaaaagcgtctgatcagagcagtcaagtgaagctccacatgctagattataagactggcatgcagaatggcacact

SEQ ID NO: 124523 - DNA, 393 bp, Glycine max
  Clone ID: PAT_MRT3847_83452C.1
aaaaccccaaagggtaaaaatctttttgggaaaaaactttgaaaaaacaaaaacaaaaaaatcacgggggggggaatttttactatctctaacaaaccaaaaaaaattcccagacccccacggggggccaggaccaaccccaaaaaaaaaaaaaaaatctaccccattggcgggggaaaagatcagggatcaagcccattaggcccagcacaggaattgaaaacgggactccccagcccctgaaaaaggaatttccggcggaccccattaatgttaaaggggggcccctttcgagggggaaaaacccggccgggggaggaaccccccccaccggggccgaaaaacccctcaaaaaaaaggggaatttcaaaggggaaagagggggcccgaccc

SEQ ID NO: 124524 - DNA, 119 bp, Glycine max
  Clone ID: PAT_MRT3847_83453C.1
aaaatcaagatccttcttgttcacccacattctatcttgggtggcttccatactcttcttaaacgaatcgcttctgacttaactctcaatggttacaccgctttcacctttcacatgat

SEQ ID NO: 124525 - DNA, 617 bp, Glycine max
  Clone ID: PAT_MRT3847_83454C.1
cggtctcgtgggcggacgcgtggggtgaggataagttgctggagacaattgtaacttcaggaggtgttcgactgcaacccactcgagatgccattcaagttttcctaacagaggctgcaaagttggatgcactggctctatctcacgcccttgagctgaagcttcaatctccaatttggcaggttcgcatgaaagctgtttgtgtccttgaggccatccttagaaagaaggacgatgatcacttttcaccagtggaatcctacttcactgaaaataaagacgtggtgctgagatgttctgaatctccccaagcctctttaagggaaagggctatgaaggttcttggccttttaggtggaggccagccaaacagctctacagttaattcagagaagactgtgaaaacagagaatgctactgttgctgagttgcctgacttgatagacactggtgattcaaatgattaccatggaactgatgacactctaaagggtacaagtgatcaaaatatagcaaatttgacatcatcaactcctctggttgatgatttatttggagattttagtgcttctattggagctagtcaagaactaaaaaatgatgattcatttgctgat

SEQ ID NO: 124526 - DNA, 936 bp, Glycine max
  Clone ID: PAT_MRT3847_83455C.1
gtcttgggctaagaaacgcttcccaacattagttgcatcgcattacgttgctgacaagttgtctcccttggacttggacttggacttgttctgttcattaagtgctcattttttctttgagggtgccttgagtttctttccattgccactgttttcatcattcttacacatttcttaacatttttgttggtttgtgtcggtgttgcacaacacaacttcttctggggttgggaagttggtgtagaagtttttggtttttgtgctattgggttttgagaagtttgagttttggttgctgtagtgcattaaagttggttaagttaattgtagtaggaatagtttaataatggcaggaggaggagctgcaccacaaccaaagcaagacgagcatcaaccacatccagtgaaagatcaattaccaaatgtttctttctgcattacaagtcctcctccttggccggaggcgatcctacttggtttccaacattacctggtgatgcttggcacaactgtcctaattcccagctctcttgttcctcagatgggaggaggaaatgaagagaaagcaaaagtgattcagactctactgtttgtggctggcataaacacatttttccaaacattcttcgggactcgtttgcctgcagttattgggggatcctacacctttgtgccaacaaccatttcaatcattttggctggtcgctacagtgatgttgtgaatcctcaggagaaatttgagaggataatgcgcggaacacagggtgcccttattgttgcctcaaccctccaaattgttcttggcttcagtggcctttggcgcaatgtagtgaggttcttaagtcctctatctgctgttcccttggttgctctgtcccgctttgggctttatgaacttggttttcctgtgcttgcaaaatgtgtggagaatggact

SEQ ID NO: 124527 - DNA, 2024 bp, Glycine max
  Clone ID: PAT_MRT3847_83456C.1
gggagaattaagcaaggacttaatagcttaacgcagggacattcgctaatgaagaatgatcctggaagctacaagagtccaaatcttcgaaggtcgttgaccaatgaaacagaacatggtgacagatatgaactggttgcatatcgtaatgaaactcagggtagttttggagcatcaaagagtcaatctactggtccttggaatcaggattcaagagtaactaaggtggaaacatcaaatggggaatctagtgcaagttatgtagagagtaagacaagtgaggataagttgctggagacaattgtaacttcaggaggtgttcgactgcaacccactcgagatgccattcaagttttcctaacagaggctgcaaagttggatgcactggctctatctcacgcccttgagctgaagcttcaatctccaatttggcaggttcgcatgaaagctgtttgtgtccttgaggccatccttagaaagaaggacgatgatcacttttcaccagtggaatcctacttcactgcaaataaagatgtggtgctgagatgtttttaatttccccaagcttctttacgggaaagggctaagaagtaatgaaaaaaatagggaactaggaagaataaaaattggtcattaacttagtaatgacattcttgaagattatggtggaggtcagacaaccggctctaatgtaaattcaccgatgccagcgaaaacagagaatgctattgaagctgcgttgcctgacttgaaagacactggtgattaaaatgattaccatggaactgatgacactttaaagggtacaagtgatcaaaatatagcaaatttgacatcatcaactcctctggttgatgatttatttggagattttagtgcttctatgggagctagtcaagaactaaaaaatgatgatccatttgctgatgtatcatttcacacaaatgagaacaaagaacatgcagatgatctcttttctggaatgactgttggtagcaataagcagggcgatcatgagagtcacaggcaggggaatataactgaacctcaactttttgacatttttgcttccaattctgaacaaggaaaccataaggagcctgttagtgatttaatggccggtctgtcaatggatgaaaatacctcaagtacgaagcagaagggaacatctcctttcatgcaatctgaatctttattttcaggtttgaataaccatatccctgacaatacttcaggtggcatgttgagctctcagccaatggggtttaatgtaaatcctatgtttcccactggtcctatgccttataatatacagcctggtttcatgttgaaccaaccttattcttcccagcccctcaattacagtgccatgggaacccttttagctcaacagcaattcctggcaacaatggctaatttccaacaccttagtaatgtcaacatgcaagatgatggtgttgctcaaatggctggacccaatggaagatcacctttgccagacatatttcaaccaaattttcaaactcaaactcctagctcaatgatcaacacttcaaggaaagaagaaactaaagcatttgactttatctcggaccatatgacctctggtcgtgattcaaggagaatgatttaaactttctatcttgtgctgttgtggaggatatttacggtgtggaattgatggattgacataatagatcaaacagtttatagtttccttacctgtgcaaaaagttgatttctcttgccgtgatggagcattataaatgacattctacatgtccatgttgacaacaaaataataaaatgagaatacgttttggacatgaagaagagattcaaattggttgcgcttttaattagattttagcatgagaatgttgtgtagcactgtaatgttatatttccatgagtatgttgtgtatgtagttaatggttgagattttgcaactgtaattcaggcgtcaagtaaaatacaactctcagattttgcaaatgtccatttatattttttgttacaaaaa

SEQ ID NO: 124528 - DNA, 233 bp, Glycine max
  Clone ID: PAT_MRT3847_83457C.1
gcaaaccacctattccaatgattgattcataagctcggtgttttagatttaatagagaccataaggtgaaaaaaaaagcaaaagacctcggatttcagatcacaagaatctctcctgagatgtatacatacaaaaagcgagcctccgaattagcttataatacgtagctacaccacaaaaccggaggcacgttacccctacggttacacataaaacaatgccacaaagcttag

SEQ ID NO: 124529 - DNA, 346 bp, Glycine max
  Clone ID: PAT_MRT3847_83458C.1
ctcaaacctaccacctgtctttaggattcttgtacttattaaccaccctgtgatcgcagacgcaacactctcgctggacacttcctttcacatatggcttctcacgacagcatctacgctcttccaaccttcgcttatgatctcgactacaatcacctcaatcgcactcccgatgatcctatcctcggagtaactgtcgcttatgacaaagatccaagtccatttaatctcaacttgtgatctgacgcttaccgaactgatgaacgaaaacctaccgttgtgaatgtacagaggccagttgaacagcaactcataaatgacgtttcaatgcacagggaatatattc

SEQ ID NO: 124530 - DNA, 289 bp, Glycine max
  Clone ID: PAT_MRT3847_83459C.1
cgccacccacaaaggatttaattttatagcacgtagctcaatacaggctttccatgatgcaaaagctctgacgcaacacaacccttttgtgtaaggctgctcttaacagaggaccttccaaattagaattaagctcgggaactgttatcgtaaagatccatatatggcccaattattattcttgtctacctgtaaacacagaaacttgggggaactgggctgaacccggaatcacttgcagctactgagaccaagaccaacgtgggtggctcttgtagtgtggatatta

SEQ ID NO: 124531 - DNA, 630 bp, Glycine max
  unsure (1)..(630): unsure at all n locations
  Clone ID: PAT_MRT3847_8345C.1
ctagcttgcatgcctgcagttgacccttaaacaagtagcactcaaatctgacaaaaaaataacagaaaacacagagaggcaggttgagtaattgaattncattgtcgttatacacacaaaaaaattatataatgtgattttgtcattctgatggtctttcttttccctatttctcacaaaagggggatttttacaagtcgagacaatgcctattagtacaaaatgtctccactaatctgtctgtctcctacagtgagatttactgtccactcaagcgagaagttatgcgttggaagacatattcgctgcaaggaattgtgagaccacccatgggatgatcatattcaaactcttcctccgcttggttcaacaattcttggaatgaaggttggttcaagtatgatacagggatcacaaaacgcctcattttctctccaacataggctgcaagatagccctttggcatttccactacttttgaagatgcttgatttgcagcaaataatgcccttctgataccaggtaaacggaaacccattgttatattgattgtgttagagactggagaagagaatcgtctaagactttaaaatanacttttgaattttaatgctncaggttgtgaatgat

SEQ ID NO: 124532 - DNA, 212 bp, Glycine max
  Clone ID: PAT_MRT3847_83460C.1
aattcggctcgagacttgggccttatcaaaccaccattggatggagaagaagggcttggcttttctcagcttttggatctatctagagtcccaaaagtatatgtggaatgtagttctctttttcaagagtcaagagagaagattccttatctggaggtggcgcctcttttgtcccccgatgtcgctagcttttgtgctcaccccgttatttg

SEQ ID NO: 124533 - DNA, 184 bp, Glycine max
  Clone ID: PAT_MRT3847_83461C.1
ctctagcctcatcttctctacacctctgcgaaaacaccatcttaagggcgacgcacattcagtttggcttattcaaggcccgcatgagatacaatatatacaatattaacactcttcctcactcattcagattctacactacactccacttaacacctccattatcaacttaacacttccacat

SEQ ID NO: 124534 - DNA, 357 bp, Glycine max
  Clone ID: PAT_MRT3847_83462C.1
ttgccgtgctacacgtgtgcagtgccgcctgcttgggggggggggggggggggggggggggggggggggggggggggggggggggggggggggggggggggggggggggggggggggggttttttaaaaagaccggcttgggttttgttcccaaaaatgggggggggttaaggtttggggttaaaaaaaaagttgaaaggtgggcccattttcccaaaaaaaaacccccttttggcccaagttttttaattttcgcccacctaaggaaaggaaaagccccaatttggggccaaaatttggggaaaagggcccccattttgggcccttaaaaaaccccctctgaaaaagtgtatccgg

SEQ ID NO: 124535 - DNA, 383 bp, Glycine max
  Clone ID: PAT_MRT3847_83463C.1
tctgctttgcgttcgggtggatcaaaactcaaccgaaggaactggggtgatggagggagtgctatttattcaaagaatgcctattcacaaggcaattaggcaatcaaagacataaggtgtcagatataatgctttatgagtttaaaaggtttcactgaaagaaatgagatttgccgttattctaacgaggaagacagttaataaatactgcgaaaaatgaagccgaaaagtcggacctcctatggggaggaactcttttggtgaaaatgatgaggaggcacgaaatgcgctataggctatatgaatgcgtgtctgccacgaaaagaaccgagacagttggagaaagagaaagggcatataatgcattaaaaacaattgaacca

SEQ ID NO: 124536 - DNA, 269 bp, Glycine max
  unsure (1)..(269): unsure at all n locations
  Clone ID: PAT_MRT3847_83464C.1
atttatatgtaangnnnattanngcttcctncttnnatanatacncagcacagncatatanacagaggcagagagcatgnactatgacngtgctgngtatttatcaaagtaggaagcataatttanatgtnnaanaaatggccaagcaatataaggttaaaacttacgtaagtaaccattacctatcttgtattncncaagtgtttttnaaatctggctttccaaatatgaacactatgtnaaacatngnanaaannaangnggggggc

SEQ ID NO: 124537 - DNA, 214 bp, Glycine max
  Clone ID: PAT_MRT3847_83465C.1
ccaccacaaagtctttctgcaatgactaatgtattgcacccgcaacatgttatcattattacgctatcacagtgacataactgttacgcgccctatacatcctaatcaaattggtcgggcggtgtcctgctgaacagtttacaacatgtaatttcgtgtgtgaacagaacttcgggttgtcaaacattactaacgtgttcggtggcccgttgtt

SEQ ID NO: 124538 - DNA, 2937 bp, Glycine max
  Clone ID: PAT_MRT3847_83466C.1
aacaaacacaacaccttcgcttcaagtctcccaaaacacacataactaggaacccgctccttccttaacctctgcaactttctccaattcaaaagaacaaaaacaacaaaagcacccccatcattgagaatcgtctcaagcttcgttttttacgtgctggggttgcttagatttcaattgggtatagagaatgttcaacggtatgatggatcccgatttgatgagaatcgctcaggagcagatgagtcgcatgtcacccgctgagttggctcggatccaacaacagatgatgtctaatccagagctgatgaggatggcctccgagagcatgaagaacatgagttctgaagactttaaacttgctgctgagcagttaaagcatactcgtccggaagaaatggctgagattggtgagaagatggctaatgcgagtcctgaggaagtggcagcgatgcgatcccgggttgatgcccagatcaaatatcagttgagtgcggctgagatgttgaagaagcagggaaatgatcttcataatcaaggaaggtacaatgatgctttgaagaagtatatacttgctaaggaaaacattaaagaggtaccatctttccaaagtagaaagcttcttttggcatgctctctgactgattcctgttactggaagactagtaattgaagaaataactgaagatgtgccttctggaagctcttctttggaacaaacagtggttcaaccaaaaaaatctggtgactcctctaagagttacagtacagctaacaatggaaatccaaaaacaaatgcagacagtttagatgcattgaaaaaagatcctgaagctgtcagatcattccaaaactttatttcaaataccgatcctgacatgctggcttctttgaatgctggacaattcaaagacgtgtctccagatatgattaaaactacctctgatatggttagtaaaatgtcacctgaggaacttcaaagaatgcttgacatggcttcttcatttcaaggggacaacccattttttagaggaggttcccctgattcttctttcaaccctggatcaatgcctccaaacgtgacacctgatatgtttaaagcagcaagtgatatgataagtaaaatgccagcagacgaacttaagaggatgtttgaaatggcatcctcactgaaagggaaagaatctactccattagcagcagcagtagatgagaatgaaagaaatgtttcgcggtcaaacttaccatcatcaagtactaatggaactactgcttttggagaatcaagttctcataacgtgttttcaaatatgagaaatgcttctcagtcaaacttcccttcctcgagtaccgatctacaagaacagatgagaaaccagatgaaagatccagccatgcggaagatgttctcatccatggttaaaaatatgagcccggaaatgatggctaacatgggtgaacaatttggtgttaagctttcaccaggagaagctgcaaaagctcatcaagccatgtcatccttatcaccggagagcttggataaaatgatgctttgggcggacaggattcaaagaggagttgaatccgcgagaaagacgaagaactggctgctagggaaacctggcatgatctttgcaatattcatgctcattttggctgtcattcttcaccggttaggcttcattggtggctagagtaagaggcaaacattgtattatgagattccttaggcattcaaactcaggcataaccttcttgtgtgatgagaatatgagaaaatgattgattgtattctcagcctagagacaatggagagaggaggaaggggacatattggttatctggaaagcaatgccaaaatggcatctcatcagatatgtccaaattgtggatgtgattggcacttattttttttgtaatatattagcttttgagttgtttgccatttagcacttgtagggaccctaccattcaataaatttgtaacttattttgtcattcttatacccctagtcccaatgtagcattggtatggtgcgttattatttataaaatttacatgattcccttttaaaaaaaaaaaaaaatgatacatgggcgcgaagctgaagccgaccttcatcaagtactaatggaactactgcttttggagaatcaagttctcataatgtgtttcaaatatgagaatgcttctcagtcaaacttcccttcctcaagtgccaatctccaagaacagatgagaaaccagatgaaagatccagctatgcggaagatgttcacatccatggttaaaaatatgagcccggaaatgatggctaacatgggtgaacaatttggtgttaagctttcaccagaagaagctgcaaaagctcagcaagccatgtcatccttatcaccggagagcttggataaaatgatgctttgggcagacaggattcaaagaggagttgaatctgcgagaaagacaaagaactggctgctagggaaacctggcatgatctttgctatattaatgctcattttggctgtcattcttcaccggttaggcttcattggtggctagagtaaggggcaaacattatgagattccttgggcattcaaactcaggcataaccttcttgtgtgatgagaatatgagatgattgaatgtattgtctcagccaagagacattggagagaggaggggacatattattggttttctggaaagcaatgccaaaatggcttctcatcagatatgtccaaattgtggatgtgattggcactttttttttttgttgtaacatattagcttttgagttgtttgccatttagcacttggaaggaccctaccattcaataaatttgtaaccttttgtcattcttataccctaatcctaatgtagcattggtctggtgcgttattatttataaaatttacacgattcccttttaaa

SEQ ID NO: 124539 - DNA, 473 bp, Glycine max
  Clone ID: PAT_MRT3847_83467C.1
tctttttttttttttttttttttttttttttttctctttttttttttaccaggccccaaaatgccaggcataataaaaatcaggggtgaagtttccttcaacaaaaaggggggggtccataacataccaaaagtgtttattttaacgatacaaactcaccctgaataattgtttcaaagccagtgcaaaaaataacaatccatcatcactcctttaactccaaaatataacccttaagaaacagggtggttattaagagataccgaaacaaactcatcctgaaatttgtatcaaagccggggcaaaaaataacaatcctccttcactaaggaagccccaaaatttaacccttaaaaaacaaggttgtcattaagagatatggaagccctttgttcagtctttccccctgcctgctgttgaacaacattttttaggacctactttgtctcagccacctttgtctttaaggtttt

SEQ ID NO: 124540 - DNA, 769 bp, Glycine max
  Clone ID: PAT_MRT3847_83468C.1
aattcaggctcgagaaagaagtatatgcttgctaaggaaaacattaaagaggtaccatctttccagagtagaaagcttcttttggcatgctctctgaacttgatgtcctgttacttgaagacaagccagtataatgaatgcataaaagaaggttctgaggttttggcatatgatgcgaagaaccttaaggctctttatcgaagaggtcaagcttataaggaactgggtctactaaaagatgctgtttctgatctgagcatggcacttgaagtgtcccctgatgatgatacaattacagagcttttacgggataccaaggaaaaattggcaatggaaggtggtgagcatgcacctagaagaatagtaactgaagaaataactgaagttgaggatgttccttctggaagctctttgaaacaatcggtggttcaactaaaaaaatctggtgactcctctaagagttacagtacagccaacaatggaattccaaaaacaaagacagacagtttagatgcattgaaaaaagatcctgaagctgtcagatcattccaaaactttatttcaaataccgatcctgccacactggcttctttgaatgctggacaattcaaagatgtgtctccagatatgattaaaactacctctgatatggttagtaaaatgtcacctgaggaacttcaaagaatgcttgacatggcttcttcatttcaaggggataatccaatttttagaggagatcccctgattcttctttcaaccctggatcaat

SEQ ID NO: 124541 - DNA, 416 bp, Glycine max
  Clone ID: PAT_MRT3847_83469C.1
accactaacatttattttaggacaccaaaggaagatatttaattacccattaaaatttaataccaattacataaattatatttataccctatatatttaacatacctttcaataacttcctttttgggctaaaaaaagttcctgcatgttatcagtattaccaatatcaggggggaccaatatatcatcctcaggtgggaaattggatctacccccaatagcttttaaaagctgatacacttaaaaaatggggggcctttcctttggagttggggagaaacagttgcatgcaacctttaaaaattggaaaagctcactatcaacatcctttttgaatagggattcataaatgggatcatggggttttggattggttgggagctccgaaatccattctaccaaatttcctttaaaag

SEQ ID NO: 124542 - DNA, 227 bp, Glycine max
  Clone ID: PAT_MRT3847_8346C.1
aaaaacaaacattaacgcccttatttaatcattgcataaaacaaggggggaataattgacctttaaaactggggggggacaaaacaaaatgacgttgctttaccccctcccgcccaaatttttatagtttggtaaagcccccaaaaaatttaaacccaattccgtaataaactttttgacatttgatcaaatttcttttaattgcgcgtccatttgaagaaactttt

SEQ ID NO: 124543 - DNA, 242 bp, Glycine max
  Clone ID: PAT_MRT3847_83470C.1
atctcagaatccgtctgcggccatggggaaagtatcctgctgagattcgcgacccattaaaggtggttccaagatagcctcggatctttcagcaatacttaagtatctgccagaggttacgatgctggtgcgtggatgaaccgtggcaagtaagccaaagtgtatttccctgatgagccttcacacgctgtttgctcttatggtatgatagagaatgctgatgctcaccctatgaacataaa

SEQ ID NO: 124544 - DNA, 364 bp, Glycine max
  Clone ID: PAT_MRT3847_83471C.1
ccggaagagcgggggcgacccacgcgtgcgcccacgcaaccggtttcattattgagggtgaggacagacacgggggccggatggggagcaaaaaagactatgatggtgccatgcagctgaaagagacagcgacaatgaagaccaggacatgatcgtgatgatgacagaggatgatcacgatcacaaccacactaatgacatgaaaagagatgtaacaacgaaagccaataaatgatcttgaataagaccaacccgtcctcagcgttggccacacccattatgatgagcccggacgcgagaacagacacaagaaaggacccgcgaattacaggacccaacctgacggacgcccacatgccactat

SEQ ID NO: 124545 - DNA, 398 bp, Glycine max
  Clone ID: PAT_MRT3847_83472C.1
atccgaccacgcgtccgccaaatttacttacgtgggtgcataaattatttttccattataagaaccgggcagcctgccatttccttgcagacgaggatggggatatcatcatattatgcgtagcattgatcgacatgtgtggctctcagtcagtggatttctcttttacggaatatgtcatgagcatttgtacaatgaagagtttttgacccaacacatgctatacatggtatattgagattgggcaatcattgtgtaaagtgccaagaatttcatcatttacctgtgtctagtttagcacatgtgactgagtaaataggagtttgttcacttcatggtttctccaagaaaggaacctccggatccggttcgggcgtgttcctgccaacggtgccgct

SEQ ID NO: 124546 - DNA, 439 bp, Glycine max
  Clone ID: PAT_MRT3847_83473C.1
ggaagatgttaagacaaagatacaaatgaggctttaaggagctttcaaaagggaaagagcaatggcttactctgttgctcacaagcaatgcagatcaactccaagctctaattcacgaacaaatgcctctttttcctctctcaagagtcatgagatgaacaaagctaacggtgggtggagttggttggagcgttggatggcagccaagccttgggagagtagattgatggaacaatcacaatctcaggctgaagccttaaataaaacccaactccaaagaagtttggggaatccttggggagctctaattccaacccatgcacggcaaagtcaagaaaaacaacgtgacaacaagggtttttgctaggccacccctggttgggcaagctacacgctcattcttaagtccaagttccgagtttcgataccatgagagttc

SEQ ID NO: 124547 - DNA, 159 bp, Glycine max
  Clone ID: PAT_MRT3847_83474C.1
tagttttctgacctaactcaagtgaatccgaacccggccttttcccgacagcaccgaaccttttcttttttctccccgcagcaagacctcagtcgcagaagaagacaggggctaaataacctccctaaaacgaacgacttccccagttacacttgggac

SEQ ID NO: 124548 - DNA, 271 bp, Glycine max
  Clone ID: PAT_MRT3847_83475C.1
cgcacgcgtggactgatacatcctgcgctctagactcctgacaccactattatgcaaagaggatgcactggcattatcttcgtcatgttagtgcatattactcctggcatcaacagcaggtggtgatctctattcatcagaagcatcggtggacacaagatctgttgaggacactttatggatgatgccgtctgaggaccattgtacttcctttgaagatggagcgatttgctattggtcactatacaccgactcacgatgtaggcctcaa

SEQ ID NO: 124549 - DNA, 167 bp, Glycine max
  Clone ID: PAT_MRT3847_83476C.1
ttttttttttatagaatcacgaatatatactgttatctgtatgaaacttaaggattaatactctatacataagattaaactatacagcctagatccctcaaaaaagatatacagctttttaaaacgatcattaaacattccaaaaagaaaacagaggccctgtgaac

SEQ ID NO: 124550 - DNA, 657 bp, Glycine max
  Clone ID: PAT_MRT3847_83477C.1
aaccctgggaaggtccttttctatgttttgattgccgtgataaaaagaatgctatgaaaggaaaacgccccaagggagttaaggtgtcataggctcaaaattggtgtgctatacgagtattctatatcctatctttggccatttttgtattcgcgatttttataggcaaaaattaattgattgaatctcactatcaagtagcaacagctgtatatgtgatattcacgaattcatctaaaatgggcattgcatttgagtagcaaattaaggctggggagagtgcctggaatgggtttttgtgcggctcaagattcttcatctctgatttggatggtcgggtagattcttttgtatagtatagtttatgttgcctaacttaccacaaaagtaggtattttcttgattaagtatgcagcactgcactctacttcctccccaaattctgtatataaatttccatggaccttttctacccctggggattagaagcttcaaatctctactatggattgaaaagtcaattcatctaactttagagactgctcgttaaatgtttcctttttcctgtgtcattttggtctcactcttatgtttgtcccttttaggagggcagtgtttctgtccgtttcaaatagctgaaaggataatgtaatgatt

SEQ ID NO: 124551 - DNA, 235 bp, Glycine max
  unsure (1)..(235): unsure at all n locations
  Clone ID: PAT_MRT3847_83478C.1
acccacgcgnacgggccaagcngattanaaangagaaagctttcatctttgcaaagcgcacccccgcgctgcgggggtcccttgttgcttgggagcacccactcatatgctacttctactgcttcacgaacaactcaagattcatggaatgaatatttgcccaacacaaatctaaatgggcatgaacataaagcccacatccgatttcctcatcactaaccaacactcaacaaac

SEQ ID NO: 124552 - DNA, 767 bp, Glycine max
  Clone ID: PAT_MRT3847_83479C.1
attctcctctctgaattcctcttattcaggtctgtgtgctcttctatctaatatctttcctttcctttaatttacttttgttctgaatgccactcattttatggttaggtgcaaacttttagcttttcttgccttttcacgtttgaatgccatttttgtctcatgggtgcttgtgattttggatcagctagtctagatctgtctcttttcattatggggctcatgaaattatgtgaattctgttactgtgtacttgactggtgtaagtctaactcacctacatttggcttgtgtttgtcaacaagttagaagctttgtggggaaaattaactagtaatggattcattccattggcactggttgggggtgatgattgatagtttcagaaaagaaaatagaaaatctttcggcattcatttcattaggtttctgtgtctgatctcgaatttagcatttggaaatttagtcttcttggagttctgaatttaacatttttcggtagtgtgaagcaaaagtaacacattttaagtgttatccgcttctatcaaattgttatagtgttcatatcatactcgatctgcatttccttctgcttgctttggttcaattcgcaatcctagatcttaccttattcatttcatattctgttgaatatcttattatttttcttttgctcctctatgttaacttttttaagatctggttccagccattatgttagtctattattagtaagctgtagacaactttttagtgagatgtaaaga

SEQ ID NO: 124553 - DNA, 578 bp, Glycine max
  Clone ID: PAT_MRT3847_8347C.1
ttgcctgctacatgtgtagcagtaccacctgcttgggggggggggggggcaataaccaccaaagttgggtcgagctaaaccaactcaaggagagagtacgacaacggtgatttagatagataagtggctggtaaacgatattagactggtttcagagcgaataaagtgtgaaacttaatgtgataactactgtaaaaaataaaacaccaaaaggaaaaagcgaactaataacaaatagcaaggaataaagttattttctggcgtgaacgggctcgtgagagaccactggataaagtagtactaagtaagctaggtggtagcaactgatgagcctgctgctgcttttggggcggcctaagggcgtataaagaagtgggtagcggcccgggttaaaaggcaagaaacgctcccgcatgggcttagtgtagcgggtccacttggtggcaatacgaccaacatttttggtgtgcagaaagcggcccggcacaaatggccttataaaactttataagggagagatagctgtaaaagggcgtacaaactttacgcacctgcgcataatggtaacttggataaac

SEQ ID NO: 124554 - DNA, 406 bp, Glycine max
  Clone ID: PAT_MRT3847_83480C.1
tttttaaaatgaagtccaggacttttataattcgcacacgcttgtacttagcagttgttttagacctctattttagcccaaagccttaaccattttatcctttttggctgcttgctgcatgcaggttttgcctctgatttctaagccagcgaatccattttttttttacttatatatttcgtatattttataatactttctagaattattttttttctctctatcatattaattatcttatcccacacacctctttgccgaacaaataaattatataaataatgtaaccaaagacactttttactaacggattacgtcattttgatagaacacattcaaattttcgggttctttaagagaagcttttttcatgggttcttataagatgacaacaaagtatagttct

SEQ ID NO: 124555 - DNA, 120 bp, Glycine max
  Clone ID: PAT_MRT3847_83481C.1
tcagcactcatctacacatgactagtcggcattcagtatcgatctaacacctctgggtatcaggagataagtcctccttgcgttcttggagttttagtgagagttactgatgcgttcacc

SEQ ID NO: 124556 - DNA, 754 bp, Glycine max
  unsure (1)..(754): unsure at all n locations
  Clone ID: PAT_MRT3847_83482C.1
cgaattcgagctctttacccggggatcctctagagtcgacctgcagtttctctcattccttgccactaaaaaccgcacaatcatcctttcatacattgccaaggccaactatgtagaatttattaaaatcagcagtttatcactttctgtggaagactatgagatatttcattttaataagattcccaccatccaattcagtctttcaacggagaaactttagataccaatttttcctacggtctaaatcgggtcaacagtgttaagaaattacattttacagtggtttaaaattgtcactaactgtcaaaaacatataatatcatcattttaatttagatgacattactaaataaaatcaattttaaaaattaaataatcaaattaagtccaaaataaattagaggaataaatcgaacctaaataaacaaattaaaggataaaaaattaatttaaccaaaaataataaaatatccaaattcccaactgaaagtgaatgtttctccaaatagatctcttaaaacccaataaatcgtgttcttgaaggagtgtggggtggttctttgcacctggcataaattttgggtgagagatcaatgcaaacagccaaaaacatttgatgatanttgctgttttactaccctaaacatattaagtaggtaaacaatttttttttattctctttccaatccaatgtgatttattttccacctatcattcacatagtaaccaacaagaagttgggagatctagt

SEQ ID NO: 124557 - DNA, 1750 bp, Glycine max
  unsure (1)..(1750): unsure at all n locations
  Clone ID: PAT_MRT3847_83483C.1
aaataataatgtattgttgtgatatcaactatgatttatgaacaattgtctgatggtacatgctatatggacatttgaagaaaaaaattgaagaacaagaatactaaattcctattactaagcttacaagtttacactaattatcatgataatgttgtcggtaataacacaaatggcatggttcttgggagtttcctccatcaattaagtcaatcagctccatggttcggggacctaattgattgatatacaagaaagaagccaaaagtgtgcagtaagtataacagcagcatgctgtaactttgaatcagtctcagacgccaacgaccgacacaacaaatccctttggataaaagtgacaagctaaacggcggtcagtttacaagaagtttaatcaatttttgggaaggaagaaacttctttttataaacagaattcatctagaaagaagaaaaaagaaatccttaaggggaaaaaagacatcaaaataaagatcaagaaccatccaacatagcatgtcgatctctctaaaattttattcaagaatcaagaccctcccctaaaaacaccattagcagaataccacatatatttctagtccatccaaaatgagctcaaaagaagactgccatccagaggaggtggtgcaccactccccattgctgctaattcaggactcactttctgtccagcttcctcgagtatggctataagttcctttgcaaatctggcattagcagctgtgaagtatgtgtatgcagttccttttgcaccagctctccctatccgcacaatgcgatgaacataatcctcaagtgaccccgggaaaacagtaatcaaatagtagaaaggattaagatatacataagcaaagctattggttaactttaaaaagtgacaaagtagactgaaagtcatcagatcacaaagcagctttttcccatttgtcacaacagaaagctaagacagactaatgaccagatcgtcctccagcagcatataagtaattctaacttaacaattcatgcataatgtaataaataatcaaatacgggaaaaaagtagacaaaaaaatattaattaaaaaagcattttatatataagattgaaggaaacaaggataacagtaatttaatattagtattttccaaaataaataaaagtaccgagtatttccataactataattatatcactaattcattttcatccactgaataacaatatgacaaataattaaataaagcaaatgcttttgcacctaaaccacgggctgcaacatctgttgccgtcataataggactttttcctgatttaaattctgagagcacccaatctctttctgcttgacttttatctccatgaattgaaagtgcaggccatccatccatgcggagttgcctagtaatctgatcacatccttttttggtatccataaatatcagtattcggctgccatccatgatgtcttctagcaactttaccaatttatcatatttctgcttttccgaaacaatgtcaacatattgccgtattgcatggttagcttttaaatctgaagagcctctataattacctgcacaatgattacagaaattgttgcttaaataaatcaagttctcacaaaatacaatactatacataaacatcatacatgcttcgacaanttaatttcagacccaaaaaccatttcanntcatagaggaacgaaatttaaaagaaaaaaactcgagactagttctctctctct

SEQ ID NO: 124558 - DNA, 550 bp, Glycine max
  Clone ID: PAT_MRT3847_83484C.1
attttggtctatttgatgctactgactaggaaggttgtcagtccctcaactcttctgccagtagtgacttttggttctccatttgtgttatgtggaggccaaaaattactcaatgagcttggcctggatgagagctacattcaatgtgtaataatgcatagagatattgttcccaggatcttctcatgcagttttcctaaccatgttataactgtccttaagcgcttaaatgggtcatttgtgtcacatccttgtcttgtaaaaaataagctattgtactcaccattgggtaaaatattcattctccaaccagatgagaaaacatctcctccacatcctttactcccattaggaagtggcttttatgctgtagacagtagcagatgtggatactctccaaatgttctcagagccttcttcaatcaaccacaccctattgaaacactaagcaatccaaaagcatatggctcagatggcacagttttaagagaccatgattgtaacaactatctaaaagcagtcaatggagtttttggacaacattcaaaga

SEQ ID NO: 124559 - DNA, 223 bp, Glycine max
  Clone ID: PAT_MRT3847_83485C.1
ccattagcgtcccttctatggtcatggtcttattcattggaaatcagccgccattcattcatttttcacagtggcagtgccaatgtgaaacatcctgcgtgaacaaacagaatgcataagctgcacaacttgctaaatctaatggttgacgtgtatagaacctaacaagtatacataaagaactagctttggataagattcatttagacaagataagaccatt

SEQ ID NO: 124560 - DNA, 270 bp, Glycine max
  Clone ID: PAT_MRT3847_83486C.1
aaatgattgagcctgctgtgaaaggatcatctaatgtacgagaaactagacatggagctccggagcgacgacaagtctttgtctcacaaaaagctgctatttggaatggccccattttggctacagataaagtgattgatgagtgctattggtctgataaagattactgcaccacaactcataactgggactgtttttccacgacagaggcgctggagcaggccttggactttgccacatgaactggcctcgatgtgtgacgcatttgcc

SEQ ID NO: 124561 - DNA, 345 bp, Glycine max
  Clone ID: PAT_MRT3847_83487C.1
gccaacaaatttcttcatgaaatttggccatccataatcacatttcataactgccagttttatcggttagatagatcagaagttggaatgccgtagaacttagactggcattaccaagcttgcaaaaagcactgatctaatatggtacggtgctgcttgggggctggccacctcttgaaggctgtcaatattatatatagatgatattgttacaaatggcattgtactgccacaaggtcattacgcccccatgaaatggcctacagttaaaacgggaattttgccgccattatagatctgtcatctcaccatggctgcattttgcaaaaaaatcccgtttcggac

SEQ ID NO: 124562 - DNA, 284 bp, Glycine max
  unsure (1)..(284): unsure at all n locations
  Clone ID: PAT_MRT3847_83488C.1
aaatactagaaggcctgaccagtgtncaatagccatgaaaaagaaccaactgaagggtgataagagcgcaacttggcacaacaagcgtgccattaatgagaaggtcaagtcttagattaggattgtcattggtagccgttcactgagttgcgtctatcgtggccatanattgccatcactgggtactttcttgttggtcgtactttggattttattttcactgaagccgggtctagtaacacgttttcaacattgacacattcaaatgttcaactttatgtggt

SEQ ID NO: 124563 - DNA, 278 bp, Glycine max
  Clone ID: PAT_MRT3847_83489C.1
tgactccactacctaaattatgatgatctggtcctgtgtcacccaaaacacgagcagggctgcaggtcaagtgtgactacaggtccctctatattggctttaatggttacccgagggttggggggaaaagccacataccgagggctcttgaatctgtagatagaaatgcttttatgtgaagggtgtatgtgtatgcctccagaacctaaaatcttttgtctaacacgtatttatcatcatgtgtatacttatatatgatgaggatgatcattatgcag

SEQ ID NO: 124564 - DNA, 470 bp, Glycine max
  Clone ID: PAT_MRT3847_8348C.1
ggcgttagaaagaattggtctcactttctcttagggccagatatgtgtgtatttcttggtttcccactccctctttcatcttccgtagtcatcttctaattcaactgggaggagtataaaaacaagtcagacaaacttgagcttaatttacagttcagagaatcaaatcctatttgaattctgtttgcttttagatcatagacgtactgggtgactgaggaaggatgtgtggagtttatgaatttgtcatcattgcttttgctttgtcaccttatgccacccctagtggcggcggcttgtccacctctgctttcttgtggagatcttggcaatatcagtttcccctttactacaacagaacgccccgactgtggctttttacccatacggaatttgtgaagatccactcaagttcaaaatgatccaattacagaataatggagaatggtttcgggttgtactcgtagctc

SEQ ID NO: 124565 - DNA, 761 bp, Glycine max
  Clone ID: PAT_MRT3847_83490C.1
tctttttttttttttttttttttttaaaagtataagtttttgtgaattacaatccagcctcgggacaaaatacacaatcaattgaatagcctatcaagtataaaaatgttatcaaacctgagttctaaggggggttataatttgacactgatctattcaatggaaaattggtcaagtattgtctcaactagacttaataggtgaaatacaagtacaactctcaaacctcaactaattgagagagaaaaagatatggtacaacaatttttaattcgtagggaagaatattccctgaacgaaatgaatttatttgcgactgtaaccaggtgggggcattggattcctgtttcctcttctatctaataaagaatattgattggatgaatgatgaccataatccctgtgcccactcgggttgtttggtggagtccaattctgatgagctctagaaggttggaagttttggttgtggtgactaacttcatgatggtgactaccatatgaaccatgtgaattattaaacctggcattgtgattatttcctgatgattgatatccatgccttgaactacccccactaccttgatggtgatttctttcataatgatttgatctggcgtgctgatagtcatttctttcgtaagaatttgattgctgacgaggatgattgtacaccactggtggtggcgggtatggttgattgcaaccatactgctgagcagtaggggcagcattgtaaggtgcaaactgtggtctgcctt

SEQ ID NO: 124566 - DNA, 484 bp, Glycine max
  Clone ID: PAT_MRT3847_83491C.1
aattcggctcgagacggctgcgagaagcgacagaagggacctacaaggtaaagtttgcattcacacgattttttcaaatgctaatacaactcccaagaaaaagaataaataatggagaaaatatgattgtgtttgccattcacactggagtttatggcgaaaatatggttataatggtgttgctacactgctctcgttgttattgtattgtattaatttcccactattgccagtactgcatagtccatacatcataatatgatgagacgggtcaacttctgataaagcgtctatattcgttgaaagcgtaagaactaagatctcatctctcgcataggcatgttaattttatttttttatttttaattcagatttaatctctaccacttggatctgcaagattatttgaaactatctgaaccatacaatattaattaaatttcctacttatgtatcacattaatctatctcaacctttattagg

SEQ ID NO: 124567 - DNA, 302 bp, Glycine max
  Clone ID: PAT_MRT3847_83492C.1
ctaggagcaaacaacagccacctcagcttaaatatcaaattgggcccttctacatgtggcctatgaaccaattggtgccattggtccacgataggtttctactcctgctcatgctcatgaaggtcatgctgatctaaggaaatgggctcatgacaatgtgagtgctgtagctgcttgatatgaagaatgatctatagaggctgctgtgatggacgaaacttgcaagactggcaagacaagccgatgttgatgagaccttggttggtggggcctccctcaaggcagaatctgtgggcatcata

SEQ ID NO: 124568 - DNA, 417 bp, Glycine max
  Clone ID: PAT_MRT3847_83493C.1
acccttccaacaaattgggcccgcctggccttttcattgcttgaccaccaaattcaacaggtaacttttgcgcggttggaaggaagttgtaaatcgcttttttaaaggccaggcgtttttaacccaaagccacacagctttaaaaaccaaaaggaattccatccactctttccttaacactaaaattaactccttcttagaccaaatggcagccttaaccacaaaccccagttaactttccctttcttttaagccatttctttttccgattaaccgtcttaacatgaaactggccccacttcgtttaaatggtaacgacccgtttggatggatttttaaaatatcccaattttttgactaccaaacaattttggagcaagagccttttaattgtggcgtttttttacatggatgggt

SEQ ID NO: 124569 - DNA, 373 bp, Glycine max
  Clone ID: PAT_MRT3847_83494C.1
aattcggctcgagctccttggagggcaacctcgcctcagacacgttcgccatatccgggtcgggtcaaccgggaattatattcgggagcatggattccgggttcagctccaacgcaaacgaagactccaaaacaaccgggttaatgggcatgaaccgagggtcgctctcgtttgtgacccaaatggggtttccgaaattctcgtactgcatctccggcaaagatgcttccggcgtgttactcttcggcgacgccacgttcaagtggcttggaccgttaaagtacactcctttggtgaaaatgaataccccattaccctactttgaccgggtcgcgtacacggctcggataatgggcattcgggtccggtcaaa

SEQ ID NO: 124570 - DNA, 713 bp, Glycine max
  unsure (1)..(713): unsure at all n locations
  Clone ID: PAT_MRT3847_83495C.1
ccacgcgtccgcttgctcgacggctgcgacttcgaacactggctcgtcgtcatggagaagcccgagggcgaccctacccgcgatgacatcatcgatagctacattaaaaccttggccaaggtcatcggaagtgaagaggaggcgaggatgaagatatattcggtttcgactaggcactactttgcgtttggggctcttgtgtctgaagagctttctatcaagcttaaagaattgcctggagttcggtgggtgcttcctgattcttacttgaatgttaaggaaaaggattatggaggtgagccctttattaacgggcaagcagttccctatgatcccaagtatcacgaagagtgggttagaaacaatgcacgtgccaatgagagaaacaggcgcaatgacaggcctcgtaatgctgacaggtcaagaaactttgagaggaggagggaaaatgtggtgaacagagatatgcagggcaggcctcctatgccaaatcctggccctaatatgggtggtcctcctcctaacaatgcaggatatgctcctcccaatgctggaggtggttaccctcctaacacgggtggtggctatggtcccggtggtggtgtacctcanataactatgcagggaacatgggagggccaccaccaaaccaggacatgggaggctttcaaccaaatgcaggatggtcaaacaatgctcccagtagagatgtg

SEQ ID NO: 124571 - DNA, 1788 bp, Glycine max
  Clone ID: PAT_MRT3847_83496C.1
tctggttcccctccgaggccgtacgtgcatgccctcatatggcatgccctggagcttctttctccacaacaggcttcttcagctcgttaatggtggttgcctcctcctggtccacatgaccaaaaataaataaataaatatatatatattcttactgcctttgaacaatttcgatccccactacccaaacttcacacacgtcatcacctcatgggaaaaatttgagacaaacttcttgtcaataaactagacccctaaacaggtaattattactacagttatataataataagtctgcaaggcaacctcaatcaaatgacaaattatagaccgtcaacctcacaaacaatacaaaacgatcgtatctagccttaaatattgtggacttcggatacacaacatgcaggttcattagaaatagttgtaacatgtaagactaataaattctaattccttgagaaacatggcataaactctatgttgtcttgggcacaattcctcgttatctacattggctagaaaaatatggcagtgatctcacgcagaatatgggttcccaccaggtggtcctcccatatccctgcttggcacatctctactgggagcattgtttgaccatcctgcatttggttgaaagcctcccatgttctggtttggtggtggccctcccatgttccctgcatagttattttgaggtacaccaccaccgggaccatagccaccacccgtgttaggagggtaaccacctccagcattgggaggagcatatcctgcattgttaggagggtacccgcctgcattgttaggagggtacccgcctgcattgtttggagggtacccgcctgcattgcttggaggaggaccacccatattagggccaggatttggcataggaggcctgccctgcatatctctgttcaccacattttccctcctcctctcaaagtttcttgacctgtcagcattacgaggcctgtcattgcgcctgtttctctcattggcacgtgcattgtttctaacccactcttcgtgatacttgggatcatagggaactgcttgcccgttaataaagggctcacctccataatccttttccttaacattcaagtaagaatcaggaagcacccaccgaactccaggcaattctttaagcttgatagaaagctcttcagacacaagagccccaaacgcaaagtagtgcctagtcgaaaccgaatatatcttcatcctcgcctcctcttcacttccgatgaccttggccaaggttttaatgtagctatcgatgatgtcatcgcgggtagggtcgccctcgggcttctccatgacgacgagccagtgttcgaagtcgcagccgtcgagcaagatggtttctttcgggggacggttggaccagttagggttggggtcgttgagggaggaggtggtggcgcgtgtggagagggcgcggagggagggggcgtttgggaggaggacgcggcggagggaggggttggctgcaacggagatacggcggaggaaggagagcgcggggagggaaggacgagagggggcggtggtgagggagcggaagaggaagggggctagggttagggttttggggaagatgcgagagaggatctgagtcgccatgttagaagagagagagagtgagtggaaagggtttagggttttctatctgccttatagagtcattgttgtgatgaggattctagaatacagaatagaatgcttgccacaacaaaatggtgtaaaatatcctataaaaaaccaacaacaaaccggctcgag

SEQ ID NO: 124572 - DNA, 598 bp, Glycine max
  Clone ID: PAT_MRT3847_83497C.1
gatgagaaacggcttctagattctactctagcagatgcataatttttcaacatctagtaattgaaaatgcttacacacacggataagaacagaatatgttcatgacgagaacaaaattacaaaaccatagttataggtttgggcatcacaccttactggtaaatataactgtactcaaggggatgatttgggaagatgtacacaattacattgtgtgcaaacacgtagcatgaggaggtacagctctccctgtgttagagatagaagctttccacctactttggatctgaggcccgtataccatgtcgctagaagaattctctacaacctgtaagcactaacatggacttgaaaggcaagaccttcacgtagcatttagtaatattcggatcagctactcatccctggctagctgcttgtgtaggactgtgaaatatctgaatggatggatactctctttgtctgccgagttatacaaaacctagtatattggggacatacaacacgcataaatttcacagtgggataaaactcgccagcatattctgctaatacttggccaagatgccacggacgcgtggtctgactcctgggcaga

SEQ ID NO: 124573 - DNA, 731 bp, Glycine max
  Clone ID: PAT_MRT3847_83498C.1
cacgcgtccgccacgatggcgactcagatcctctctcgcatcttccccaaaaccctaaccctagcccccttcctcttccgctccctcaccaccgccccctctcgtccttccctccccgcgctctccttcctccgccgtatctccgttgcagccaacccctccctccgccgcgtcctcctcccaaacgccccctccctccgcgccctctccacacgcgccaccacctcctccctcaacgaccccaaccctaactggtccaaccgtcccccgaaagaaaccatcttgctcgacggctgcgacttcgaacactggctcgtcgtcatggagaagcccgagggcgaccctacccgcgatgacatcatcgatagctacattaaaaccttggccaaggtcatcggaagtgaagaggaggcgaggatgaagatatattcggtttcgactaggcactactttgcgtttggggctcttgtgtctgaagagctttctatcaagcttaaaggtatttgtggttttcaaccttaagggtattgtttgtgttctgtgctagtgtttttttttcttaattctagtttttggttttttggaattgcagaattgcctggagttcggtgggtgcttcctgattcttacttgaatgttaaggaaaaggattatggaggtgagccctttattaacgggcaagcagttccctatgatcccaagtatcacgaagagtgggttagaaacaatgc

SEQ ID NO: 124574 - DNA, 439 bp, Glycine max
  Clone ID: PAT_MRT3847_83499C.1
cgccgacgtaagacgacagaagcgggagtcccgacattactactcattatcgatagataagtataacgcggcactctggtctattgtttagacgaatgcggggatttctacttatagttcacacacatatgcataaatttttgattcatcctccacctaattgtatactgacctaaataatctatatattctaaacagctcatcattcatgtttattgacaacaccaatacatccatttcagatacctatttcattttctaatcattcattctttcttcaatctccaatttatttatcactctttatttctttttatttactcaacacttttatatgtcttaatctttctaaatctaacccacctatacaccagtatcatcatcaaaaccgttatagcaccctatcttattataaaccatctatttaaattcgaattat

SEQ ID NO: 124575 - DNA, 201 bp, Glycine max
  Clone ID: PAT_MRT3847_8349C.1
ggtttaggccaaaatttccccactttacacgaacgaaaaagactacaaagcttgattttgctcctgtttgtctaagacgacctttgatcgaaacaacatgcctccctttgtaccactcgtgaccaaagggatccacctgtatatcccgagaggaaggaagaaaaaagacaattctctatatggatcccactactttctgac

SEQ ID NO: 124576 - DNA, 482 bp, Glycine max
  Clone ID: PAT_MRT3847_834C.1
gcagcttcagttcccgtgtttgctcagtaaagccaccaaacacttaagtggtacattgcatgcataataccaccaactttgattccgtgtctgaaaactaggtgctccgcaatttcgctacttgatctctatcagtattattaagtatcattaatgatgattattacatgctaattacaattttgtctgaagatgcatatgcatggttttctttataatctaatcgtgagtcaaataaattaaactagtatttccactaatttaaatactacagtatatccaacttggtcgataaattgaacgcaacaggtttggcaaaatcatttagtagttccccaacacaacacttgactagacagacaagtgctgattaagttgtcgattgacctaattaagttctaatttaatttgttaaatatcataatctcaaaacaaaaacaaattacaaaaaaatatcttggatcatattgccgacatgcgtg

SEQ ID NO: 124577 - DNA, 1558 bp, Glycine max
  Clone ID: PAT_MRT3847_83500C.1
ctagcattaaaaaaattgaacttcggatgcacaacatgcaggttcattagaaaataggagtaacacgtaagactaataaattctaattccttgagaaacatagcataacctttgctttacttgggcacaattcttcgttatctacattggctagaaaaatctgcagtgatctcacccagaatatgggttcccaccaggtggtcctcccatatccctgcttggcacatctctactgggagcattgttcgaccatcctgaattatgttgaaaccctcccatgttctggtttgatggtggccctcccatgttccctgcgtagttattctgaggcacaccaccaccaggaccatagccaccacctgcattaggagggtaacctcctgcggcgttcggagaagaatatccagctgtatttggaggggcatagcctgcattgctcggaggggcatagcctgcattgctcggagggtacccgcctgcattgcttggaggggcatatcctgcattgctaggagggtacccgcctgtattgcttggaggggcatatcctgcattgctaggagggtacccagctgcattgcttggagggtacccagctgcattgcttggaggaggaccgcccacattagggccaggatttggcgaaggaggcctgccctgcatgtctctgtttaccacattttccctcctcctctcaaagtttcttgacctgtcagcattacgaggcctgtcattgcgcctgtttctctcattggcacgagcattgtttctaacccactcttcgtgatacttgggatcatagggagcagcttgcccgttaataaagggctcacctccataatccttttccttaacattcaagtaagaatcaggaagcacccaccgaactccaggcaattctttaatcttgtaagaaagctcttcagacacaagagccccaaacgcaaagtagtgcctagtcgagaccgaatatatcttcattctcgcctcctcttcacttccgatgaccttggccaatgttttgatgtagctatcgatgatgtgacgcgtggggggtctccctcgggcttctccatgacgacgagccagtgttcgaaatcgcagccgtcgagcaagatggtttctttcgggggacggttggaccagttaggggtggggtcgttgagggagcaggtagtggcgcgtgtggagagggcgcgcagggaggtagagttggggaggagggcgcggtggagggaggggttgccggcaacggagatgcggcggaggaaggagagcgcggagagggagggaggagagggggcggtggagagagaacgggagaggaagggggctagggttttggggaagatgcgagagaggatctgagtcgccatgttagaagagtgagtggaagggaaatggaaggggtttagggttttctatctatatattaaattaacagctaaaaccggtgaggtgaggtagggtttgattaactgtacagagtttctgaaccaaaaagaagaattgaattgaattgaaagaggaaagtgtaggtgaagagagaactcgagcc

SEQ ID NO: 124578 - DNA, 599 bp, Glycine max
  unsure (1)..(599): unsure at all n locations
  Clone ID: PAT_MRT3847_83501C.1
gttttgggccggaattcccgggtcgaccacagcgtccgcaaaagtgttattttgtaaatcctaatggtcaaagcgtgaagatgtgggttatgaacctacagcccaaatttgaaggcaatccaacagtttacgaattcaggattacagttttactaaaacaaatttagataaaacttgaaatcccacagtttcaacataggtcaatcaaactctacataacctagcatccacatcaagaaatcgtacatagcaaatttacacagcacctcaactcatccaaatcaattaaataacacaagaattacattaaacattaagctattgcaatttcatggcgttatagtaggaagttgtttattggtttaaaaactggatacttaatgcatgttgtaacacttaaatttggagaactcacttagttttttaaattctttaaaaataacttataaaaataagtagttttttttaaaattaaaggaaactcactcttaaaaattaaattcaaattttttatgtatatttgatctggaaatatatatttaaacttaaaatcaattttaaaaacttgaatcattgaaacagaaattcaagctcannac

SEQ ID NO: 124579 - DNA, 417 bp, Glycine max
  Clone ID: PAT_MRT3847_83502C.1
agaataaacctggggcatacccattcacattccctaaaatgcctttactttcaacaaacttgacttacaagatgggggttgctggaaaagcccatggaattcccaaggggtaccttttactttcaaaaaccccaggggcttaaaacctggctgaatttttcaaaaaagttccccccccctttggaaaaaataatcccaaaaatattctaaaatttagtagatggccccgcccctttttaagaattttttaaaaacatttaaccctttaattttaacctttccgataccggggggggggcaaatgataataaaagggattggcctcttaaagcttgggaggaacagggttttttggggggcccactttctctttctccctttccccttttggggggcccactgggactattttagggg

SEQ ID NO: 124580 - DNA, 296 bp, Glycine max
  Clone ID: PAT_MRT3847_83503C.1
aggcgtgcgaacagacttagggtactacagaagggcatggatggaacgggaagggaggtatccgatgatatctgccaataccatctctattgggcttgcatcagttattgaatggtaatgagtctatagaggtggtccagaaaataagtccgacactagcaattatggctaaactattggatggatggagaatcaatagttgcagcccattcatggactgtagacattgtaaagcaacatatgtcagaccttcaacgaaacgaagcaaatattttattggctcaaccaacataaaa

SEQ ID NO: 124581 - DNA, 170 bp, Glycine max
  Clone ID: PAT_MRT3847_83504C.1
gaacgtgcacgaggcgtcagggaactataacatagccaatgctgccgagaatatgacttcagcagctgttcccaatgctacaccactgaattctacgatggacataccctagccttagctcccagccttggcctctccgcttgaaatctgcctatggagatcgatcctct

SEQ ID NO: 124582 - DNA, 452 bp, Glycine max
  Clone ID: PAT_MRT3847_83505C.1
ctcgagccgaatcggctcgagggctgcgagaagacgacagaagggcatgacaattgctttgatactcagtaaccaggcaggggtaactcagaaaacaatgatgtggagaatggagatgataattttatcacaaataaaagaaagaatgctaataccttacataaatttgagggtggcactcttattgtttgtcccatggctttgttaagtcaatggaaggatgagcttgaaacacattcaaaggaaggtagtatatccatatttgttcattatggtggagcaagaaccactgatccctggatgatctcaggccatgatgttgtcttgacaacgtatggtgtcctacaagctgcatacaaaaatgatggagagaatagcatctacaacaaggtcaagtggtacagggtggtgctagatgaagctcataatataaaagcccatcggaatcagac

SEQ ID NO: 124583 - DNA, 596 bp, Glycine max
  Clone ID: PAT_MRT3847_83506C.1
gggcttacagtccaaacgaatgtaatcgataatgaagaaacacttcggatcattacaatagcaactatatatcataataattctaatgttcaatttaataaaaaaaatactccttagagaaagaaatcctttaattccttttccaactatatatggagttcacaaggttatggcatgtatggatgccacacttagttttcttgtttacatttctttatgctgtaatgggggctggagctactcctactccaggagttggaactcttccagagacaccaggcaaaggtgcctctgtcacattactatcagtcaagattgggagaggagggggaagtggtggaaggtacaagttagaaatttgtttaaaaagtttgccaggttcaatagggctcatataaggtgcttcattgacatgctttaaacacaagttcctcctgtatctatttgctgtcttggggaagtcagtaataatgccattaacccttggttccaatgacaaatgaatttatttcaatggatggatctgagtagtagtcccatgcttgagatacaaattcattgctgaaagtttctacaaaaactgggagcttaaatga

SEQ ID NO: 124584 - DNA, 583 bp, Glycine max
  Clone ID: PAT_MRT3847_83507C.1
gtattaaaataacaggaacttagcttctaagtttttgtagtaattttggttatattttgtgtagagatgtaacaaagaaatgaaaaaggattaaagaattgaagtgtcgcgctcagtgcgacctcctcgcttaacgagtcagaatcgcttagcccaagcaagccgcttagtgcaagaagccacattggaagacagttgtctcgagcaagtacgcatcctgcggcttgacacgtggccacttgatcaagttggacatgcactcagcacgagtgtcgcgctaagcgcacaagaaaattctaatttggtcaatcagttgatgaagtatataaaaagaaaggaaacatttgaatacttcagcatgaaggaagatatcaacaagcaaaggaacaagaacagagaggaaaacaaagaagccagtgtgcaaggaaaatccgtttccagagctctggccaatccatttctcttccattatcttgcatttcattttaccttttatagttgtaagtctctcatgacaatgagagactaaaaccacgaaagctctgacaaattctcttttgatgtatgattcttacctatctat

SEQ ID NO: 124585 - DNA, 188 bp, Glycine max
  Clone ID: PAT_MRT3847_83508C.1
gttgacccacgcggtctccctcgcttgcgaggacacggggggccagacggggattttaaggctattccgccccgcgagaggcacaggctggggggaacattttggtttggactggtgcgggcgcggctattgcataaagtctcctttacaaaagcgcgcgttagaagcggacaaagcctgaagcctga

SEQ ID NO: 124586 - DNA, 542 bp, Glycine max
  Clone ID: PAT_MRT3847_83509C.1
ggctcgaggctatcaagaaagatttggagtacctagttcttggctcaactcagttagaaaaaaatgataagttgcttatggatttccataaacgattccatctcatatattttcttcatcaaatccatagtgatgcagaagatgagatagtgtttccagccatggaggcaaggggtaaacttaaaaacattagccatgcttatacctttgatcacaaacatgaagttgatcacttcaataaaatatctcacatccttgataagatgtctgggttacatctttctgtttctacaattgatccaaatgtcaaggagaagggaattctaaggtatcaccatttatgcaggaagctgcaagaaatgtgcaaatcaatgcataagtcactttctgatcacaaaaccgtgaggaaatagaaatttggcctataattagaaaattcttctcaaaccatgagcaagggaggatcattggatgcatgcttggaagaataagagcagagatattgcaggatatgataccttggctaatggcatctttaacac

SEQ ID NO: 124587 - DNA, 222 bp, Glycine max
  unsure (1)..(222): unsure at all n locations
  Clone ID: PAT_MRT3847_8350C.1
cgcatgcacgcgtacgtaagctcggaattcggctcgagtacgngctgcgagaagacgacagaaggggaaggagtggagagagaaaaaaaaaaaaacagancaacncagaanctccaaanccnaantaaanttnttatggancncnttcataggttacgttnttttgggnnaatgcccaaaattccttttctattgcnantttccctgcttctcttcagtttn

SEQ ID NO: 124588 - DNA, 358 bp, Glycine max
  Clone ID: PAT_MRT3847_83510C.1
gacaaaaccttgtcgggcttatatatcttccactttgcgtaattcgttctctggattcaatagcaatatggagaggaaaatggctgctatttcttgtcaagcgactccgggacgaacctaatgtgtctggggtcgagccatactgtgtgtactgggatgaaccttcgcccgatgctgctctcactctcacgaaccatgctagaatggtggtcagactcatgacccctctggcgctcaagaatccctgtggtgcatttctgaattatgctgatcaagatatggaggttagcagccactggtgctaatggcttacaagaaggggggtagtatgggaccaaactctccaatgataaactct

SEQ ID NO: 124589 - DNA, 300 bp, Glycine max
  Clone ID: PAT_MRT3847_83511C.1
cggggtgggttagctactaaacacctcccccccgtccacaaataataaacaaattactaattattacggggaacggccacatactacaaaggggaataatatcccaatccctgaacaatgctatttaacaaaaggatccccccccaataaaaacaacccaagtggtgttatcatcacccccttcaaaaaaatacatttataagctctttaaaaatttgtgggacccacaatggtcccattacaaaccctgaccctggagattctcagagaaatattatggggccccggcctctccaacaa

SEQ ID NO: 124590 - DNA, 1421 bp, Glycine max
  Clone ID: PAT_MRT3847_83512C.1
gtccaaatagagattattacctaattggtacttgaatttgaatgccttaaaatgacactctaactctctctacatcggcacttgtcgagtttgcataagcatggcttattttctccaataaacaaagtttcaatatcaaaaaaagtaaacaaaacagattcaacaagtgtcaactggagcaatggttaactgaaactgaccatatgataatcacatatggcaaatgtataatatgtcaatcatggacaacgttttttgggtcagaagatactctccaataaacaggactccaagctgatgcatgcttttgttttcatcgaccagaagatattctaattaattgtccaagacaaagcactacaaaaaccaacaaacattaaaagcgtgcagggtggggactgttatagtaaaatagaaagacaagattgaaagctttccaagttgtctgcattcgttggactaacaccagtggagagatgctatgatatgttatgccaatcaagtagtagcagccatttctgatttccactcacaaatgtttatttagtaagaaaagaatcaaaaagagagaaccaaaatctggtaattaagatcttctcttcagaagatgtgtaacaccctcaagttcaacccctttaagaaccgtttgctaataatgttcatgctggttctttctctccccttcaatgttcaatcccaagccaaagatagtgaagaacagaacctggcagaactccctcaaacggttcatccaagcaagggaatagtaatagcagttctctccacaatgtttgccataacattactcttacttctctatgttaaattctgccgaactatccctcatgaactccttaggcaaaactcaaatctccaaaactttcagggcctaactcgatcaaggtctagagtttctgggattgacaaacaagtagttgaaacacttcctttcttcaagttctcttccctcaagggttccaaagaaggcctagaatgcaccgtttgtctctccaaattcgaggacacagagactctaagacttcttccaaagtgcaagcacgctttccacatgaattgcattgacaagtggtttgaaagccactctacgtgccctctttgtagacgcagggttgaagcaggggacattaaaaacctcaacttttcattaagctcgcggttcctccgagttccttcaaatctcacggaggatccaaaccttgaaatctttgttcacagagagccatctcatggagggtcagcatcgatccaaaggtaaaataattaaaactcaaactttaaatttaccgacaaaattaatagttttcataaagcaaaaaaaaaaaaaaaaaaaaacttatgtctgaaaaaaagacctcaattaataaagctcacatttaaattaataaaaaatctgttaaaat

SEQ ID NO: 124591 - DNA, 236 bp, Glycine max
  Clone ID: PAT_MRT3847_83513C.1
aattttagtggttaaaactggagattggatcacactgatgcaaaattctccaattagtgacttgttgagagttgctgcttggaagaaaggttgtttaatggtcaagaatgagatgtgttgaaatgtatcaatctaaaagagggcttgggtctgatttggggcaagtgtttctgacaaacaccaacacagcagtgcatatgtgatgcatgttggtcgacgaaacaagcaacactttt

SEQ ID NO: 124592 - DNA, 235 bp, Glycine max
  Clone ID: PAT_MRT3847_83514C.1
gtgtggctattttgggggtggagatcttgcgcgggtgtcatgcctttgtgaattccctgcgtgattgttaggacaatggattatgtttagatgagtgcgcaactcagagtgagtatggtggcttgtagaggagaaccctcggtgcaatcacaggggggtagtcgtggtggtcagagactatgcgcgaatggtggcttggcatgtctcagggcagtggtggcggtgttcaagagga

SEQ ID NO: 124593 - DNA, 475 bp, Glycine max
  Clone ID: PAT_MRT3847_83515C.1
tacggctgcgagaagacgacagaaggggaggaaaggagaggagaggaagaggggtcagttgttcattttcatcatttcattgtttcttttcttttccagacatcaaaccaaacactagctacgcttctctctctttccttcccagagcttcctgtggctgtggaatcatcgtatcttcttacgtccgaagtaagcctttgtcttgtgtgtgttcttcccccttccgtcaggaaaatcagatgcatcgtggtaaattttcccttacacccaagaatgaagtcaaggacttgacaggttcaagtttaaccagttacaaacatagcagtcttctggaccccatagatgtttcttcatcttcagatgatgaaaatgaccttcctaatgatgatgtgtctaatcaattagtcctttatgatcctgtggcgaatggaaacaatgcaattgaacttgcacctgatcctctccagtgtgaaca

SEQ ID NO: 124594 - DNA, 241 bp, Glycine max
  Clone ID: PAT_MRT3847_83516C.1
ccgtctcgactcacgcgttcgacccacacatcactacagaagacaacacacgtcgacccatccagaatatattcactgaatagggactctcttaggttcaaccactatgacgcattaccataaacttgcatactgcacatatgatcaaactattaacgtcaaacacttattttcaataacatcgatctaattatattacagataatgagatcactatacactactgcacataatatattct

SEQ ID NO: 124595 - DNA, 336 bp, Glycine max
  Clone ID: PAT_MRT3847_83517C.1
tggaacctttgggctgatttatgtgcttgcatatctgcatagataatataatggaagggcatggtcgtcagaagatgatggacggacatggacgtgagatgataatagaagggagaatcagagcctgaatgcagttaacgaaacgtaacacgatcagactacggagaggaaaatacccgagtaaccgtcaccgtcgtcttgcgcaccattcctcgacgcgatcgtaaagagagtcaaggtgaaagaaagtccgataacgacgtctaggacgcagtgcagacgatcacctgataggtaacgcgtatacatatctatgactgaaggccctactcgcgg

SEQ ID NO: 124596 - DNA, 221 bp, Glycine max
  Clone ID: PAT_MRT3847_83518C.1
ccacgcgtccgggaaataaggaaagatcccacaccgcaggatggccggcggcaaccatcccaagtcttcccatcacaacaaacctcccccctccgcctcccaccgcaaatctcgctgggaacccaattcctcctccggcaattccccagccgatcccaaatcaaaatcatctaccgccccttgccccaaacccaaagctaacacgaaccctaaccctagcc

SEQ ID NO: 124597 - DNA, 269 bp, Glycine max
  unsure (1)..(269): unsure at all n locations
  Clone ID: PAT_MRT3847_83519C.1
cctacaanaaacgtttgaattttttaaagcgttagggcccccacacacaaatcttttttaataattcattttactattattagattgatctccttaacagttaaatcatacatatttaaattccaatcatatatccaaattattaactttattacactacttcatacataacccattttaacatataatcattttttcccatagtcaactatctatattatataaattttcatatcactcttcaacattaccaacccttcaaaattata

SEQ ID NO: 124598 - DNA, 560 bp, Glycine max
  Clone ID: PAT_MRT3847_8351C.1
aaggggaaattatggtctcctttattcattatggcacaaaatacatgtcgtcaattgtataagaatcaagaagacaaatacaacatttgtttagcttaacataaaccactagatcaatgaaagaaagattagattggcttcattatgtaacaagttgcacaaaaatctgattagtctctgattcttaattatctatggctaaaaagtcaagtgtctggatcaacactagctggttttgaattaagaagtggttgaagagctttgacaacaatagtcatgtttggcctaaagtcagcttcatattgtacacaaagtgctgcaactgctgctaacttagcaattgccttgggtgggtattcattgtttagtttaggatccacacattgtttcactttgtcctcactcaatcttggagttgcccaagtgacaagactttggtgccctttaggcattgtatggactactggctttcttcctgttaaaagttccaaaagcacgactccaaaactataaacatcgcttttttgggttatttggcctgacatggaatactctggagc

SEQ ID NO: 124599 - DNA, 443 bp, Glycine max
  Clone ID: PAT_MRT3847_83520C.1
ggcatgactaatggaaacgttaaaagagacatgaggtcaattgatggattatcaaactaaagcgggagctgcctattatttaaaacccaatctttgaccatcccaaagatcatccatttcaggtttggtgggttcaatgttcaaacggctttggctgatttgacttattatgtgaggatcttgaggcttctacgcaccaatcaccgatgtgcacatggtgggttaccctattcttaaagcagctatctggctcaaaattaacaccttgtcctctctacaatttcagactcaccagggctttggataccccatgagcctttgtaatttccttaagcacatctattttgcattacttcattcgggcccctggtcgcacctttgctgaataaaaagaacacagtcactattctcccattttttctaccaaactttatgagcttttt

SEQ ID NO: 124600 - DNA, 679 bp, Glycine max
  Clone ID: PAT_MRT3847_83521C.1
ggtgcctcggaggaggaagatctaatccaagaagattctagtgtttagaatcaaaataaagctgtcccactgggtcaagtgttagtgcatatatacgaatgcatagtagttaattggtcgatattcttgtcaaggtttaacatacacgatcccattcgttatccccagattttgaggcacatattgtgaacgttacatacggtgagatgtgctaacagtgatgcctacggtgaggagtgttaacagtgacgccaacagttggcgtccgaagataccatatatatcacaaaatcgtaacgggactttcccagatgctgaccaagagggtcgatgggtacactcttaaatcaaagttttcttccgattgaagttgttaatactaattaacgggtcaaactatctgttgagtgtggaagaatggtccgacatatgcgcgagatctagatgttcatgatcgacgactgtggatggacctacaccgagattaatgtagaactgagcatgagcatgcggtgacccggagcaatgggatgtacgtgagagagtgctggatgtatgcagtgtgtaggagtgtgtgtgtgtagagaagtgaggggatgaggttggctgcgggagtgtgaggggacgggtgaggagagagtacggtgggagcgcggatggcgtgagagggagaggggag

SEQ ID NO: 124601 - DNA, 443 bp, Glycine max
  unsure (1)..(443): unsure at all n locations
  Clone ID: PAT_MRT3847_83522C.1
cgacgagctatttatttcattctcccatgggatttccaaatgtcaaatttccgatgactccaatcaacctgcattgatctaaatcccaaacttgcaaatcacgtgtttctccttcgcaaaaccattgttccttgcgaaacagaccgaatagtgtgcatcgccaccgattcacatcacagaactgcatttgagtgactcatggaaccagcttcagctgattcttcatctcaacctactcctccagcttctaatactgaagaacaacactcaaccaaagtgtctggacaacctggcaatgcacatgattcgcaattgtcgtcacccacctggcgaatatcatcctagaactgacctctgcaattcccacaggccctcgngcttggagcacaacagaactcccagaccgaaaatgctggcatgtcagcttttgctcgcctgactgg

SEQ ID NO: 124602 - DNA, 407 bp, Glycine max
  Clone ID: PAT_MRT3847_83523C.1
aggatgctattgatattcaagatgggcatatagtattgggcttaacggaatttctaatgtgtatgagccctatgattacatatcaaaaacggtattttcaatgtatgaattgcctgactttttttttatctgtaagagctacctattgcaatgtaatttattaaaaaaaaataatagttcagtctaaacttgtttaaggatgataaaaaaaaaaacatttcggattgtggcacactatgcataacgtaaataattttgtttgtatgttgggcttcattagttcctattatgtatgacaacgaccactgcgactcctattatataattggaagaagcccatactcccaacaaaatgtgtactaagagactgcttttatttttcttcaccgcacaaaaataattccaaa

SEQ ID NO: 124603 - DNA, 237 bp, Glycine max
  Clone ID: PAT_MRT3847_83524C.1
gatgagaaagaatacatttaaatagtaacattgtacatagggtgttttcctattaaaaattcagtttcccctgagacttaatgtaaccacttaatgtaatcactatctcattgtttcatctttataaacttgtaaacttcatctatttcaaatattttatgcagtacattatattattctgtacaaaggctttcaaacaaaatttttaaaataataaagtattaatctttctccctg

SEQ ID NO: 124604 - DNA, 463 bp, Glycine max
  Clone ID: PAT_MRT3847_83525C.1
ctgcattctccttcttcagtaactttctccaatttgaaagaattgttcatattcaactgtcaaagactgaagtatttattcacatcctcggcagcaaaaaagttaagtcaacttgaggagatcatcgtctattattgtaaatcaataaaagaaatagtggcaaaagaggaagatgaaacagctttaggagatgtcatattaccgcagctacaccgcatatctctagcagacttgtcaagcttggaatgtttttattcgggcaatcaaactttgcagttaccctcgctgataaaagtgcacatagacaagtgccccaagatggaaattttctctcaaggatcgataggtccaaattcttgtagggaaattgtaactcgggtcgacccaaataatagaagtgtcgtcttcgacgatgaacttaactcttctgtcaaaaaagtgtttctacatcagaatcatatag

SEQ ID NO: 124605 - DNA, 467 bp, Glycine max
  Clone ID: PAT_MRT3847_83526C.1
accgagcatcatctctctctgtttttatccctattatcttctcttcccattttttggtcaacctttggtcgttggtttttttctctctttccattccatgtcttcctttctctggttcaaatgacttagagacccttaagcactctagaatatatggcaaactagccatcttcttcagttttctgtttctttctctcttttttttgcagcgttttgaagcctcttccaagtgtctcttactcaagatttccctctggttcattctctcaagctgctgttgagttcatcttccctcttaactcaaagggtaacataacacccttttatttgatgggccatccccagatgaaaaatcatctcagtttttgcttctgggaatctgagttttgttgcttgacttgcaagtgactttggtcttgggttgggggaaccgtgacctttctcaatttttgctaattaattttggc

SEQ ID NO: 124606 - DNA, 520 bp, Glycine max
  unsure (1)..(520): unsure at all n locations
  Clone ID: PAT_MRT3847_83527C.1
tttccattttttggtcaacctttggtcgatggtttttttctctctttccattccatgtcttgctatctctggttcaaatgacttagagacccttaagcactctagaatatatggcaaactagccatcttcttcagttctctgcttctttctctctttttttttgcagcgttttgaagcctcttccaagtgtctcttactcaagatttccctctggttcattctctcaagctgctgttgaggtcatcttccctcttaactcaaagggtaacataacaccctgtatgtaatatttattcttcttttgctcttcacgtctttcccatgttagttaagtgctaaaagttcaaacttttttgttctcatgcctcagtttatttgatgggccatccccagatgaaaaatcatctcagtttttgcttctgggaatctgagatttgttgctcgacttgcaagtgactatggtcttgtgggtggggaaacagtgaccntttctcaattttgcttatttaatttgggctt

SEQ ID NO: 124607 - DNA, 422 bp, Glycine max
  unsure (1)..(422): unsure at all n locations
  Clone ID: PAT_MRT3847_8352C.1
caacacttcttgtatcagtagagtcagtgatgctaatttagtgaacgatagccgtcaaaggaatgaagagagaataataatgcatgtggaaagggattcatgttctcatgtcccagaaaagttgtcagaatgcttcattgagaattctagttcatcattgaccaaagagagggaacctgttgtttctggcaagaaatatattgctgttaaggatggccttattgagagtacttccaagatttcactaaaagtatgtcccaagtcagaagcagatactgatgtctgtgatgctaacaatgaagatcctaaatgtgcagttcaagatggacagtgtgagaaagctgaagagctggttaaatcacctggcaagcaggaacctcaatctgaagacgagagtgatgaatcnagatgttgtggacatg

SEQ ID NO: 124608 - DNA, 195 bp, Glycine max
  unsure (1)..(195): unsure at all n locations
  Clone ID: PAT_MRT3847_83530C.1
gcgagcgaaaatctgcgttctcatggagtgcctttgcgtgtattatattcaatctcaaagcgtccacnnattcagggagagaaaccaaaatgagatgatgcaatacagggagctgagatcgagtcacctnnctggttgagaaacctcnttcgtgcgctcaagttngnnaccttgtgtacccagttctttttgatg

SEQ ID NO: 124609 - DNA, 178 bp, Glycine max
  Clone ID: PAT_MRT3847_83531C.1
gaaaaagacaattcaaggtgatgcacacacagactgagcgtgtaagagtatgatgtggattataaggcggcttgtttgataccatcctagggccggaatgtcgttgcctcgccttcgtcggcattgaactccacattgataagctagtaataacaatatgccgaacatattgaactat

SEQ ID NO: 124610 - DNA, 568 bp, Glycine max
  Clone ID: PAT_MRT3847_83532C.1
agactcgtgccgctgaggttttggggaacaatgatagcatgcattctcgcagcaattcaagcagcaataataggtgccttcttagattccagtaaagcttcgtggagattggagtgggatctacaactaatcactatagtatattcgggagcactcgctacggctgcttcattttgctttttatcttgggcaattaaaatcaaaggacctagttatcctccaatgttcaatcccttggctcttatttttgtggccttatcagaggctagtgtacctgctcatccaatagctgtcggtacgttggtgggcatggttttgatcataatgggattgtacttctttttgtggggcaaaaacaatgacacacagagattgcctcaaccaaatggactaacaagcatgcctgatacatctatagtcgcaccaagttcttctcctaccgacactagtgtgcttcttcaaattgacaagacttgtaataaaaactgaaaaaaatatataagactggtttgtttttgttaagatgttgtctagcaaggtgaaaataagttgctagtgatatgcgcat

SEQ ID NO: 124611 - DNA, 1902 bp, Glycine max
  Clone ID: PAT_MRT3847_83533C.1
atggaggaggagaaatcgagactgttgctgatgccatcaccgttacaaggccacataacaccatttctccacctcggtgacattctctactcaaagggcttctccatcaccattctccacactatcttcaagtccccagacccttcttcctaccctcacttcaccttatcagaaacagaagcctcaaaactcgatcgatgccgtgcacctcaccgccctcatcaacattaaataaaaggatcctccaaaggaacgctccaaagcattgtgctcagaactggtggagcctcttcttttcttgtttttgcctcgtttcctctccttagggaaaagggttacctccccgtacaagagcctctggtgtatctcccaccactcaaggtgaaagatcttcctaagtttcagtcgcaggatcctgaggaatgcaaggcgtcttcaggggttatttggaacacctttaaagagttggaatcatctgtttatgtgagttttgggagtattgcagcaataagcaagactgagttcttggagatagcttgggggttagccaacagcaagcagctgtttttgtgggtgattcgacctgggttaatccatggctcagaatggcttgaaccattgccaagtggattcctagagaatttgggaggaagaggctacattgtcaaatgggaccaaaaggtcaatgccaaatatgcaagcagtgtttggaaggttggggtgcaattacagaataagctagagagaggagaggtagagaagaccattaaaaaactaatggttggggatgaagcgaatgagattagagagaatgccttaaatttgaaggaaaaggcaagtgatttcttgaaagaaggtggttcgtcttactgtttcctggatagcttggttagtgacatattgtcactgaaatctgctacatctagagctcactgatgtttatgtgagttttgggagtattgcagcaataagtgaggctgagttcttggagattgcttgggggttagccaacagcaagcagccgttcttgtgggtgattcgacctgggctaatccatggttcagaatggtttgaaccattgccaagtgggttcctagagaatttgggaggaagaggctacattgtcaaatgggctcctcaagaacaagtgcttagccatcctgcagtgggagcattttggactcataatggttggaactcaactctagagagcatatgtgaaggggttccaatgatttgtatgccatgttttgcagaccaaaaggtcaatgccaaatatgcaagcagtgtttggagggttggggtgcaattacagaataagctagatagaggagaggtagagaagaccattaaaacactcatggttggggatgaagggaacgagattagagagaatgccttaaatttgaaggaaaaggtaaatgtttccttgaaacaaggtggttcgtcttactgtttccttgatagattggttagtgacatattgtcactgaaatctgctacatctagagttcactgatatctttactaacaatcaaccggccacatgtattgcaaaaagcaattcaatttatgaatcaacaaaatagactgaaggaaaaagctgtcatcaaattgtaattcaatcaaatgctgatatagcacataatatcagctaccaattcctcttaccttgtctacagtttacttgtacttttattagtctacaattttttgcttatactcctctaggtttatctgtagtgggataaggcttttattgtttgttgtttattccactaggtttatttcctaacattaaagattaggtttatactgtataactcatacatattgcctttgattttttatttttaggtggataatggatatatagctagtcgatttctatctaaaacaaaa

SEQ ID NO: 124612 - DNA, 651 bp, Glycine max
  unsure (1)..(651): unsure at all n locations
  Clone ID: PAT_MRT3847_83534C.1
ggctcgagctcctctcctccatcacctctagtttttgtataacccccgtcactctgctcccttaattaattagccaccatgctctccgccctcactccttccgaccccttctctcccttctcccccttctccgccggcttcacgccgtgggatgacaacgacgattcccacgccctcttctcccccaaaccggtctctgcttctagctccgcctctgactataaatccgaaccgaacccaaccgaacacgtatgcgcctcgtcctcggtgatgatggacgagcggaaacggcgccgcatgatatcgaaccgggaatcggcccgcaggtccaggatgcggaaacagagacacctggagaatcttcggaaccagttgaacaagtgcagggtcgaaaaccgggaactcggtaaccggttgcagttcttcctgcaccacctgaaccgcctccgaaccgaaaacgaatggctccgctccgagcgaaccctgctacgccaaanagtcgccattntaacacanatnttgatttttcaaccaattcaaaccaccttctccctgctgcatgaccacatgcaccaacaacaacacacctngctcatgacaantaatccagtantantaaanananattatatatatatatatattatatat

SEQ ID NO: 124613 - DNA, 402 bp, Glycine max
  Clone ID: PAT_MRT3847_83535C.1
gcacctatgacaataatatacatgctttatattaagggtttgtctacgggcattgattaagaaattaaaagaagagagcatttaagagaagaaaagcaaataacccactagggccagcctagtggaggtaggtttggataatatgcatgacatcataaattttatccttagtgggaacattgtacaccaaaaagagggagaagaaaaacaatgctaagaacataactacacttgttggtctgaatatatatctataaactttacaaagaaaaaatctactctccttgacccgaagatataactgaacctggatgaaatgttaagaacataactacacttatttactactattactagtactagctataagtagcaacgtaagtcttattagaatgtgagttt

SEQ ID NO: 124614 - DNA, 787 bp, Glycine max
  Clone ID: PAT_MRT3847_83536C.1
atggcccaaactttataatcaaaactcaaccagtgggttttttccacagattatatatttggaaagttatttcccaatattccctaatccaatccaatccgtcctaatcaagttttcatatatgcaaacgtcattttccctctaaaccctctgtccatcacagctttcgaatgaacaaaggtaataacaacatattgcaaatcacatacaaattcacaatactgctatgatactaaagatggttgaagcagacggatgggatgcagaactcctgcctccagaactgatttgtccttcactgattcctcccaagtcagacatcatcatctccttgattcaagtttcccacatcaatttgagcatgtagattatagaaacaaagaaatccacttcataaaaagtaatctggtgctggtttcttagcaggtgttcctcttgattcctgtggagcagcttcaaacacccggaactgcttattaagatttccatccaactccagaattgcagctacattgccacatctgtagcaataatttggagctgaccagacagtaactatctggttattgaacatccatttatatccttccattaccaactgatgtgcacgacatatatagtcaatgttatttgagtggttaaaggaagtaacaacactgccaccaaataagtaaccagcaccgcggggactaagaccccagttatccacaatatcttcaggatctgaccatagaaggtcacacatggcaccatcatgaggtacttcttgcttccgatcaatagttcg

SEQ ID NO: 124615 - DNA, 347 bp, Glycine max
  Clone ID: PAT_MRT3847_83537C.1
atcaattatgaggcttctccccacacgctgttgcacttaggcgagattcaagaaaaagtcgtgttgaaattttcacaagacgaatttcttacagctctgccaactcatgcgcgtgctgcaacaactctgtaggctgatgggtgttcatattagtatgcactggcgcatgatagttcagtgtctacaataccaggagatttcgctatttgtgtcacgttggcaaccatcaacactatgtgtgcctctggcctcaaccatcatattccaagttctcatctttagggcaccatttcctaatgcatttcacaacacactgtttcgaatcaaacggccacacatagaacacc

SEQ ID NO: 124616 - DNA, 1250 bp, Glycine max
  Clone ID: PAT_MRT3847_83538C.1
acgcttctccgtcctcaactttcataaactatatgggggccggagtttctcaaccgtcaatagtacatgttgtcgggggctctttttctttctcttttaccactgaaccatcacacaacaacaacatcaacaaccccttttcatcatactctttaatctcttccgttcaaatttcaattcaacaaacccaacacgtatcattcttttgagtcctcaattttcataaactatatgggggctggtgtttctacaactgatacagaaaaggatgatggggggactttttctttgtcatcagagactcgtcttgatgacatcccagagaattgcatctcctcaatgttcatgaatcttgatccaccagagatttgctaattagcaagagtgaatagggcctttcattgagcttcctcaagtctgattttgtgtgggaatcaaagtttgccacagagctacaagtttcttgctaataaagtacttggtgaagaaaatattgcttctatgactaagaaagagatttatgcaaaactattgccaacccaatcgttttgatggtggcaccaaagaagtttggttggacaaatgtagtgggcaagtttgtttgttcatgtcatccaagtccttgaagattacaggaatagatgatagaagatactggaattatattccaactgaagaatccaggtttcagagtggcatattaacaaaagggatgaataggtattttaattcgatgtttctattgacttggcatttgaaactctctctcttctgtttgatcttgtttttatgatgaaacatattgaaaattgaggttttgaaatgtttctggccaaatcgtatgtcctgacttccggaaccatttcaatttgtctgactttccctagacttgcttgtgtttacagaaaattattagctcgttgaaaagtatttattttcatatttttcttgtttaatttaacgtagaaatgttgtttaaatatattgtgtcttatttttgttgacgggaccatgatttatagaggaggttaaaaaaagttcttgaagattttgattaaagaaaataaagaatatataacaataaagtatttataatattatattaaaaatataaaatttccttgatatctatcttgttaaaataattatggggaggcatattaaatcctatcatagatgagttaacgccttaatggcgctcgaataagttatgttctaagtttaactttagtgttcttatatacataaaa

SEQ ID NO: 124617 - DNA, 322 bp, Glycine max
  Clone ID: PAT_MRT3847_83539C.1
tttttgtgttttttttactttttcgcttctttttaataaaaaatggttgttaaaaaaaacccgagcaacaaactttacgaacgggtaacggactcttaacaagacatgggagggttaaaaaaaaacaagagggtatctgtcccctaaccccgggagaacaggggtttaacaatggaacatttttttttgagaaaacaatgacccatggggaacatgctttcggcaagggaacattttattttgggaatatgccaacatatgggggacaaacccctctgggggggccattctttttttaaaaaaacttcaattttttgggccc

SEQ ID NO: 124618 - DNA, 143 bp, Glycine max
  Clone ID: PAT_MRT3847_8353C.1
acctcgcatgcaccccttccttaaccccggattccgctcgagccttttcttttaggcctttccaaataaagacctggttcaatttctcttcgagccagaaaaatggtcctccggaggttcaagggtgggaagccctacccgga

SEQ ID NO: 124619 - DNA, 288 bp, Glycine max
  Clone ID: PAT_MRT3847_83540C.1
gtgttcatatgcttatatccttaatggtgctttactcccacaaaacccaatgggactgaacggggatgacctcaaacttaaaacggagcgaggtaatattacccccccataaaaaaagctaaagagggggttggcttcaagaaaacctaaccggacatcccaaagaaacaggggggaacaaatggggaccggtggcaaaaaaataagggcccggggaaggaacaaaattccccggaagggtaagggccccctttggcgaaaaaaaaaaaaacccccccgggcctgcta

SEQ ID NO: 124620 - DNA, 418 bp, Glycine max
  Clone ID: PAT_MRT3847_83541C.1
atcaaaactaaactaaacgataccgtttatgcggaatctggaccggatgatcgagcttctgatggagtgcaagacctttgacggaagccaatatgaaggcgctgtgcgatcaggctacagcgattctcgtggaggagagaaacgttcagacagttgaagtgccccatcactatttgatgcgacattcacggtcagttctacaatctcattaatgctattttggataggaagaaacgctaccgatactaattacctctttatggtccattattgtagatctacgggtactattcaatggagactgtcacgctttgggtgggcttgatagctcgttatagagatataaatacaatacttatgagaaatcatgagagccgtcaaaacactcaagtgtattggcttctactatgaatgcttg

SEQ ID NO: 124621 - DNA, 261 bp, Glycine max
  Clone ID: PAT_MRT3847_83542C.1
acaatatcctcaccccttcgctcattttttctttttattattaaaactagaattatactagtatataaacctatgctcattccactctttatcttttcctccaatacctccgccaccactctctctctctctctctctctctctctgtctctacaattctcgcgctagattatctccctaagatgagtgttgaacgcacaagatggtgaacgaccacgagtgtgtgcgttccgcgatagaggatgacaccgttgttgtgga

SEQ ID NO: 124622 - DNA, 216 bp, Glycine max
  unsure (1)..(216): unsure at all n locations
  Clone ID: PAT_MRT3847_83543C.1
gctactactacccncagtnctcnntcagcaatgcanaacttgtcaagtgcngtgcatcatcagctactanttgcaacaacttcatcatcttactcttatcncaanacacccttccttcnacgcagngaacttcaacnangtgctcntctcataggtattactgtnatntgcaactaccattcttctntntctctncnntttgnnctngaaagacng

SEQ ID NO: 124623 - DNA, 1211 bp, Glycine max
  Clone ID: PAT_MRT3847_83544C.1
cgcctctgctgatttggctcgacccttacccttttttctgtctttgctcctcttttcaaggctaattcgtggcctcgtcttctctattttctgtatcgtttttactttcaaccacttccaattttctttttcgtcagatcttaataccatcatggaggatgctgctgcttctgctgctactgctaatgtattggaagccaaagatggtactatttctgttgcttcagcatttcctggtcatcaagaagctgtacaggatagagaccacaagttcttaacaaaagcagttgaagaagcatacaagggggttgaatgttgtgatggcagcccatttggatttgctgttgctttcattacttaactatttgtatgtttttccttctctttttcattttgaacgcaaatccgcggcctcgagtcttttctttttccgtatcgtttttactttccaccacttccattttccgtcatcatggaggatgctgctgcttctgctaatgctgcagaggatagagaaaacaagttcctaactatggcaattgaagaagcatataaggcggttgaaagtggccatggtcgcccatttggtgcagttattgttcgaaacgatgaaatactttcaagctgtcataacatggttgtaagaaatgctgatcccactgcccatgctgagattactgctataagagaggcttgtcgaaagctgaatcaagttgaacttgctgactctgaaatctatgcttcttgcgagccttgtccaatgtgccttagtgcaattcatttttccaaaattaagaaactggtttatggagctaaagcagaagctgcggtagcaattgggtttgagagtatcattgctgatgcactgaaggacactggtttttatgagaaactcaacttagaggtaaaaaaggctgaaggtagtgttgctgtaatggcagaacaagtattcgagaagaccaaagacaagtttattattccctgattagttagctttaatcatcttattaaatgtgagcgcaagttacaattgttcaggaaaacttttgattcttggacaaaaataattttttgtcagactttattttggattagtcaggtctcattttcctgataatccggaggattagacaaaaaagaaataattcaagaaatataaaatttgcacgttcatgtttttgttcaaaaaaaaaaaacctgattcgcaatca

SEQ ID NO: 124624 - DNA, 387 bp, Glycine max
  Clone ID: PAT_MRT3847_83545C.1
tgtgcggcgacaacataaagttgttgaaatattgagaacaaaaataagttgtctcatgatgtatgtaagatgcacaaatgcatccttcaacgttggccttatttttcactactcatttagaatcacccatgaatctacaaattttaatcaaaaccaagtcatcattgattagcattaaacaaatgaattttatagtgaaccatccaccaattgagcatcttccttatctgcatgctccatcatagaaagataaggaaagacaatacaagcgtgttatagatatttttaaacaactgcagattaacattcctttttctgaggcattagagcaaatgccaacatatgctaaattcatgaaggattttcttatgaagatgaaaaaaatta

SEQ ID NO: 124625 - DNA, 785 bp, Glycine max
  Clone ID: PAT_MRT3847_83546C.1
gggaactcaaaatgaaatgaaatggaaatgtaagaagtagtactgaaaactgaactcaactaactcgtgactcgtcagagagaagaaaagaatatcgttcgttcgctcttaccttcttcaccttccttcctctctctctctagagaatggaaccggaatccggaacttcgacttctcggaatccttctcagttgtcttgggtgaatctgtctaggaatttattattagcgtatcaaagctttggtgtggtgtatggagatctgagcacttctcctctctatgtcttcacaagcaccttcaaggggaagttgcagaatcaccatgacgaggaaactatattcggcacgttttcgttgattttttggacccttactttgattccgttgcttaagtatgtattcatcctattgagtgctgatgacaacggggaaggtggaacattcgctctttattcgctgctctgtaggcatgccaagtttaatttgctccccaatcaacaagcagctgatgaggagttatcatcctataaatatggtccctcttcacaggctatagcctcttctcctctaaagaggtttctggagaaacataaaaggttaagaacagccctgcttgttgtggtattgtttggtgcttgcatggtcattggtgatggtgtgcttactccagcattttcggttctagcatcagtctcaggactaaaagttacagaaaaaaaattaacagatggtgaacttgtcctgcttgcctgtgtcatattggttggactgtttgctctccacatt

SEQ ID NO: 124626 - DNA, 103 bp, Glycine max
  Clone ID: PAT_MRT3847_83547C.1
cacaaccatcatgttgtgatgttatcccaaggacacttttcacacagcgatcagacgaatgcacatgcaaagcatgtcaaccaccatggcttcgttgtctcct

SEQ ID NO: 124627 - DNA, 300 bp, Glycine max
  Clone ID: PAT_MRT3847_83548C.1
ttatttttttttaattttcacaaatgacagttacacaacacaaagggggagtgttaacataacttcccatgctgagcttataaacctttacacatgtttgggcacaattggaatgcctcaaacaacacttaaggggtaaaaaacataaccttcaaacctacacaaaagatgtcttgatggaagaaaccaaattaattccacgaggaagagaaaacattattcatgtgttgctagtgctgaggtgtagcataacattgccggatgcgccacatgtgtattcatgattgttggatataatgg

SEQ ID NO: 124628 - DNA, 395 bp, Glycine max
  Clone ID: PAT_MRT3847_83549C.1
tcctcagagcggccgttaattttcccccctttattattcccccacccgagaaaaccacaaacaggttaatatttgaagaagatagggggcaggtcagcccccaccggactaacttaatcgcatgggctctaacaaagaaatcaagtaccatattacctagagcaagagaaatcatcaccccaccggtacgaacatacacttgagctatatttgaagaacccaggccatccagagggaaaagcagaaagacggcgaaaggtgaaaacctacgcaagatatgagcgacgcccccaataattaaattaaactagcagaagagactgcaccctctctttaagaaacatgaagggccccgaaccggcgggcgcatgaatccgccgtcaggacacgaagga

SEQ ID NO: 124629 - DNA, 452 bp, Glycine max
  Clone ID: PAT_MRT3847_8354C.1
attctctttccaaagccatggaaggagttcagactttggtacgacgagaacaaggcaaagggcaataagccatttcttgaggggatggtgaccaccggatggtataagaaaatgggagagaggatttggacaccttggttcataaagtttattcaatcccgtggttattttaatatctacacaaatcttctgcatgagagagcattaagtgtttctcacagagatgctggagttaactacgggaaaactgctggacctgattctaaattactagaggaaaaatctctagacttcaatatattggaagtgcaacctttgaggagtttaagatggtatgatttttgtttcagagaagtacattctggaaagggtgccacgaacttggaagaacttggatcattggtttactctctgcaaaaacaggatagtgtcttcttagtaaatctttttgg

SEQ ID NO: 124630 - DNA, 529 bp, Glycine max
  Clone ID: PAT_MRT3847_83550C.1
ggttgttttggtttactttttttttttaagaacaactcctgccgggcaattgctgataatataacaggcaaaggtgtaactcctaacgcacacacatcggagtactttcaaaaaacagggcctccataactaatccatgtgccttggaaaatttactaaagtcaaccctacactgtgcgaaggcatgaacattcaactgcataagcagcagggctctatacaagtcctccgagtgggggctacctagaaaggcaccttgatcaaactgtcttcaccttatctttttggcaacattcttgggagcttggacacccttcttgccaggatacagaaacccctttacctaccccaccctatgtcttataaaaacagaatacccgtcccttctgtcccagctgtacttgcgtggcctttgaattcaagctttaaaactttcattgccactcctcacccttgggggacccctccaactcttttgaatcacagctgttctcctaatcactttggtggcaggcatcccctcgacctt

SEQ ID NO: 124631 - DNA, 973 bp, Glycine max
  Clone ID: PAT_MRT3847_83551C.1
cgagaagacgacttttcgttgccgattattgtggtgctgagcctctgtagaaatttgtgatggcatccgctatggtgaatcgaggtggttctaggatcatcaaatcagtgtctgcagctcttggtacgaggttttacgccaaggttgcaacagggactgacatagtctctgccgcacccaatgtttctctccagaaagctcgtacctgggacgagggcctggcttccaagttctccaccactcctctcaaagacatcttcaaggacaagaaagttgtcatctttgggctcccgggtgcatacacgggagtttgttcaaacaaacacgttcctccttacaaggagaatattgataagtttaaggctaaggggatagattctgttatttgtgtggctattaatgatccgtacactatgaatgcgtgggctgagaagcttcaagccaaagatgctattgagttttatggggactttgatgggagctttcacaaaagtttggaattagttactgatctctctggtgcattgcttggaactcgatctgaaagatggtcagcatatgtggtagatggaaaggttaaggctcttaatgttgaagaagctccatctgatgttaaagtttctggtgcagataccattttgggacagatttgaagtttctgttggtttgcatgtaggtagtaataagttttcaataaaatgtacctgatacttccagctgattcaatgttttgactcagattttttgttgagttttggacttctttctgttgtaactggtaactactcctttcttccctggatgcatggttatttggttgaacgcaatcaagatgtaaggaaaattttggttctctttaaatgactgtacttaaattttaattagactgaaatataacttgcaaatattcgttgtattgaaatatagagattttaaacaaaaaaaaaaaaaaaaaaaaaaaaaaaaaaaaaaa

SEQ ID NO: 124632 - DNA, 247 bp, Glycine max
  Clone ID: PAT_MRT3847_83552C.1
agcagtgagacgatgatgactagctctagcttgttcttctcctcagcacccctctttctcaatccccacccacctcgctctttcctccccttcagacctctcatcgcactcttcaacccctctcttctcctccggcctccctccaaatacagcaacaaccctttcctaacccgcgccgacgatgacgacggcgacggcggcggccccgaccactacgagatggacgaggacgaaatggaggagctcg

SEQ ID NO: 124633 - DNA, 214 bp, Glycine max
  Clone ID: PAT_MRT3847_83553C.1
attgtgcccatggaccgcagttatggtggtcgtacgggttgtacactggtgtgcaatgtggggaaaacttgccatgtatgatcctcgtcttggagacaggtatatagccttgcttaaactacccacagggtgtgtatcacatgatcatgaggaatctgctcttggggaaggatccgatgcgcttttgcggtctggccagaacaataatttgggc

SEQ ID NO: 124634 - DNA, 243 bp, Glycine max
  Clone ID: PAT_MRT3847_83554C.1
ggtggggtgaggtaagcaaaacccacccctgacccgtcccgttgccatgcctactaagggtgcaaggtcgaggaaagactattgaaattgaaaggaaaacaatagtattattaatttatttatcagtcattcactttgttattacaaaggttatattgtgtatatttatacacataactctaatggtcataaacataattatgaaagcagaattatgtacttaatggtggtatatttggtttg

SEQ ID NO: 124635 - DNA, 356 bp, Glycine max
  Clone ID: PAT_MRT3847_83555C.1
tcccacttcgtacggttctagaggggaattgtgaacaagggcctgtttcatttgttgcatccaacgttgtggtttgggtgctggttggtgggttggattggggcaagtggagggtggaatacccaattgggaaaagttgtgatctttgatggtggcatgtgtttatgcaagggattgatagtgtgggttgggtggacagctgacccgtgacttgtgctggtcagttacggaggaaaaagttgctactcagtgtggacatactgactgaggacatggcttacactaggacgatcatggtcacttcacgaggatacacagctggcctactgggatgcctagacggacgaaatttaact

SEQ ID NO: 124636 - DNA, 452 bp, Glycine max
  Clone ID: PAT_MRT3847_83556C.1
ggccctcatcatcttcaagctcctccaatgctgtccctatggctaagtttggcaagaaaagtctcttaagctatggatcatcatgtaatgatttcaagggagattgtgaaggagttggtggtgctagttcaccctcttccaaattgtgctttagcattcctcgtgccacctgcagttaagacagtgagttctaaggttttcttaagctaattcaattaagacttgtcattatagtttggatctggagtggacaatgtgattcttatatagtatttctttgtaaattttctagctaatattcttcttcatgtttagaggacaatctattttctatgctagaatttgtcttgggagttttgtcctctcaaataattaacaagcttgcttccaaagcgtgtgagtgtatcttaaaaacattttgtgtagtttgaaacgatcgttgtttttcctta

SEQ ID NO: 124637 - DNA, 491 bp, Glycine max
  Clone ID: PAT_MRT3847_83557C.1
taggggatcgactacttgaagtatgatcactgagagaataacaatataagccccatagacaggcaccgtccgatgattgaagctatggcacacactggacggccaatattcttctctttgtgtgaatggggatcagaacatccagctgcttgagccattattgtgggaaatgtttgcagaacaactggagacattcatgataagcgggatagtgtgatatctcgtgcagatctaaatgacatatggactgcttatgctggacctgtgggatggattgatcctgacatcgctggatttggaactggatgcttgacaaccgaagaatatcgtgctcatttcagcatatggtcattatctactgtaattagcttgcaacgaaaacttagcacgtgctgctgaggcattaccatattataatgaatttggcgcactaactgcatttgttctgggtatataagctcctgctgtgattggcaggacattagatcact

SEQ ID NO: 124638 - DNA, 773 bp, Glycine max
  unsure (1)..(773): unsure at all n locations
  Clone ID: PAT_MRT3847_83558C.1
cccggctcgacccacgcgtccgcccagcgtccggaagaagacgacgaagaacacagccaaggaagatccaaagttgctgctgcttcgctcatgcgcatgagaaaaaccctactttggtatctagctagctagcttcggcaacttacacacacacacacacacacacacacacacacacacacacacacacacacacacacacacatattcatctataactttatccaaccttgagatatttttttccggttcttgatgtgttgtacatctagttctagctagcaatcacatctttgtaattatgaacaacaacgagcaaaagatttctcttcttagcatgtacgtatatatatgcatgcgaaaaattatacaaaaatgcaattcgtcaacgacgatacgcgtgctttgaaggaggtaaagttgtaagagtcatcgttaacaaagaaagaaataaagcatatgaaattaagtgcatatatgcttttctcattatttattagttatagttactagttagaaatttcttactcgtaaattaaaatgctgcatctctcatcagttttacttcatgactcgtaatatatattaatatcattctatatcagtgtttaacgcagcgctgcaggtagaagggtcgaagcacacttaccttcaaaaggtaatatataatntataaagtaccaaaatggacccaaaatgataaaacatatgcctatacatgagatattaattatcgttatttacaatagtatctattttatatatattggaaa

SEQ ID NO: 124639 - DNA, 280 bp, Glycine max
  Clone ID: PAT_MRT3847_83559C.1
gggaccaccacttccgtttcttcaattaacggcccccaacggggggcttcggccaatggttcctcggcaggttcggcaggttgggaaaccggttcttcggcccaaaacccggctggaacaacaacacgtgcggggttacgccagaaaacaacgggaccgggaccggcaccaggggggagcttgcgccagaagttgtcttccttccattcaccaacgggtttaaccctatacaaaacgccaccggttcgcgcttcttattcttctgggcttcaaacctttt

SEQ ID NO: 124640 - DNA, 699 bp, Glycine max
  unsure (1)..(699): unsure at all n locations
  Clone ID: PAT_MRT3847_8355C.1
agacgcgtccgacggtgatacactgtcctttcctctacgcacagtgacagtgaagctctcttcctttctttatcccaagctggaactcatggcttcatcatcagatgtgtgtcccactgaggatgctcttaaggcattcctagaatacttggttgatccagtgctgccagctaaaccttctacaccagataaccccccttcaccgtctcaacagcacttagttgcaaaacaggttctttctgttgtgttactatacaactactatcacagaaaacaatatccttagcttgcatttctgccctttgttgaattttgcaagttagctttggttctgaatgttactttatcagtgcatatgacatctatgctgaagcctgatgaaactgagcttgtggagcaggttgtcattaacagaagacaagaacttgaatggcatgtaatatatgtacatgctttgaatgcatcaaaaaatgttcctgatgtagagggatggccaatttcaaaagttttccgtcctttttatcgaacagaaagaaggagaaactggtccttgctttttagttacatcactggggggagtttgggcagtgggttgaaaaaaatgtgnatacccttaagccaaagtcttgaaattccaagtggggcccctaccaacataccaaaagagaagaggtcttaaaaaagcctacaaaaaaagaa

SEQ ID NO: 124641 - DNA, 639 bp, Glycine max
  Clone ID: PAT_MRT3847_83560C.1
ccagcgtccggaaaaaacacgaattggttcttattcatattcagaaaaaccaatttttgaggaacgatgaatagttcatcgccggcccactcttcactatcgacgacggcggttgtaggcggcggtggtggtggcggcggcagcagcaacgccactgtttccattgacgattttcatctcccgtgtgatcccatctcgtcgcaagagcgtaaagacgaggccatgctagttttaaaatcagatctcatggctgcactcaacaaggaggttaaatcattggttgaagataactggaagtttgaagggccacgttcgcggatccacctcgtatcacatcgaggtggtggtcatctctataggcccacagaaatttcaaagaattggaatttgactccaccaaaatagtttgcacactcacctcgtagcactgtgcttctattgtgacatgattatggtctgaaagggcatgaagattgcaaatgaaggttctttccatgcaagattgttagtcacattttctgttagtctttctagtctggattgagaagctggtgttttttatatttatgtgatattattgctctaattttgagggatcaatgattaattgcaattgattgttacaaaactgaaggtatt

SEQ ID NO: 124642 - DNA, 981 bp, Glycine max
  Clone ID: PAT_MRT3847_83561C.1
ccacgcgtccggctgattcaaatttcaaagttggcacgatgcaccaaattaaacaaaaacctgagaagttcgtgtcatgttacgcagcacacttaaagcttgattctacagagttccgaatcccgacgtaagctgaaaaacacacgaattggttcttattcatattcagaaaaaccaatttttgaggaacgatgaatagttcatcgccggcccactcttcactatcgacgacggcggttgtaggcggcggtggtggtggcggcggcagcagcaacgccactgtttccattgacgattttcatctcccgtgtgatcccatctcgtcgcaagagcgtaaagacgaggccatgctagttttaaaatcagatctcatggctgcactcaacaaggaggttaaatcattggttgaagataactggaagtttgaagggccacgttcgcggatccacctcgtatcacatcgaggtggtggtcatctctataggcccacagaaatttcaaagaattggaatttgactccaccaaaatagtttgcacactcacctcgtagcactgtgcttctattgtgacatgattatggttgttatctgcagtactgttatgcctatttttttttttcccatggtagaaaacgctgtactctacatcttctggtgacatgtaggtctgaaagggcatgaagattgcaaatgaaggttctttccatgcaagattgttagtcacattttctgttagtctttctagtctggattgaaaagctggtgttttttaatatttatgtgatattattgctctaattttgagggatcaatgattaattgcaattgattgttacaaaactgaaggtattttaatgttcaagttggggatattggattcagaaagaaaagattaatattacaagtggctcccgaagtcactcgagttattggtgggtgaaaacaaaaaaaaaaaaaaaaaaaaaaaaaaaaaaaaacaaag

SEQ ID NO: 124643 - DNA, 496 bp, Glycine max
  unsure (1)..(496): unsure at all n locations
  Clone ID: PAT_MRT3847_83562C.1
ccaaaaaaaggaacacaaattatggtttggatcataggcaaaaaactaccaaacccaattttagcaaacccccaagtcaatacaaataaaaaggataacttatcctttaaccaaaaacacaatttggtccctttttttttttaaaaatttaaataaattttttttcttcggggggggctacaagaaaaaagcaaacaaagggggtcgacccgagtaaatacccaaaccaccccccttgttttgggtaaaaaacccaaccccgccccaaaaaagtttgggatcctaataaccaggcagggacttttttaacccaggcggggttggtttttgattaaaaacccccacccttggggtccttaaaacgccccacctatccccatttttaagaacaaaaggccccctaatttttcaaaaagaaaataatantaataataataataataatggccccccccaaagggtttcagctctcgcaaggaaaagctgattttatttt

SEQ ID NO: 124644 - DNA, 560 bp, Glycine max
  Clone ID: PAT_MRT3847_83563C.1
ctcgagaccctcgagccgatccaagtaaccaaacacacccgtgataaatgatcccgcgctaattcgaagacggagacaaccaaacgccatagtagtgccgaggcggtgacgatggatcccatcatcctctccgacgaagaagacccttcaacgccgttcccgctccgtcccaagaaacgccgaaccgaaccggatccaaacccaaacccaaaccgcaccgtcttcgtcatcgacgatgacccaacccctcacaaatccatgacaccttctatcacacccgagactccaatgtccgcgctattcgattccgacattgcaatcgtcaaatgcaccataccttccgatcccaatgcaagggtttcccccaaaaaattctctgggtttccccaaatgatttctttggaatcggttaatgagtctcaatattatcgcatgggcacacgggaaaatattgagtcaagagattctacatcgattacgcattcaatgcgagtttgagtaggcattcggcggcggctggctgctctcccgggttttgcttggcctcagataacgagtta

SEQ ID NO: 124645 - DNA, 248 bp, Glycine max
  unsure (1)..(248): unsure at all n locations
  Clone ID: PAT_MRT3847_83564C.1
ttctaatcagagtgttccataatgaatttctatccaaacgnttgaaattgattggattggggacgagagtggttggtgatgtgtgtggataaggcgcacggattgataatggcgtgtttaagagaagactgtatagctgatctcagtctgtgtcatatcgacctcatccgatgtctgtgtttgtatcctatcagtctctgttctctctcttgatctggttatcgcatgaaatctccgtctagcaccct

SEQ ID NO: 124646 - DNA, 149 bp, Glycine max
  Clone ID: PAT_MRT3847_83565C.1
gcgagaagacgacataagggcatcaagaatggcagcaagggtttctaagtcatcatagatattccttgtgcgctttcacttcaagaggtcttggcagttaagcgtgcctatcacaaccgttacaagagatcctttgaagatgatgtacc

SEQ ID NO: 124647 - DNA, 123 bp, Glycine max
  Clone ID: PAT_MRT3847_83566C.1
cgtaaatgcgctttcttttcttataacaatcatagcttactacgtacacacaccagctctgaaagctatcacagatggagttatcaacatctacatctctgatttttaaattaataaccgaat

SEQ ID NO: 124648 - DNA, 453 bp, Glycine max
  Clone ID: PAT_MRT3847_83567C.1
ggctcgaggagcattgttaatagttgtgctagtacgtatcggagtgatgcaatgaccagtgatggcatgcttagtttagacaggaactgtgacagtaataaaggtagtgtaaggggggattcactagagagtgctaaaactagtgttagtcggccaagtgatagcagtggcctcagcgatgacagcaactggagcaacattactggtagtgccaataaacctcacataggagatgatcctaggtggaaggctatgcttgccatccgggtacgggatgggatttcgggcatgagtcattttaggttactcaaacgactaggatgcggcgatattggaagtgtctatctctcagagctgagtggaactcggtgttattttgcaatgaaagttatggataaggcatccctagcaagcagaaagaagctgactagagtacacacagatagggagata

SEQ ID NO: 124649 - DNA, 575 bp, Glycine max
  unsure (1)..(575): unsure at all n locations
  Clone ID: PAT_MRT3847_83568C.1
agctgtcttttctggaagctgggaaaacacgtgtgtgagcattgattcatggtagggtaattaagctttaaagaatgcgctggtttagatgttttatagatttatatcccagcctccctggtcctgaatgtcttggggatgaggcgcgtgcatagatggaaaactattttctagaaggactccagtagtacatgaaatgatcattcatgaacctcaaatattagttgatttctattttctggagcttcttttgcgaccagtaactgctttgctttacaactgagacaggctcattctggttacttactcaaggctagactaggcagttgtatgtaaagtagtattttaagtcaggtttcttccttttaatatgttagcttatatgtttaaaccataaattcttaggtttgttgtacatgaaacaagtcttcaatcatattgaagttcttggaagactgagttttttcattggtttctctcatcttaaaatntgtgaacagatgggcgtggctgctgttgtgcacctttacgtcttgccggcagaaccttacaggaaaggaaagagatgtgtccgt

SEQ ID NO: 124650 - DNA, 525 bp, Glycine max
  Clone ID: PAT_MRT3847_83569C.1
atgatccaacataacagaacttgccttttaaatattgacttcaaaatttacaaatttcagtggttcttcccgaaacccaagctttgttaacaaagaatgagcgtaaagaaccctaaaaaaaaaaactagataatgatgagaagagactgattccaaaacaacaattaggtgacatgggcaggaaaattaggggaaaaaaatatattggtcacaaaatgaagaaaagaaaagaaatttttgggaaaaaggtttccctaaaaggcccttaagcggagcaggggggccaaaaaaaaaagtccccttttcaaatgccccggccaaaaaaacaaaggcaattttgggggactcaacgtttttccaaaaaactgtttaaattagggaagcggatgaggaaaaaaaagcctccacctaaagcccccctccaaaacaaaaactcaatttatggaaagccatattatctctttaaaaccaataagaatcggggcttcctccaaggacagaaccaccaccaaatatatctttttt

SEQ ID NO: 124651 - DNA, 670 bp, Glycine max
  unsure (1)..(670): unsure at all n locations
  Clone ID: PAT_MRT3847_8356C.1
cccactcgtccgcccacgcgtccggcctatccgaattctacaaaactacccaagggagaatacaatttacagctatatttgaggcatgacaatgtgcaggttttggaaaagatgaagcagctggtgttattcattgagcgaagtttagaagagaaggtagtacgtcatattctgaaagactttatgtatcccttgtatcttttgcttgaaacacagtcgcatttgtcatcacttgattgtaagtttttccaaaggatttctcaaccaaattctatttctctggctataaggcttcttgatgttcaatggttttttattgtgcagactttttacatatgtggctgacaaattatttttactaatggaaattctaaattttactttatatgaagtatacaatttgtactatctttggttcgagtgcaaccggctcgaattccttaaacaaggtcttgggttcgagccttgtggatgaaaaaaaaggtggatgaaaggtgagacccccttggtggtcagtcaagttccttggtgggagattagtcatcaacaaaactgttgaatactttgcacaaatgtcatggtgacttanaagaaactatttgtacttgaaaatttcaaatatcttattaatagaaaaaagtcatagaatttctttttgaacagcattgat

SEQ ID NO: 124652 - DNA, 230 bp, Glycine max
  Clone ID: PAT_MRT3847_83570C.1
attctattatcccaagaattaatcttatgctactctactctagatcaaagtgtcactcgtcagcatcttctagaaaactgcggaatacatctgcatgatctggaattcgtgttctatttcgattgttcgactgtttaattcaacacaggcaattaggcatgacactcttgttgagtatgctctgcctatctgaaaatttccacacctcttttaattgtcgtaatgatgtg

SEQ ID NO: 124653 - DNA, 340 bp, Glycine max
  Clone ID: PAT_MRT3847_83571C.1
gaggctgccaggtccacatctcaaatcgatgacttgccatatgttcgggcccaagccatcagcctgacgtgaggttcactcaatcttagaccaggtgcgatcagtttccttcgtagtgttttctttgtgctatcaccgccgagcgagctctactttttggaagacacgccatctgcatctgtgcactctcatgctgcgttactaccgatatgtgattctccaacaactgacacatagtagaaatgctttcctgcctctctctgtgaagatcaggtgctcaatgaagctcacagagatcagccgctgaacgagaccacttgggtgggtgacaaggcaacat

SEQ ID NO: 124654 - DNA, 399 bp, Glycine max
  Clone ID: PAT_MRT3847_83572C.1
accggggaaaaaaaaaaatgggcactagaatatggttataaactggcccccaccaattaaaaggcccaacatggaaggaaaactaaagagttgacaagaccaagctctatgttacaaggcagaatgaaaagtaaaccccgagttgtgtgcatccgtagattttgacacattacatccgatggctgactttgcggacaataactataatcactacacgcccttgaaaaaaatgatacaagttgctttccccaacgatgggacagggggcctgtggcatacccaaggggtttattggcagatggactctacatcaaaaaagtattcagtcgtagctccctaggtatgttataccagatggtgtgagccagactcacaacacaaggggtgggggccttccta

SEQ ID NO: 124655 - DNA, 305 bp, Glycine max
  Clone ID: PAT_MRT3847_83573C.1
tttttgaatatattttttttcgccttaattttaattgaaattaaatggtatacatgtccgatacataaataagacctctatattacgcgtacaaaatacaaatggagtcaaggatcgataaccacgaatcatatgagaaataatgatatatcctccctcatatatagaacttatgattataactgtagggtggatgggtatattaagcataattaacgagttttgatacactgatatatatgaggaagacgaggctttggtactaattaatactatagtgcaatcaatcaagcttttgaaagtga

SEQ ID NO: 124656 - DNA, 159 bp, Glycine max
  Clone ID: PAT_MRT3847_83574C.1
ccgagctcgagcctcggacgaggggatcgcagcgaagtccactatgccgaagcgaattcatgagactaaagacctcctcctcactgcaacgcagtaggatccacgctctgtgcaaatcgcacggactaagcttgttgagacgtccacagaccgcagctc

SEQ ID NO: 124657 - DNA, 569 bp, Glycine max
  Clone ID: PAT_MRT3847_83575C.1
gagaagaaacgtgaaacggattagacttttaacttctagatcctggaactggaccctgaaccctattgaccactgagcgctccctaaaccggggggagggaggacaaattaaaaatctaaaaactataaagggaagagggatgggaaccgtgaaccaaactatgaaacccaaaacccaccatgcacaatgcttaacttttcccatttcccacaaccttctacgctgaatcacgatttaccatcgtcactagcagcaatcatcatcctcctacttctcatattgctaatggctatagactttaaattgtgacacgcgagactctttgaactctgaaccttcaccctccaattgcttaccgaaagccaaaacagataccccagactcttgtttctggccgtgggaccggagggcgactgtggccttttaaacatcaaacagcatttgccatcagcaactttaccgtttaccgacaagagtgacgggttaggaggcaggatgctaatccgtaaactgaactctgacctgagacctgaaaacgagctaggcggtcggagggccctgtggggag

SEQ ID NO: 124658 - DNA, 289 bp, Glycine max
  Clone ID: PAT_MRT3847_83576C.1
ggggaaaaaaaataaacttttttaatcatttttgcaagaaacaccagatgaatggtttacttcatctcaacgggtccaacaataagctgctcccttgacaaagtgtggttcctttgggaaacctcccaaaaaaataacttcttccttctttttgcgggtttatgaaacatcaaaagccaaggggagcttgccccatttttttttagtttccaaattaagcaaaattttgaaaccctacccaccttaaataaatgcctgcccaaccgctttatgaggaaactttttttta

SEQ ID NO: 124659 - DNA, 455 bp, Glycine max
  Clone ID: PAT_MRT3847_83577C.1
ctctccctccctccctctctctctctgtgcttccattttcgttgtcattattctctctctctctgaattttcttgtctttctcttcgcgtttagggtttcgtttcctttacttcaaaatcaaaagctcagcttcaccggattaagtgtaggtagcggtgataccttcaattggaaaatttcgaagtttggatttcatttccttgatggggatgatggtggccatgatattggcaaggagagtaacggtgttggctgatgtgatgggtgaatccatgaaaatataaaaaatatctgtttgaatgaagatgaatttgttttttcctgccatgttacggaatgcaaattttagtgcgtttgaatgaggtgggttgaagagatctgtatgcttgctagaaaagtaatccaggaatggctattgctggtctacacagtgtgtctgtgctcgactcttctt

SEQ ID NO: 124660 - DNA, 511 bp, Glycine max
  Clone ID: PAT_MRT3847_83578C.1
gcgaggaatctctctctctctgaattttctttttctttccttcgcgtttagggttctttttcctttacttcaaaatcaaaagctcagcttcaccgtttctgagcgaaatggtgagaaacgaattttcgaatttccttttccggagtcgaaatgacaactccgacgtggtgagccgaatggctttcgtttgctgagcttcgctgaaattatggaatctgagaatttttcggttcaggattaagtgtaggtagcggaaataccttcaattggaaaatttcgaagtttggatttcatttccttgatggggatgatggtggccatgatattggcaaggagggtaacggtgttggctgatgtgatgggtgaatccatgaaaatataaaaaatatctgtttgaatgaagatgcgtttgtgttttaatgccatgttacggaatgcaaattttagtgcgtttgaatgaggtgggttgaagagatctgtatgcttgctagaaaagtaatccaggaatggc

SEQ ID NO: 124661 - DNA, 289 bp, Glycine max
  Clone ID: PAT_MRT3847_83579C.1
tcgagggagccggcacgagattgacttccatcatcacaaacaagtagccttagtggccgtactataagcacgatcaacagcatacggacaccgtcactgtttagtacgcaaaccaaccttgcctttctctcagagcagcatttttccgcattcgtagtatcaatacgcgaaggcacaacggatcgatacggcttctttgatatctcgcggtggttgcctcttctgacagaagtgatgcggcttggtattactgtgaggcagacaattgatgtctggagaatgggaatct

SEQ ID NO: 124662 - DNA, 1757 bp, Glycine max
  Clone ID: PAT_MRT3847_8357C.1
tcgttcacgcgggctcgagttctaaagctagtaagtagtaagtagtaagccactatcgtttctctctaacagcaaaaaagttctaacctcaccaaacccacactaccatgggtaatgagaatcgcgagcttcacgtattattcttccccttcccagctaatgggcacataataccaagcattgacttagccagagtctttgcttcaagaggaatcaaaaccaccgtagtcaccactcccctcaacgttccactcatttcaagaaccataggaaaagccaacatcaaaatcaaaacaatcaagtttccttctcatgaggaaactgggttgcccgaaggttgtgaaaattccgattctgccctctcctctgacttgatcatgacgttcctgaaggccaccgtgctcctgcgggacccactggagaatctgatgcaacaagaacatcctgactgtgtaattgccgacatgttctacccctgggcgacagactctgccgccaaattcggcattccgagggtcgtgttccatgggatggggttctttccgacatgcgtgtcggcgtgcgtgcggacatacaagccccaggacaacgtctcctcgtggtccgaacccttcgcggttccggagcttccgggggagatcaccatcaccaagatgcagctcccccagacaccgaaacacgacgaggttttcacaaagcttctagacgaggtcaacgcttcggagctcaagagccacggcgtgatcgccaatagcttctacgagctcgagccggtttacgccgatttttaccggaaggagctcgggagaagagcgtggcatttgggaccggtttgtttgagcaatagggacgccgaggaaaaagcatgcagaggaagagaagctgctattgatgaacacgagtgtctgaagtggcttgactcaaaggaaccaaattcagttgtgtatttgtgtttcggtagcatgacagcgttctccgacgcgcaactcaaagaaatcgctttaggtttggaggcttcagggcagaatttcatatgggttgtcaaaaaagggttgaatgaaaaattggaatggttaccagaagggtttgaggagagaattttaggtcaaggaaagggtttgatcataagaggttgggcaccccaagtgatgattttggaccatgaatccgttggagggtttgtgacacattgtgggtggaactcagtattggagggggtgtgtgcaggggtgccaatggtgacatggccaatgtacgcagagcaattttacaatgctaagtttttgacggacatagttaagattggggtgagtgtaggcgttcaaacgtggattgggatgatgggaagggaccctgtgaagaaggaaccggttgagaaggctgtgaggaggatcatggttggagaggaggcagaggaaatgaggaacagagcaaaagagcttgctcgaatggcaaagcgtgctgtggaggaaggaggatcttcttacaacgatttcaactcattgatcgaggatttgaggtcgcgtgcctgttgatgattgttgtgtcatgtatgcatgtagacttaggacggtttgtgggaaattgtgatgatcgatttgctaataatacccgcggaagttgcttaaaccttttttaatgtttttggttcggtttgtgagtttttaattttggttcttatatatttattttatttatgttattttgtctttaattcttataggttttttctgttttcaaaaaaaaaaaaagggcgg

SEQ ID NO: 124663 - DNA, 501 bp, Glycine max
  Clone ID: PAT_MRT3847_83580C.1
gagatattttgttggagatctcgggttggtagtagctaagatgactgcgctctacatgaaatgtacactctctttcttcatagcattgggaaatctggctgtagacaccatcaattttgaggcctttccccacatgctggtgctgttgggagagattcaggaataagttgtattgatattgtgacaagaggaattacttacagcttgggcaactcaggtgcgtactacgacaactatgatggctgatgggtgaccatatttgtatgctatggtgcttgatagtcaagtgcctacaataccagtggattatgtcatgggtgtgaagatgacaaccataaacaatgtgcgtgcatatgggctcaatcccggtatgttaggttctcgtttgttgggcaccattcctcagtccatgatcgagcatactgtttggaatcaaatggcgacagtgaggacaccattgaactttgattctagcaagctgagcttcagtcaattttctat

SEQ ID NO: 124664 - DNA, 283 bp, Glycine max
  unsure (1)..(283): unsure at all n locations
  Clone ID: PAT_MRT3847_83581C.1
ggnattccataaattgcatttgcatttgcatcaataggaaggaaacaagaatggtacattgttcttgtcatccattgtaatttgtaaagtttttnnttttttgagtccattatcncattttngttcnatncaatcgattgancttgttcaattctccagatgggttttcccttgtaaaanannaganaggaaaaanaaanngggggncnccnccnaaagangccccnnganccccgggatntnttccggnccggttcccgangggcnacngnttccccanagc

SEQ ID NO: 124665 - DNA, 338 bp, Glycine max
  Clone ID: PAT_MRT3847_83582C.1
cattatcaagggtccagtccatatgtgagtatattatcagataccaacatggaaggccggcacattttaggcatacatcttaccctcaatggccagtatgtttcacaggctggcattaatatacaggcccttactcagggcctacacatgcaccagctaactacttctatgctaacggacgcttcataccttttgctgtaagatcctacatgctcagctcctaaaccagcttgaccatttcttgtgcggtgaactcttatcatacttacatggagaaggtagcacccctaaaaacctcaccatctatatacccacaatctgagacgcgcataattctg

SEQ ID NO: 124666 - DNA, 674 bp, Glycine max
  unsure (1)..(674): unsure at all n locations
  Clone ID: PAT_MRT3847_83583C.1
ccacgcgtccggaaggttcaactcctgctggctctccagtgccaccgcgtcacgctccaaaaggttcgatctttgtggaaaattttcaaatggggtgctcacaaaaaggaagctttcaacttcaagcacccttcacagtcccacgaaatcatgggcctcgctgctcttgcaagtggggttgtttgaagaagccgaggacttgctcttcacggtggaaagtaacgagattttttatgatctcgtaaaagggtacgttgctacgagagattgggaaaagggtgcttttatttatgatgttatgaagggtcgagagaaggttccttcgcgagggattgttatgattttttgattgatctcttggtgaaggtgaagaggacgggtcttgcatctagagtggcttttgatttggtggatttgggtgtaccattgactggtgatgaggtgagagcattggagaaggttatggtgctgctttgaattgatgggaagattcaggaagcaaggaatatggtgaagaagggtgttggttcttaattctgaggttagtagttttggtttatgatgaaaattgcgtctggantattgtgagaggagggacttcaaagatttggttagtttctttgntgaggtggaagtgtgccccttagtgtgaaggctgctataagagttgtgaa

SEQ ID NO: 124667 - DNA, 390 bp, Glycine max
  Clone ID: PAT_MRT3847_83584C.1
gcgctcgaggtgggcgaaaccatggctgaatttcatagatctccacgagcttaagcctgctggggatgcaccatcatggacctttggtgatcttcacgttgaaatagagggagaccatccatgatggccctctgggccaacacatgaccctgaagctcaggatgcgagacatgatgcgatcaagaccattcagcagcggtgtaattcactggtaccctatgaagctcatgaggtggctgattgccatggctgaggagagtgcttgagcttgctaagtatattcatgattctcacctcaagaggtgacagaaggaagacatgctacaagtggacgtccaccctactcaccgaggggggatacatctagactagttggaacatgatccttac

SEQ ID NO: 124668 - DNA, 401 bp, Glycine max
  Clone ID: PAT_MRT3847_83585C.1
gactggatctcgcaattacttcacacccaccataataactgatatcttcattgaccatttcttctttgttaccatcaaaaacacacacacacacacacaacaacactctgaaactaacagcaacagctaaagaccatgttggtgaacgagatgcacagcaccacatagagaataagaggaatatcttgcggcaagtgtactgaggcttaagacactctcttttaatggacatgatcacaatgcttttgatatgggcacatcttagacccaccaaacccaccttcacgctccaagacgtcaacctttacctcttcaacaccaccgaggcgaacttaatcacttctaaatttcaggtcacgctcatcacgcataacccgaacgaccgcatctgcgattactat

SEQ ID NO: 124669 - DNA, 537 bp, Glycine max
  Clone ID: PAT_MRT3847_83586C.1
aagtcacataatttttttgtcctcatagatcagatgattttctttacttgttaatcatggtttactgtttagtgaaccgcaatttgttttcctatgaaagatagaagtcatttcactgttcacaaaaaaaaaaatgaaaaaaaaatgaaaaaacaaaaaaaaaaaaaacttgcaaaaaaaaaaaaatttaaacaaatggcagtaaaaaaaaaaaaagcccaaaaccgaacgaccttaaccaaaaagggggcgccctttttagggaaccaagtttcccccccggggcgtggcaagaaaaaactttttttttggggcccccaaattaaattcccgggcccgctgtttaaaaccttgggaccgggaaaacccctgggttccccaacttaattgccttggaagaaaacccccttttgccaagtggggataaaaggaaaagggcccgcccaaaacccttttccaaaaattggcccaccctaatgggaaatgggacccccccttgtcccggccattaacccccgggggggggggggtttcccc

SEQ ID NO: 124670 - DNA, 1341 bp, Glycine max
  Clone ID: PAT_MRT3847_83587C.1
aaaatgccttgacgataggcttaattaagtcggctacaagaaaacgacagaaggggacactcatttctttttctctatcttttgttctgctcagctcgatctacctaccttggttcttctctgttctgttatttcagtgcagcagcagaaaatgaccatcctcattgagcaacctgcccttgagttacaagttgaaggcaacaatgtgcatgctgaagaaaccaatgagcttgtattggatggtggatttccattgccaaaggatggatatatggccccagaaatcaattcatttggccactccttcagagaatatgatgctgaaagtgagaggcaaaaaggtgtggaggaattttataggttgcaacacatcaaccagacatatgactttgtgaagagaatgcgggaggaatatgggaaattggacaaagctgaaatgggcatttgggaatgttgtgagctgctgaatgaattggtagatgagagcgatcctgatttggacgaacctcaaattcaacatttgttacagtctgctgagaccatcagaaaagactatcctaatgaagattggctgcatttgaccgcactcatccatgatcttggaaagattcttgcgcttcctagctttggtgagcttcctcagtgggctgttgttggagatacatttcctctgggctgtgcctttgatgagtcaaatgttcatcataagtatttcaaggacaacccggattacaaatgccctgcttatagcactaaaaatgggatctacacagaagggtgtggattagacaacatagtgatgtcatggggacatgatgattacatgtatatggttgccaaggcaaatggcaccactttgccatctgcaggattgttcattatcagatatcattctttctatccattacacaaggaaggtgcatatactcacttcatgaatgaagaagacgttgagaatttgaagtggctcaaaatttttaacaaatatgatctctacagcaagagcaaagttctagttgatgtggagaaagttaagccatactatgtgtcactcattgagaagtatttccctgccaaggttagatggtgaaccatttgaattcaagccaaggttttgaggagattgatagataattattctggcgagcgagcaatgtatcaaataattttagttctttttttcttttatacaaggattcagactgcaccttattatattgaattcacctgcaaaattgcaatcttcaaatagtaaaatttcatatccagtcaagaaataaataaatgatttcatattacgatgaccgaaaaaaaaaaaaaagttccctcgtgccgaattcc

SEQ ID NO: 124671 - DNA, 497 bp, Glycine max
  Clone ID: PAT_MRT3847_83588C.1
tagcttctcacacctccttccttccaaagccaccattctctctttttccattttttgtttctcttttctcactgcccaattctctctttcccaatatatctgcagcctttgtattcaagttctgaggctttgtttccatgtttttccttcatggggtgctgatatttctccgttttttgcatcatgggtttttccctcaaaatggattcttttgagatgatgagttggtgagtactgcggtatttattttgggttttggcttcaatttggactgcatgaaatggcttctcttgtgagaaagttaaggccttcttctgagcctactgttactgtggaaactgaagatagcttaagcagctatgagtactcccttgctgtggtgtataatggccctcctctcagttactccattcctgaaatccctgctttcaaaattgaccaaatcccaattgcaaccattgcttctctctatcatgatgacgtctcagtcccagtta

SEQ ID NO: 124672 - DNA, 333 bp, Glycine max
  Clone ID: PAT_MRT3847_83589C.1
ggaagccacaatcaagagcttgggcacagaataaacatgattgtgaaaagaggaaaagggatgctgataatgatgatactgatgatcgctaactagcacatgctattgctgatacaatgtgatgacagcaaagatagggtcatttgcttcagggagagcatagacttctaagcgaatcactgcttgtgatgtcttcttctgctgggtaaggatcaaacacatgagataattctgttaatgtgtggttaatactcatggtgatatttgtaagcaacctttgcttgttattgctataaatgggttaggatccatcaactacaagatgtgttaagg

SEQ ID NO: 124673 - DNA, 410 bp, Glycine max
  Clone ID: PAT_MRT3847_8358C.1
ttttcgcgtgcgggcataattattagagaaatatttcctgtgactaagcatgaaaatgtatattcacttaatttacagggaagttgtgtttctatcaatactgtccagatcatattgttggaagcaatgtgtgttttttgatctgccagagaactcacaaaagtgcacctaccaaatcatgtcaaaaaatccactacgataaactggattcaaatatgggccaacacagggagctgagtagcttattttggctattggtgagctagttccaggtcattaaatttacttcagactgaggttgcacagcccacaacgattagtccaaaaaaacgcttggcttggcttatgaagaggagatatacattattggacagattcattgatccccaccgtaatgctcatcctttgag

SEQ ID NO: 124674 - DNA, 199 bp, Glycine max
  Clone ID: PAT_MRT3847_83590C.1
gacccactcgtccggtaagactgtcggtgaataatattgaacttctatagacccaatgattttttgacacaatgggggcttaatattataacgctagtttttgatcttgacctctcataacatccattactcaactttttgatcacatcattactaataatatgttttccaaaaatatcaatgatccctactcttttat

SEQ ID NO: 124675 - DNA, 121 bp, Glycine max
  Clone ID: PAT_MRT3847_83591C.1
tcagggtccgctaaaagctctggcggcaggcaacacaaacttcacagacacatccaaggcaccagatgatggagagactgctgacctccacatgtacaagaggacacacataatgatcccg

SEQ ID NO: 124676 - DNA, 128 bp, Glycine max
  Clone ID: PAT_MRT3847_83592C.1
cctatcataggctctagcacttaactagcaatactgatgaggactcgatacagagactatgactataaagatgccccagtctaagatggcctgaaaaacgtgtccatggcgggggcgtttgctgagac

SEQ ID NO: 124677 - DNA, 1171 bp, Glycine max
  unsure (1)..(1171): unsure at all n locations
  Clone ID: PAT_MRT3847_83593C.1
taaaatcacaattctttcctcaacaaaagaaaataatgctccaagggaattccatattgatcacactgttacaaatgctacttcttatcagaaatggcaacggtcagaacgagtgcaataaggaattgtcttgtgggcctggcgaaccccttattagatttcccttccaactggtgaaggggatcaaagatgaatgtgctaatcccgggttttgtttatattgtactcaaaaaaatgaaaccatggttgtgctctctacaatagaattccgtgtctattccataaactacgaatttaacttctttatgttgagggacccggaaaattgccttccgaacaagtttctacaaatcgacaatttttttctacagcataaccaacttgaactaggatttcctggacatgaaggaacaaacaacttgagcttctttaactgttcttcagttgggtatacatacctcagaagatttgtttatggtccttactgtttggattttagtcaacaagatatgatctcctgtccgatttacgtttctagttcttacgacagcgtcctcgatttggatctaacatcctgtaccaggatgtttgacctcatttcgccagctgaggcagacgacctgcagtggaattctttgaatatgagatggtccataccaaattgtacaaagtgcgaagcaaaaggcaagagatgtaaatggaagaacaacagcaacacagaaggagacattgaatgttttggctacaaacggaaaagaatccatgttccccaatcttttatcttcgctactacaggctcaattcttttggggctggtggccattgttgtctttaagatagcactctattttagacagaaagaagacgaccaagcaagagtggccaagtttttagaggattacagggcagaaaagcctgcaagatttacctatgctgatttgaaaagaatcaccggtggctttaaagaaaagttaggggaaggagctcacggggctgtattcagaggaaaactttcaaatgagattctagtggctggtgaagatcctcaataatacagagggagaagggaaggagttcattaatgaagtgggaatcatgggaaaaattcatcactaaccgtgggtcgtttgcttggcttctgtgcagaaggattncatcgcgctcttgtcta

SEQ ID NO: 124678 - DNA, 734 bp, Glycine max
  unsure (1)..(734): unsure at all n locations
  Clone ID: PAT_MRT3847_83594C.1
cggattcccgggtcgacccacgcgtccgctttcccttttgttccgcatcagataataaaaccaccattaacaccgacctcaatcacattcctagctaccaccttcaacccttctttttgttttatccttctctgtctcacaaagttagatagatatagagaggaaggtgccacgtcaccatcacagtttcttcctcaccaaatcctaaagcaaagtttccaaatttcttcacatcataaatacacaccacaccccattgcgttaagattcgcctcctccctctcgttggattttgtttctttgttttttagagcctccattgtgaagatttgatctcacttagtgtgtgtgtgtgtgatggggaattcatttgggtgttcggcttccggcgagaggttggtgtcggcggcgagggacggcgatttggttgaggcgaagatgcttctggaatgcaacccttgtcttgcaaagtactcaactttcgggggtctcaattcccctcttcattttgcagcttccaagggccataacgagattgtggcattgttgcttgaaaatggagctgatgtgaattcgagaaattactgggggcagactgctttgatgcaagcttgtagatatggtcattggggaaggtggtgcagacccttctgctcttcagatgcantgttgggaaagcagattatctcagcggtgggacaaggtttttactttgcggccatcaatggggcatg

SEQ ID NO: 124679 - DNA, 150 bp, Glycine max
  unsure (1)..(150): unsure at all n locations
  Clone ID: PAT_MRT3847_83595C.1
ttgcctttcttaccgcgaacacaggnngccgcgcccgaaaaccggaaacaaacgcaancgccacccgaccgcaagaaacncncaaagncnncccaccacacagcggacgaacccgaaagggaaagaaaaacacacaccgcgcgggccaca

SEQ ID NO: 124680 - DNA, 316 bp, Glycine max
  Clone ID: PAT_MRT3847_83596C.1
acgacgggggatgggggttccatttctcaccagcttctgcttgttcggactctcatcgctcctctgctccgcatttctcatgggcacggtcaagatcgggatcaacgggtttgggctaattggccgtttggtagcgagaatggctctgctgatagacgatgttgatctcgttgccgttagctactctttcatcatcaccgattacagtgtcatacatgtttcagttcacattgttcatgggcactggcatcatcacgatgtcacggttttcgtcgagaagtcccttctcttcggtgactgccagtcactatttttg

SEQ ID NO: 124681 - DNA, 377 bp, Glycine max
  unsure (1)..(377): unsure at all n locations
  Clone ID: PAT_MRT3847_83597C.1
ctgaggcattcactcatctacacctaagcattttagagagctcatgcatgtcggtggcctaggtaacgatgaattgaagagccatgtacaaaaatacctactgtatacgcagagagttcctgttgcatgaactaatcaaccatacgtgggtctcggaggtttgtagatgtatcaagatcattacaatgactcttcaaaagttagcaactaagngcacattctgctcatagatctcttaattactctgcacgatatctacaaggtacattatctactgaaagttgcagtttagaacatgatgaatatgcaattaactgtaagtatatttgggaaaatgatatgaacaaaccaagaaaagttgatgtataggatactac

SEQ ID NO: 124682 - DNA, 128 bp, Glycine max
  Clone ID: PAT_MRT3847_83598C.1
gcacgcgcacagcagactaggaatgcaggcacgagtcaaacctcagtgatacaatccaacttaaccctcctcatattgtccattctacttagattagtagctaattaacgaagtgacacaacagaaga

SEQ ID NO: 124683 - DNA, 427 bp, Glycine max
  Clone ID: PAT_MRT3847_83599C.1
gggtgccggtccgggattgacccacgcgtccacggttaccgatttctccaccgtgaaggtgtaaagactgtggatcatggaagcctgctggctcaaaagcatggagtagacaagttgagtcatactcaggttcatgagcttggagtttggtaatcctgaagcgtaccggatttgagttgtgataacactagtgctgctggatggactgatgccgcaatgcatgatgttcaggttacaattgatggggggatgaactatgaggaatgtgtacccaggacctatcgggaggtaaatccacaaatatactgctgggtgaaataggaggatggggaaactgactattcgccagggcactgctacatgtgttgaatgaaggcctatatatatagggggaggaggtggtgcaaagaatgctcttatcatgaat

SEQ ID NO: 124684 - DNA, 862 bp, Glycine max
  Clone ID: PAT_MRT3847_8359C.1
cacgcgtccggttctcttccttctttctttctttctgccacagttgggtgaagcagagtccaagtgcagggaggtgcaaggcaagtttgcttaatcccacgcacccgttgaggctccgcttaggtgagccataaaaaaatcgcccttatcgtgcaccctcaattggttttcatgagagtaaagaacctgcgagaatgagaaggtagaaactttccgagtcgcagcgcgtcgattcacaaaaatggttcaggttgaaagcaacagcagcatgagccgcgtggtgctggagccccacgcgcagttcgacctcaccgcccactcacgcgccagctccattcgatccctctcaatctcccactcgaaacgacaccgtacgactcttctctacgtcggaactcactccggaaccctattttccctctccgccgaggactccaacgacagcgacgacgccgttttgcgcaagctctcgttcctgagaagcgtttcggtcagcgacgccgccgtcgagtccatctcggtaatcgaagagttccggaagcttctgttgctgtccgatgggactctgttcttggtcgactccgaactctcgaatcgcgccacgaaattgagtttcccgaagggggtttcgttggtcacgaggagaaggctcaggaacaacggtggagaatccgagggtttcggttcgggtttaggttcaggttcaggttcgggttcgggtctaggattgtttcagaaattgagaatgaactcaatgaaggagggtgaagtgcagagtgagacaggtggtggttgtgtttttgcaattgttgttgggaacaggctgattctcgcggagcttgttttggggaataggaatggg

SEQ ID NO: 124685 - DNA, 433 bp, Glycine max
  unsure (1)..(433): unsure at all n locations
  Clone ID: PAT_MRT3847_835C.1
ttcgctttctttnataatttaccaccccaaacagaggaatatcaagcatgcttacctcaacattgcaccgcaaatcaaaggttaaattatacattaattgttttacttaatcaaagccaaaattttcatttgtttattttaactatacaaagcataacatgcacactacagctagatgttcaacttgtttcggtatcatcacttttgttgtcggtgtctagttcaatttcagtttctccaactgtgtcagcaggcttcacgtcttcgacctttgatacccggaacatagctaaatgggtgtctccaaatgtaatacaactcccaggtgatatggtggcaacaacgccaggtcttagccgcttgtcattgatgaatgtcccattagtgctatccaaatctgtgacaagaagattcccttgtttcttctgaatgc

SEQ ID NO: 124686 - DNA, 406 bp, Glycine max
  Clone ID: PAT_MRT3847_83600C.1
accaacatcaactccgccttcgcggcgtcgctcagggccaactgccccagggcaggcagcaccgcccttgctccgctggacaccacgacgcccaacgcgttcgacaacgcctactacaccaacctgctgtcccagaaggggctcctgcactcggaccaggagctcttcaacagcggcagcaccgacagcacggtcaggagcttctggtccagcacgtcggccttcaacagcgccttcgccacggccatggtcaagatgggcaacctcagccctcagaccggaacccaggggcaaatcaggcgcagctgctggaagctcaactcgtaaactactacgcccaatgcaatgcgttatggcaggcataacatagccaatcaataattaggcctcagctcgctctctagct

SEQ ID NO: 124687 - DNA, 267 bp, Glycine max
  Clone ID: PAT_MRT3847_83601C.1
gttttgatcgagatctttgcatccttatcaataaaatatcttgttacattttaagaagtttccaaaggttaaatttaagagctggaaaagggacattgggaccttactttcaccattagctcaatctcataacatttcaggacatcccaggcaagcaattaggtgtgttgtttaaggttgccacctgttttccttggcttcttttctttatcaacttttgctaactgcaaattttctggcttctgaaatttgtagtttgggatagct

SEQ ID NO: 124688 - DNA, 750 bp, Glycine max
  unsure (1)..(750): unsure at all n locations
  Clone ID: PAT_MRT3847_83602C.1
cggaataacccggtcgacccacgcgtccggtttgctcaggagcattgcactccatcccacaacgttttggccctccacaatcctaatgcaaacaataagacaaacaaataagcagaaagatttgtaaaactatgggacaataaattattaaatatattacattatttcaagatatttcatgaaataatttacttaatgcaaattgcagcaggacctttgaacagccttatttttcttacccaatgcctatccctgtagctatttatcattgatatgatctaccttttcatctcatccttttgaagtagcatcaattttatgttaacagtgaccactaggcactataggctagactgaatgattgttaattgttttaaactaaatatagtttccaattaacttcatcttttggaacatttatcatacattattagattgtgatgccaaatcatgtttgattgtaaggtaactaatctaacaacatattcttccttattaaaaaatgtacaacttcacagttatctgttgttgagtttctttgtttaagtatatatacatgtgagaggaagtatgcatgcattgaagcttcatatttaaggttctgtttatatacaggctcagatctttgaaatattttttactatacaattttgctaggaaagcttaanaagggtngcgtaataccaagggaaatgacttggtggaaaaaatcttgagctggaagaaaaaagggaatagcgtattgggggt

SEQ ID NO: 124689 - DNA, 164 bp, Glycine max
  Clone ID: PAT_MRT3847_83603C.1
ggaattcggatcgagtgaaattttgataaaccgcgatcaaagagtgccgcattttaaacccggcagctttagcaatagttacttgatttcaagaatttctcaatttcttcatacttctgtatgtacgatttgttaagggatcgcaaatcactctctgtgctggc

SEQ ID NO: 124690 - DNA, 393 bp, Glycine max
  Clone ID: PAT_MRT3847_83604C.1
attcggctcgaggtatacatagagcctattgcgggggacgggaagcaagctcgattgcaagatgctatcctgaagcatacggagcggcaccatctggaccctctttctcattgagaccctaccccacggacacgcaacaactacagcctgcaaacttctggctcacaccgtctctcttctcccttggcaaccgccctataacccctacagaaacaacttgcgtacacctccaagagcatggaccttcttggactcgccatgacacacgctcccttcttcgaagaaaacgacaaagctttcgccattctcggcgccagcgacatcgaaacctccgattctctccatctgcgctccagagacgttgatctttcttgcaagagctgaaccgtcgat

SEQ ID NO: 124691 - DNA, 232 bp, Glycine max
  Clone ID: PAT_MRT3847_83605C.1
gatttgagggtccagttgtctcattctcattgtttgtaatattattttcaaatggctcaagactacaaacctttcctgaggctttagaatgaacatctccaacaaagccttgttctttttgcctgtccttgcctcggtctacgcgcttgattactcctggccaagggccctcattaggtacttgttcatgatccccaatatgctctattgcatccttctgaggtggtttctc

SEQ ID NO: 124692 - DNA, 1026 bp, Glycine max
  unsure (1)..(1026): unsure at all n locations
  Clone ID: PAT_MRT3847_83606C.1
aattcggctcgaggttcaattcccttttgtctgaggtgtgtgcattcttgtttaactcctctttgttcctcagacatcccagaagggaaccaaaaataaaaaataaaaaaataaacacaatcaataaaggggagaaaacaaacatgtcattcacaggaactcttgataaatgcacagcatgtgacaagactgtctatgtggttgacttgttaactcttgaaggaattccttaccataaaaactgcttcaagtgcagtcactgcaagggatgtcttacgatgtgcacatactcctcaatggatggaattctttattgcaagacacattttgaacagcttttcaaggaatctggcaatttcagcaagaacttcgcaaagtcttctgagaagcaaaatgagttgaatagaacccccagcaagctatcttccatgttcagtggaacccaggacaaatgctcagtttgcacaaaaacagtatatcctctggaaaagatgacacttgaaggggaatgcttccacaagacttgctttaggtgtgctcatgcagggtgccctctcacacattcaaactatgctgcccttgatggtgttctctactgcagggtccactttgcacaacttttcatggagaaagggaactacaaccatgtgctccaagctgctgcacacaggaggactggttcctctacacctccactactagaggagccatcacaagagccagcaccaccagcatctcatgaggaccaaacagaagaagagacacctcttgaatgagactggaagttgacatgaattgtttcaattccctccatccccttctttcagaatattgagcaaggtctttggtttaagttcagtacagtgaaaatatttgtaacaatatctttttgagtttcattgtaaactaacaacttgagaggtttgtttattatgtattcaaaatttttaaacnnnnnnnnnnnnnnnnnnnnnnnnnnnnnnnnnnnnnnnnnnnnnnnnnnnnnnnnnnnnnnnnnnnnnnnnn

SEQ ID NO: 124693 - DNA, 453 bp, Glycine max
  Clone ID: PAT_MRT3847_83607C.1
gcataatcaaaaaagtagttgagggatgaagttggaactgcgagactttgtcttcaagtgaagaaaagaaaaattgtatgttttactaccatttgtttttttttttcaaggtactaccatgcttgtaaattacagtatcagttacatttgctatttaaataatcagaaaaaaatagtgaacaataatgcaggtaacgtacgtagctgcaattgtgactgccacagattctgaacacatgcaatcaagtttggagtcacttctttctacctagttttttctactccttttgattaacagtttttcttttagttatatcaatatgcagctaaattattttgaacataagttacccttcatatttttttaacatataatgccaggatataatattactattaagcatgtttggatctaccttatatttcaaaattgcaccattttcacatttagca

SEQ ID NO: 124694 - DNA, 317 bp, Glycine max
  Clone ID: PAT_MRT3847_83608C.1
gcacaaaccggcacgacacatacggcaactaacctgcacgcgccgttctttctcgctaggagcccggccccaaaatccctgctattaccctaccattgacccattcaacttcgatctcatcatcgtcagcaccgccctatctgaatccgtcatcgccgctggcgactcctgcgaatgcaaaaccatcctccacctcgaccccaactccttatacggcagccactgctcttctctctccctccacgaactcacttgctacctgtgtatcccgcactccctccccttcgccgccaacacaaccactgactgcgacgacg

SEQ ID NO: 124695 - DNA, 176 bp, Glycine max
  Clone ID: PAT_MRT3847_83609C.1
catatagcactgattgtcacgcacaactcagcttcagttcgtgcttcattaacatgggtgctggtgactactccaaaatactcaaggtgaagcatgacgccactgatgaagaagtgaacaaggcttataagaaattggcaatgaaatggcacccagataagaaccttgaagaccct

SEQ ID NO: 124696 - DNA, 280 bp, Glycine max
  Clone ID: PAT_MRT3847_8360C.1
gttgcatttgatgaggcattagaagctgtactagctgacaacaatgatgctagactggaagtttctatactggccaggagtcctgatcctgagctgactgaagcatttattaatacagaggtctatgcacgtgtatcagttgctgttctgttttacaatttggcagacttggctaggatagtgggatcaccaaatgacgatgcaaactgtattgcggcacaagaatctggcaaatcatttctactagagcttcttgactctgtggtgaatgctaaagatc

SEQ ID NO: 124697 - DNA, 636 bp, Glycine max
  unsure (1)..(636): unsure at all n locations
  Clone ID: PAT_MRT3847_83610C.1
aaacaaacatgggaacagcatgtggttatggaggaggcatagttgatgccctaaatgctaatttctatggaaatggcactcaaactttggttctagctcacggatatggcactgaccaaacggtgtggcgttatcttattcccttccttgcatgctacttcaaggtgctggttttcgatttgcctttcgccccaaatgtaaggccttcttctctttatgatccaaagaagtattcaacctttaatggatatgctcaggacttggtgtgccttcttgatgagctcaatttgaacaaaactatttacgtgggtcattccatgtccgccatgattggatgcttagctgcaacaaagaaacctcaactctttgaacatctagtcctactggctggttctccaatgtacttgaataaagaagggtacgaaggagggttcactagatcagaactggacaaaatctttgaatcaataaagcaaaacttttcagggtgggcacacagctttgctccatacgctattagcgcanacgatcctgctgcagttgcagaatttgaatgcagtctgctaagaatgaaaccagaagttgcactaagtgttgctaaaacagtgtttctaagtgacctcagatgtgttctgc

SEQ ID NO: 124698 - DNA, 750 bp, Glycine max
  Clone ID: PAT_MRT3847_83611C.1
ggtagcaggaaattaacaaattcccccatttacggattagtaataaccattgaaataaacagatgaggcaataagaaaacacaacctcataaggaatcattaggctagttttgtagcaatttgaaggtcactatcataataataataataattgtgaacaatgtatgatttcagttgtccaagaaaaatagcatcacacctatccaacaacaggaattgtttctgattgcttgtggtcatgatctgtctcctgttgtttttgaccaactagttgagaggaagataacgacaattgtgagagactacagcaattatcctcccgctcctgctgcttctgagattctttctcgtacaaggcatactcctcaggcttatcccatctgctttcacaagttatacagttgtagtagtacttatcgccatcggggcagtagtgttcactccagtcacactctggaaaatcttcatcttggggacttgtaggcatatccggcagggtaatgccagtaactgtactagggttgctttcggtctgagaaggcagctgtgaactaagctgctgctctatattttgaactgatgaatctgctgaatgtgattgtcttggaacgtcagtaataaatggctgagaagacaatttgggagcttgaattgaccccaaaggcattgaagccacatgtggatgcacttgttgaggaggaaatggatgttgttagacagtagcaccaggttcccagttttgcatatgag

SEQ ID NO: 124699 - DNA, 1813 bp, Glycine max
  Clone ID: PAT_MRT3847_83612C.1
tgagtgcaggtagagtgaaacaataggcgatccgcaacttacgttagctgctgaacggagcacgctccctctctgtgctaactcctaatctctctcgcacacacacagtagctattttggtgcatgcgagtgaggggctttgtaaattaatttgttctagtattggtacggtagctaatagtagtatttctgtgattggtgttgcagattgatcaagtgaatataatattggtaatgatggatctgaaggaatggtcatcatcttctgaggaattgaatgtgaacaggaaatgttgcgctgattgcaaaaccaccaagaccccactctggagaggaggaccagctggacccaagactctatgcaacgcttgtggaattaggtatcggaagagaagggcatgttggaggaagggagagttgaagaaacagaaacagaaacagaaacagaggtggaagatgctgggggaagaggaacaagcggcggtgtgtttgatggccctgtcctgtggttttgttttcgcttgagcattccttaatttagctcattcgaggttgtagctgctgactcattggatgaagaattcttgatcaaataactcgtcataattgaattcaaatgaagacaggctccatgattttttcattgttgcatgtacctagatttagaatacaaagcttagctaattgctggggtgaaaccttccacggtttcagtacaacttgtggaaacaattctaacgtcaggctgcttggttctagaatttatggtcttcagggaggacagagaaagaaatggacaagacctataactacaaatatagaaggcaaggggagcaccaaatccaaaagtatcaagcatgagattttgagtgaaaccattttagcaaatgctacagtaaatgtaaataaaacacagctagataaatcccaagaaattcagtattgtgacatacaacaagagattgctgagaataaagacttgtcgagctatactgttattgtttttgatatcgagaccacagggtttagcagagagaatgaaagaatcattgaaattgcacttcgagatcttcagggtggcgagaacagcacttttcagactcttgtaaaccctcaatgcaaagttcctaattcacatattcatggcattactactcatatggtcaaccaacctggtgttccaaggatggaggacctaattcccattttattgcaatacgttcgaagtcgtgagaagcctgggggagatgttatatttgtagctcataatgctcgctgttttgacgtgcccttcatcattaatgagttacgacgttattctgtagagattcctcctaattggttgtttttggacacccttcctttagcgcgggaactaatgaagtccggaggaacaacactttcttcaacatccctagctgcccttcgtgacctctacggaattaaagtggatggatcagctcacagggctatggtagatgtgaacacattgtcgttgattctttccaggttgacctctgatctgaaattgaccctatctgaccttgtcgacaaatcattcacagaatcagatattatcaactctaagaagaagaagaagaattagactagttttctgactgtattttgcattgatgttgtgacaaatgaattattttgtaaccaaaaatcgaactctaaatttggagttgaagtagaaaagaaacgttgtttgtaattgctgacttattctcaataaaatcttactattatgtagtaaaaaaacaaagggcttaaataaaaaaccccccttttaagtgaccctggggtgccc

SEQ ID NO: 124700 - DNA, 251 bp, Glycine max
  Clone ID: PAT_MRT3847_83613C.1
tacggctgcgagaagacaacagaaggggggagctgttatttttcaaagagaggacaactgtctacttcttcctcctatcaaatttagattggaggcccactaatttgtcagagtctgcattttgtaaaccagtctcatctaaatagtggtggttcagttactgtctctagcatgatcgtccttcactgctgttctctttaccactactcggtatacgcataaccgggtgctttttcatcaggtttaatgac

SEQ ID NO: 124701 - DNA, 353 bp, Glycine max
  Clone ID: PAT_MRT3847_83614C.1
ggcttgttgttgtgtcaaccatggcgtcgtttgggtctctgaaatccaccattttcgaaaaagaagagagaaaacagcagtatcagtcgcacattcgaggcctcaatgcatacgaccgtcacaaaaaattcatcgacgactacggtaatgtttctcttacaaaatccttaaatcatttattattcactacctcttttttaaaaaataaaatataaatataaatttcctgtttcatgataaatgtcgttttgtttagggttgatggacaataaggaattgatcaaacttgtagctgctggtttggttggttccttataataataataatgtcctatagcaaatggatgatgaac

SEQ ID NO: 124702 - DNA, 284 bp, Glycine max
  unsure (1)..(284): unsure at all n locations
  Clone ID: PAT_MRT3847_83615C.1
aaatncccccccaacaccaactggaaacgcaaaggcaccactgaagagggaaagaagaacacaactactatgaataaaactaaactccctgcagaatatatcgtataattcattaccacccctccttatctgatcctaccagtacacaaaatttatcaatgccctaaaatccatgttttatcacaaaactcccaaatacgcaaaagtattacttataccacagaggttaatacttaaatgctggtaaatcagagaaatccttggcttattattactcactctca

SEQ ID NO: 124703 - DNA, 413 bp, Glycine max
  Clone ID: PAT_MRT3847_83616C.1
gacaatgtggaaaatccaaagtcagatcaactactcaagttcgacgaatcgtgtttaaatgaacgtgaagaagaaactctttagaaactacaaaaaatggtgctagtatttgggttgcaaaagtagcctttggtgagatttgcatatcctaatcttgtagtaacttcaaatgcttgtttatttgactgtcaaattgaactttaaggtcttatatgtacctagtgagttgtctgtagaggtcaatctgcttttgagcttaacttagctaaggtcaattgttgacataggcaagctgaatgccctaaatgaaactaaacaagcttaattctgtatcttttaagcaggttatatacataaacgtatatacaaaaggtgcatttaatcctggatacatgacattattgtaaatttgt

SEQ ID NO: 124704 - DNA, 426 bp, Glycine max
  Clone ID: PAT_MRT3847_83617C.1
gcacgaggaaagaacagctactatttgttttggtcgtcttcatttatatgatttgaatagtactcagactctctcagagagtattgcgcacctgcaccttgagtttttttgttcctttgcataatcgtctctatctgctttttccatgcatgtatctgaaatgcaagcaatcttgggtagtttaagttatctaaatttgaccccagaaagctagaggagagccagatttgatgatgccacttaacgggatttgataagaatcagtcaaaatcttctacatcctttgaagattagcataaggttgtgtagtcgtccaaaattgttacattaggcatttcagcaatgtataattcattctataagcaatcttttttttttgggtctcaaagaaatgaaatgattacacttgtagagtgaaaaaaaaaa

SEQ ID NO: 124705 - DNA, 473 bp, Glycine max
  Clone ID: PAT_MRT3847_83618C.1
gaaaattgaatcaattcgaaatggtaaatcttgggatgaaattgactcgaattcaaatcaggattatgacctagtgaaatcttatgtgtcaaagatccaagatctggaaggtgaattgcggggtttgaaaaatttgaatgcgaaatctagacatgttgactgggttgattcagatgatagtggattccggtcaaagaatgtgttatttgcatgtgctaatgaatactcttctgattgtgacgccaaatcagtggacataacagatgacatggaagatcatgcaaaggagatagaacactcttctcttcaagaaaagttggacagggagctcaaagaattggataagaaacttgaacaaaaggaggctgaaatgaagatgttcaacaattctgatacttcagttcttaagcatcattatgaaaagaaagttcttgagttagaacaagagaagaaatttttgcagaaagaaattg

SEQ ID NO: 124706 - DNA, 484 bp, Glycine max
  Clone ID: PAT_MRT3847_83619C.1
caggaagaaaagaaggtgggtagggtagaaacaattgcatcataatttgttgttttagatacaagtcataaaacccaaccaatcaaactttgtttgaccacaaagagtgaccaagacattgaagcattcttaaaaattcatggagctgtagcacaaaagagatacaacaaattttcagaaatcaagaaaataaccaattccttcaaagttaaattgggtcaagggggttttggtgcagtatacaaaggacagctacccaatggttgccctgaggccgtaaaactattgaattcatccaaaataaatggtgaagaatttatcaatgaggttgctagaatcaatagagcctctgatagaagaattgtgtgagctggttttcgaggaaccagaggcctccagggaagaaaataaagaatatcaggaattcgttaggcttgtctcccccctacactaccagcatcatccttacagatttggtgcctca

SEQ ID NO: 124707 - DNA, 723 bp, Glycine max
  unsure (1)..(723): unsure at all n locations
  Clone ID: PAT_MRT3847_8361C.1
ccacgcgtccgcagcaagacagcctgctgcactacacattgatgctctttacaagctaaaagcagagtttgtggatcttcaagttcaactcccggagatagacatgcttcagaatctattaagtcaagtggaatcttgtagtgctcaatgtcatgatatgctagaaggtcatatgaatctcaagaatgttggtttgctgcttaaggaatggggcagtttcgcagttgatgtaccagagctcaagcttctaaggcaataccattcagatgctgtttcatgggtttctcactttaatgatattttagggagagttcagatgcaggaaaatcaacataatgcagttgatggattgaagagcatttttgaagaaggtttatctttgaaaattcaagttgatgagttgccattagttgaggttgagctgaagaaggctaattgccgggaaaaagctgtgaaggcacatgatttgaagatgcctttggaattcattcagcaactgttgaaggagtccactgtgcttcacattgagggagagaaacaatttgtcaacttaactggtgtgcttgctgttgccattccttgngaagaaagggctagagagatgctttcacatgaggctcctatttcggactntgaggacatgatcagagcttcagaaaacatatttgttattcttccttcacttaatgacatcaaggatgctttatcagaagctaattcctg

SEQ ID NO: 124708 - DNA, 1668 bp, Glycine max
  unsure (1)..(1668): unsure at all n locations
  Clone ID: PAT_MRT3847_83620C.1
ttattttttttttttttgtgngngtttttaataagaaccaaaatgaatgtcttaaactatagggactaaaacaaattatcacaactataaggactaaaaggataattaaatcaaaataaaataaactagagcaaaataatggtggtgtggttaggcacttttaatcctaaatgtctccttgtagacatatatacctctacatatgtgtgcattttgcaaccaccaccattagtggaataaaattttaaatgcaaacccttctatggtatatatcctatataggcattgttagtagtaaataccaaccgtgaaccagaaaattgtggattcaacctttttcgtcttccttcttcttcatggcagtgctatttgcaactcatgttcttctcttgatattgtccactgcaacaactctccacttcagtgcaagcaaggcagcaaggctcaatatgacttgcagcgagaaggaaaggaatgcactcctcagcttcaagcatggactagcagacccttcaaacaggctttcatcgtggtctgacaaatcggattgctgtacatggccaggggttcactgcaacaacacaggtaaagtcatggaaatcaatcttgacacacctgcgggctctccctatagggagttgagtggagagattagtccttctttgcttggactaaaatatttgaatcgtttggacttgagttcaaattattttgttcttactccaacaccaagcttcctaggctcattggagagtctgagatacttggaccttagcttaagtgggttcatgggattaatccctcatcaactaggaaacctctcaaacctgcagcaccttaatcttggatacaattatgctcttcagatagataaccttaattggatatcaaggctatcttccttggagtaccttgatttgagtggttcagaccttcataaacaaggtaactggcttcaagtactgagtgcacttccatctctttcagaactacacttggagagctgtcaaattgataacttaggaccaccaaaaggaaaaatcaacttcacacatctccaagtccttgatctttcaattaacaatctcaatcagcaaatcccttcatggctatttaatctcagcacagctcttgtccaacttgatttacacagtaaccttttacagggagaaattccacaaataatatcaagccttcagaacataaaaaatctagacctgcagaacaaccagctcagtgggccacttccagattcattaggccagcttaagcatcttgaagttctaaatctcagtaataatacctttacttgtccaattccctcaccatttgcaaacttgtcatccttgagaactttaaacctggctcacaaccgactgaatggaaccattcctaagagttttgagttcctcagaaacctgcaggtattaaatcttggaactaattctttgactggtgatatgcctgtaactcttggaactctctcaaatttagtaatgttagacctttcatctaatttgttagaaggatctataaaagagtcaaattttgtaaaacttttgaaattaaaggaactacgtttgtcttggacaaacttgttcctcagtgtcaactcaggatgggttcctccttttcagcttgaatatgttttactgagctcctttggaa

SEQ ID NO: 124709 - DNA, 538 bp, Glycine max
  Clone ID: PAT_MRT3847_83621C.1
cgattcttaactcgtatagataatatagaatagataccatgtctgccgttgaagcaaagaagggaaaggtcatcctcgcctactcgggcggtcttgacacgtcatgcattctcttgtggctcattgaacaaggctacgaggttgtcgcttacatggccgatgtcggtcaggaagaggactttgaagctgcccgtaccaaggccatgaagtgcggcgcctccggctttttcctcgccgacctcaagcgcgaatttgttgaagagcttatcttccccgccgtccagtgcaatgccatctacgagaacgtctacttgctcggcacctcgctcgctcgtcccgtcattgcccgcggcatgatggaagttgccctgcaagaaggctgtgactttgtctcgcacggctgcaccggcaagggcaacgaccaggtccgcttcgagctcgcctactacggtctcttccccagcatcaaggtcattgccccctggcgtctgcccgagttctacgagcgcttcgccgggcgcaccgctctgctcgagta

SEQ ID NO: 124710 - DNA, 328 bp, Glycine max
  Clone ID: PAT_MRT3847_83622C.1
aaggaaagctctaagaggatatcaaaattcgttattagcttaagatgcgacgctagtgtacatggggaacagcatgcaaacagctatagggggaacatctgaagtgttctacagtctaaaccagcaagcaaacactacattgccaagactagtttaggtctatcgtctaacataattgactaatgagcatcgtggcaacttctatgctgaaccaacgatcaagcttttgtattcccaaccaatgggaagtgctcccatttcctccttaatattggaccctgtcgcaatacaccaccttaacgagttggcggatttaatgagtcacatt

SEQ ID NO: 124711 - DNA, 1162 bp, Glycine max
  Clone ID: PAT_MRT3847_83623C.1
gcgccattctttcccattcctgagtttccattgccgcgacatctgaattcctccttgtcactcataatcaccaaatagaagccataaacaaatgaatgccatagcagcagaacaagtgctggagccatggcacaagctagacgacaaagtcgttttggtgacgggtgcttcctcggggctcgggcgagatttctgcatcgacctcgccaaagctggctgctgtgtcgtcgcggcagctcgtcgcctcgatcgcctcacttccctctgccacgaaatcaaccaccgatggccctcgaacgtcggaatccaccgcgcggtggcggtggagcttgatgtcgccgccgatggccccgccatcgacagggctgtgcagaaggcctgggacgcctttggccgcgttgattccttgattaacaacgctggtgtcagaggaagtgttaaatcacccttgaaattgtctgaagaggaatgggatcatgtcttcaagactaacctaactggttgttggttggtgtcaaaatatgtatgcaaacgcatgtgtgatatccagcttaagggatcaattattaatatttcttcagtttctggtttaaatcgggggcaattgcctggagctgctgcatatgcatcttcgaaggcaggggtaaacatgctgactaaggtcatggctatggaattggggatgcacaaaattagagtaaattccatatcccctggaattttcaaatctgaaataactgaaaatttattacaaaaagattggctgaatgatgtggtcaggaaaataatgcctttgagaagattaggtacttcagatccagcattaacatctctagctcgttatcttattcatgattcttctgagtacgtcacgggcaacaattttattgtcgattatggaggcaccttaccaggtgtaccaatttattcttctctgtaaattttggtacattatgcactaacgaaaagtaatactatgaattattccattacatatcttcaaattagacaatatggagttctgaagtctatgtatatggagaattattgtgaagtggctaccaccttgatcttaccatataatgctccagatgtccatgtataaatcatgtggtcgcgattggagttctgatatgttcataaactagtgttcttacccctc

SEQ ID NO: 124712 - DNA, 326 bp, Glycine max
  Clone ID: PAT_MRT3847_83624C.1
ggattcacacaactaattaacaacttcttccatacccccccaaaaatcaacagcaccatcttctttgctctctttctcttttgtgccttcacgacctcatacctaccttcatccatcgctgatttcctgctctataattaacgtaaccctcttcaaaatcgtggcacatattatatcttgtcagacataacagcatttggtcgaataataccatctccacacgcaaattaaaccatctcctcccactgtgtcgcaatctcacaatgcgctccacaaacggattccaacaatcctctcgtccccactatctagtctgtctttattcc

SEQ ID NO: 124713 - DNA, 330 bp, Glycine max
  Clone ID: PAT_MRT3847_83625C.1
aattcggctcgagcttcctccgtttgatattccgacggaagaaattgctgtgtcagatcttactggactataatcatatgggtaagtttaccaaggtgaatggcatggaacttaatttcctctaaaaaagcttctatatcaaaatatctattttgaattacttgaaaaattcaaaagtgagatccatataataaaaaaactgaggcatccaaatgttgacctcttaatgacaacaatcactctacctccaaatctttcatctgcttatgaatttattcctaaaaatagatcacatagattaatctacccaccaaacaatcttttacataa

SEQ ID NO: 124714 - DNA, 429 bp, Glycine max
  Clone ID: PAT_MRT3847_83626C.1
agcttgggtctaagcgatttactggctctaagctaaagcatatacacaatgagggagcggcagctcatgacattggaagtgctgtctgtgaagaagagctaccaatattagtaattgtagaggtagaggaggaacagaatggggatacttactcatgtccactaaacctgactgcggaatcactagtttctactagatgaaagtgccctgagtttccaattcaggttcttacatgcttgtagccctgactattgcccttggtgaggttttttatggtcgcgttccagcatacatacttttgttctcaatggtgctgcctgatgaagatacttgggatgctattgagaacacattgcgtgcctctgaatattatcaagtagcatctttcacactctcggagatatcacgtcctggtggccattccctttt

SEQ ID NO: 124715 - DNA, 395 bp, Glycine max
  Clone ID: PAT_MRT3847_83627C.1
aactcaggagtcggccgttgctctttttttttttttaccacatgtcacaagatactttatacaatcaaaataaatgtaggtacactcaaccaaagtacacacagctaattgcactctttatgtcccgacagatatcaaataaaaaagagaatgctagttgcactattttttttatgtatttatgactggtgaatatatgagacatttaaaaataaaataggaagatcatggtctcgaattcttcacggaccattttagttaatagaaaaatttcttaaccaaatcaagtcagtcagcctcgatagatgctagaggtgctgactttacttgcatctgcttctccttgaccttcttaatctacaagtaattgcagttggatcaagacaaatccgata

SEQ ID NO: 124716 - DNA, 207 bp, Glycine max
  Clone ID: PAT_MRT3847_83628C.1
gaacgatgtaaaattccaatacattcacgtgtgaaaataatatataatatatttagtaaaaaaatttgtatttaattattattgtgtaatatttcttttgatcaacaataattacatcccacaaacaagattaatctttcacataatcaatttgaaaaaaattaatttttgacataagaaattaaagaactttcataatatttcagc

SEQ ID NO: 124717 - DNA, 254 bp, Glycine max
  Clone ID: PAT_MRT3847_83629C.1
catgaatcaagagaatgaacataaagcttaatgagaaaagtatattcacgaatgaaaatttctcattaagattctcctactcagaacctcaaacgccaaaaccaagcattacaattcccaatttcacaggggcgccggcatttattgagctcataaccccggaaaataataacaaaccggagctcagtggagaacgagggtggctctagcgaggaaacttactgtgtggagctatctggtccacctggtgtgga

SEQ ID NO: 124718 - DNA, 416 bp, Glycine max
  Clone ID: PAT_MRT3847_8362C.1
cccatgtgtccgcccacgcgtgcgcccactcgtggggggactcatgaatagaaatgtgttttgttaatataagaaatattattttaatttctgtttctctaataaatgctttcaagaatatacgtattaatttctttaattagaaaatcaaaccaatgccagcatgtgtttgtgacagcgagggatgatatttataataacaaaataacttcagggggggacaaattagtaaaatcagctgcaatggctttgcttataagtcccaaaaccataattcattgctccagccactgtgtgggatagtgtcaaagagaagctgagactagagggggaaagagaaaatagggtctctagtgtcacattcctcagggaaaagaaaccgctctcaaggagtgggattgcgtctgacccttata

SEQ ID NO: 124719 - DNA, 361 bp, Glycine max
  Clone ID: PAT_MRT3847_83630C.1
gtgcactaactgttggatgtcggcgatcttaccgataaggctcctttgtaacctgcacactatgcaatggctaatgctgggtcatctgaggcgcatactgcaccagcactaggggctgatgcaggttttttgctgtctgctctgaagcgggatgagaaagagttgtccatagaaactgattctgtcatcgcgcagcagctagacactagagactctgtgtgtacgtatgagcttaacactacgttgtttggagctatgtgttgagcgcaccaataatgacgagatttttcgaggggccgcatgatcacgataaggaatcagttaactcaccgattagcatttgattctgacgaccatgcct

SEQ ID NO: 124720 - DNA, 123 bp, Glycine max
  unsure (1)..(123): unsure at all n locations
  Clone ID: PAT_MRT3847_83631C.1
ggggcccgactgaacgtattcacttaaagctcctctccggggcccgcggtanctngcngttcttctcccggttcagctaaactcccggcttccctggtctntgtcgggctanccctttctctc

SEQ ID NO: 124721 - DNA, 177 bp, Glycine max
  Clone ID: PAT_MRT3847_83632C.1
cccattcataaaaatgtggggagcttatgtaacgagtgatggccaccgcaaacgccaggcctgcctggcttgaatgctcttttccctgatggtcatggtctcattccatgccaatgcgaaaatgcgtctataaaatgctccccccttctgccgaaagccatgtttcgtatctaatgc

SEQ ID NO: 124722 - DNA, 224 bp, Glycine max
  Clone ID: PAT_MRT3847_83633C.1
tgatacgagcaagatggcagaaatgataaacagggtttgttttggtgatgaaaaggtgttattaaaaacgacacacctactgttggcttgatgttcaaggatggcaacttgtgaaaaagatgtttggagagttgaatgtggaatccctactggatttccgctcacagccttctgcaatagcaccttcattgagatgctcatcagatttcgctctcctacattac

SEQ ID NO: 124723 - DNA, 366 bp, Glycine max
  Clone ID: PAT_MRT3847_83634C.1
gctagatgagagcaactcattgggtgtggctggaaggtctggaagaaggcttactggacactggggaatttcagtttagaaaatagggcttattgcttcttctataggacatgcatttggcacagaaagagggttctgtgcccggagtgcccgagttatatatcacccaagatttggccctctgggatgggtttcttgggttttttgccccaatatgttggaggcgctgttattacagttattgatgtcctggaggaaaatcccattctgataaaaatgctgaagaaaattattgtttttctaagaaaaggattgtcaaaaataccgggcatcacagttgcaagtactccagagtcacctattgtt

SEQ ID NO: 124724 - DNA, 399 bp, Glycine max
  Clone ID: PAT_MRT3847_83635C.1
cgaccccaggttagccgaaataaaaacgaaatgaagccacttgatgattccggaacagattgagtactttttctacagggcaagtgaaagcgcccattcaggactctaattttttttccattcgacacttaaaattgttttaagcgagaaacttaccaaaattgacccttgcatatggaaaggtaaatcacttttactttgtaccggccattcctgtaacctcgttgtttaaaccaagttgaggaggttgcttggtagcctgaaaagaatccaatatgggcctcaaaaaagctggaagaaaaagaccgaacccatccagaaaacaggaaggggtaacaattggttattgaacgacaaacctggggccgttcgagccgttcgagccgattcggctcgagg

SEQ ID NO: 124725 - DNA, 660 bp, Glycine max
  unsure (1)..(660): unsure at all n locations
  Clone ID: PAT_MRT3847_83636C.1
ataattggagtttggttggatttatttatggatgaactagaaagttatgggataaacagatccaaattgccgcccctacggaataatgagagttaaatgctaaacttacctcttcatgtaacttagtcatttcccgagcaataacacattgcctgcaatatcatcgaattgacgagtcaactgatctgagtcaatattcccaaaagccacacttctaaaatccttaaatatttcccaaaggaaccccccagcataaaaaaaatgcaaagctcacagaaggtattgttagtgcaagttgtttgtagaacattaatacacaagacatcaaaattcatgctaagtttgaatgataaaataaacaaacagatcatggttcagaacctcaatgattatatattgcaaaaaaaaaggattctccaactggaaattttgagaggggagacaaaagctatagtgataagtgattagaagaaaaggccgacaactgtatagtacttttatcgtggaagtaagcattattatatagcatcggggtttaggttaactcttagcaccttgcatcaccaaaattgaagaactctatcaaggactgagaagcttggagagcacatnaatattgagtgagttgatagtgaacatacctttttctatcgatgtaga

SEQ ID NO: 124726 - DNA, 578 bp, Glycine max
  Clone ID: PAT_MRT3847_83637C.1
aattaatgccattgtctctgttttttgtaaaaaaaaaaaaaaaaaaaaaaaaaaaaaaaaaaaaaaaaaaaaaaaaaaaaaaaaaaaaaaaaaaaaaaaaaaaaaaaaaaaaaaaaaaaaaaaaaaaaaaaaaaaaaaaaaaaaaaaaaaaaaaaaaaaaaaaggggggggcctttttaaggaaccaagtttatcttccgggggatgggaaggaaaaaatttttttaaggggcaaccaaaatcaaattactgggggggggtttaaaaaagtgggaaggggaaaaacctggggtttaccaaattaaatgccttggaagaaaatccccttttaacagggggggaaaaaaaaaaaagggcccaaacgaatggcctttcaaaaaatttgccaaccttaaagggaaaagggaaccccccttttagggggaaataaagcggggggggggggggggtaacccaaagaggaacctttaatttggcaagccccaaaaacccggtttttttgattttttcccttttttttctgccaactttcgcgggttttcccgggaaatttataaagggggggcccctttaagggt

SEQ ID NO: 124727 - DNA, 517 bp, Glycine max
  Clone ID: PAT_MRT3847_83638C.1
gcacgagaataaccaaaggattgaaccttcgaagagcaccatggaccctgacgtcatcgagattcctcccccaattcaccaccctccaagattccgcgagcagaacaagaaaacggctgattatacttactctctgcctggtgtggaaaattttggatcagttagtgggattgcatcttctaacaattttccttcagtgtcaaataatatgatcaacattgatggtcatgggtctgatctatcatatgacgatgatgactacattgatattttgtcggaagattatatggatgtagatgagtatgctttattacagaaacactttgataatgtggatatacctcctggaattgaagcaccttttacttggttgccaccagactatgttgtaggttcaaagaagactgaaaatagtacattgtatccttggcatcatatgcaatctaatgctaataaaagtcccatgacaccctcttctcagccctctttgtcattagagccaactaactctaaaatt

SEQ ID NO: 124728 - DNA, 2546 bp, Glycine max
  Clone ID: PAT_MRT3847_83639C.1
aagccgcgcccccactcagcaacactaaggtctctctctcctcaatttttaacttaactttcacacactttctctctctctttctttctcatgttctgcataaccatataacacccgcgtgaacgttcactctttttatttttttctttcttcgttcttgttgtggaacaaataaccaaaggattgaaccttcggggagcaccatggaccctgacgtcatcgagattcctcccccaattcaccaccctccgagattccgcgagcagaacaaggtcattttgcatgatgtgattgacattgatgatgactctgaggatgtagtgattattggcgaaaaagttaacaatagtaacaaagggaagactattgacgccattcatgatgatcatcaagttgtgaaaacggctgattatacttactctctgcctgctgtggaaaattttggatcagttagtgggattgcatcttctaacaatttcccttctgtgtcaaataatttaatcaatattgatggtcatggttctgatctatcatatgacgatgatgactactttgatattttgtcggaagattatatggatgtagatgagtatgctttattacagaaacactttgataatgtggatatacctactggaattgaagcaccttttacttggttgccaccagactatgtcgtaggttcgaagaagactggaaataatacattgtatccttggcatcatatgcaatctaatgctaataaaagtcccatgacaccctcttctcagccctctttatcattagagccaactaactctaaaattcaagcatctttagggagtgctattaacattccaatcaaaatgggtaatgttgatcactcttccggagcagagttgtcttctcaatttttttctgaacctgccccttctaagatgaaatcagctacttcaaaactcagagggtgtacttcaaatgcttcattaggagtggagtcatctaagtctcagtggttttcgaggcctttccatagtaaaaagaagcctgcttcaacataccatggttttaactaccatccagaggccacgaagctgccacatgcaggtgagctgccatattgggggcaatttaaaactgctaagaaggaagctggcagtagcatttcatcccattcaactttcattggacatcatggatcattggatcctccaggaatagaatcaggaaaaacttggtggaagatttctcataatactaaaccattttctactcatcttaataatattcctaatcatatttattatccatttgatcctcttgttgcccatccggagcatgtgtttgataacaactgggttaacgattctgccagagatggatttgatggaaaaactgtggatggccctattgtgacaatatcggatgaagccaaagaggaaattctgaggaaactccaaagttttaaacaatttgacactgttgaagacacttcagaccatcacttttttcgcagtaattcttcaatgcatcagcctcccaagaattgggctaaaaaaatccaggaagagtggaggattttggagaaggatttgccagcttcaatatttgtcagagtttatgaatcaaggatggatcttttaagggctgtgattattggagcagaagggactccttatcatgatggccttttcttttttgatgttttctttcccagtgcctatcccaatgtaccgccgaaagtccactaccactctggaggtcttcggctcaacccaaatttgtatgcttgtggcaaagtatgccttagtctacttaacacctggtccggcagcaaaaatgagaagtgggttccaggcatgtcaacaattctccaggttctggtatctatacaaggtctaatcctgaatactaagccttactttaatgaacctggatatgcacacatgagtggttcagcaaatggtgaaaagatgtcttttcagtataatgaggacacattcattctatcattgaggacaatgatgtatatgatacgaaagcctccaaagaatttcgaggaccttgttaaggggcatttctgcaaccgagctagcgatattctggtggcatgtaaggcatacatggaaggtgctcaagttgggtgtttggtcaaaggaggggttcaggacgttgatgagggagacagaagctgctcacagcagttcaaggattctttatccggatatatgaacatgcttgtcaaagaatttgctaaagttggagcaaaggacattgataaattgctgcctccagcaacaactccagtagcgatcaaaccatcaggtgtaagtattgcctgaggctacaaacccgaacctaacatttctcttggataaaccaaattttgaggcttgatacaccaaatgacacatttatgtttttcttactgccatatttatgttttgtttttcaatagttgactcttgatatctgctctcttattttcatgaacatatagaacaattgcctgcccataattgtatatagttgcaaataaaaatataacaccttgttagtttgacata

SEQ ID NO: 124729 - DNA, 351 bp, Glycine max
  unsure (1)..(351): unsure at all n locations
  Clone ID: PAT_MRT3847_8363C.1
cccacgcgnccgaaagcannggacaaaaaaggtagcgcnacacaaggccaaacaggagngacagccaccgcncagcagaggaagaagccaccanagaggcaaagaccagagagnaccnagangggggcgcaccacaacgccacacaaagccgcaacgaagggacgagncagcgcaanacgncgangccgncaccaaggcccagcacgcnacaggaacgagaccagaaggaacacaaggccaacnccgccagaacgaaccccaagagaagaacagggcgaacaagggaagncaagnaccggaagaacggaggaaacagagnaagaccagcagcgcaacagcgnggacaaaca

SEQ ID NO: 124730 - DNA, 324 bp, Glycine max
  Clone ID: PAT_MRT3847_83640C.1
aaaaatgggaaggccgagtaaattggctttaattaaaaaacagaatttgaaacttttgatttatttgcatataaaaagctttatttgtcaaaaacaaatggttgaaaaagcaattaatttaaaaatcccgctgaaattttatttgacaagctaaatttttttgaaaggctaaaatctccttcacttttttttttaaaaaattatttttaatttttattattcacttttttttacttataaatcggggggggctttatacagaaacttgggtgcaagaaacacacattcagcaaaaattttggcccgcgggactttttttttttc

SEQ ID NO: 124731 - DNA, 319 bp, Glycine max
  Clone ID: PAT_MRT3847_83641C.1
ctatccaattaaacaacaacgccctgtccccttctgatttgtgtgtgggcacaaacaaaaaaaaacctccctattttaacctcccccttttcaccaatgtattaggaccggttttaaaaccccaaagattgtttgaacaattttttgcgccacttcctaccccccctttgtaaaaacaggggcaattagggttttaatccctaaactggggtgatgagcaaccctaaaaaatgctttccaaagggatcttgggtttaaaaaattcggggggtgagtgttcccattttgtgttttttgggccccctttcttttttgggaa

SEQ ID NO: 124732 - DNA, 460 bp, Glycine max
  Clone ID: PAT_MRT3847_83642C.1
gaaactgctattctgcccttcgtggaaaactggttcccaaacgggatgtgaagaacatagttcaaccacatgacacatttggctaacaaagactgatacataggtgcaggtggctgtaaaaactaataaatactatgactcacacggtgacaaaaccgatgcaatagacgagctaataacattaggtgccaacaccagtgacaaagattgctaactccaaaacccgttagatatgttcttagatatgcagccacataaaaggtggctatggttgccaaaaagaacagatcttctgttgaaggaacctgcaaaaatgagagttaaatgactgcacacttcggttaaaaggaaccaagccagtggatgataaagacctgttaatggcctaaaataaaactctgtgcaacactttaaaatagcatgttttcggcttgattgtgaacctgggctaaattgcaag

SEQ ID NO: 124733 - DNA, 126 bp, Glycine max
  Clone ID: PAT_MRT3847_83643C.1
caaagaaaacacctttgtactctaatctaaaatcatcacaagacgacgctattattcctgattacatgcgaaattggcttcaagcacccccctcagtcgtgatgcgttatatatcactggatgact

SEQ ID NO: 124734 - DNA, 376 bp, Glycine max
  Clone ID: PAT_MRT3847_83644C.1
aaatttatttttttttttgctcagctaatgaaaagaattataagggggaggataatatgctttacaattacaggacaatggtccataaatgaaaggaaaagattaatagcggggtggggagaatctgttgttcctagacatatattacaacggaggaaacatctagctttacccatgtcattaaacaaaataaacttttaaggaaaaataaattatgcaaggtaattgtatatttgggggttgttcttgactctttccagatactccctatgattcaggctttggatcctttacttcaagtcacctggtttatattggaaatttaagctgttggaaaacttcagtaataaaaagcgtgagaataaacactttccta

SEQ ID NO: 124735 - DNA, 287 bp, Glycine max
  Clone ID: PAT_MRT3847_83645C.1
ctttaggcgcacggagaggcccatagcgggatacagtgacgaagatgacgtaccgtatgaggtaccgctagaggaacaaatataacaaacacagcaaccaacacacggttgggaaaacgcttgttggtaagatcgcctataagagcaccaacaagaggaacagcgggcccactggcacgaggactgacgggaggacacactggatgccacactagtggactgcatcgagcatgccaacaaggctaccgactgaccgccggacttatagccgagcatatggtggaagt

SEQ ID NO: 124736 - DNA, 316 bp, Glycine max
  unsure (1)..(316): unsure at all n locations
  Clone ID: PAT_MRT3847_83646C.1
taaacaccactttcatctccctcattcattcaaacacaacacaacacaaagtgtcacaaacacacactcnanaactcanatctcgnctnacctctcttgggctcgnncnccccacccacttcctcattctccttnctctaccnccttnnntctctacncacccctnacacacttnactnacccatagagagagagaaagttcggggcttttggatagaatcatnanccnattaccctggattcanattncatgcattgatnctanctgggatctctctnaaaagaaaaaaaagaaaacccnctctttgataatgga

SEQ ID NO: 124737 - DNA, 145 bp, Glycine max
  Clone ID: PAT_MRT3847_83647C.1
ctccagtatcgatcccgagggaaactttctcattaatacatgcttcctggaggcgggcgatcttttcaaccgaaccacacctgcgtgaacttttggaagatcatcgaaaccttacgaggacgaaaagacgcgggcatgaaaccct

SEQ ID NO: 124738 - DNA, 699 bp, Glycine max
  Clone ID: PAT_MRT3847_83648C.1
aattattcttttttcctttaaagtatactcccttgtttatacaggagctaaatccctcatataaaagtatcttcagtttaatacaatatatgctatctgtatagaggaaagttagctagttactgtctactaatatgcatacaaaaaaaaagattaagaaaataagtaatccaaattgcctctgccaaaattttgccttattgatagaggaaagaaaggctcataaatttgaggagtcccagctagcataaacagcatcaattaatttttcatgcaatgcgacaccagagcatgcaattatgcctctgtcaagaccttctaagtacattccctttgaaaagtccagtgggcgccccccggcatcagttaccacaccaccagcctcttcaacaataacaacaccagcagcatgatcccatatcttctccttgtagccgcactttgcaaatttcatgaatatctccgcgtctcctcgggctattgctgcgtattttaccatgctgtgcacgcgcaagggctgttttctaagtcccacactgtgagcaagtccagctgtgaatgaatggtttgagtttgccctttccactggttcacagagagttgccaatgccggatcatcaatcgaagaaacacgaataagcctagcacaatttggccactctagcatgttatctccatcaattaatgactgcagccatg

SEQ ID NO: 124739 - DNA, 208 bp, Glycine max
  Clone ID: PAT_MRT3847_83649C.1
tcagtactattcttacaacagtcacgagcatgtgatttttcttcgtcgtatgacgcataaccgtaaccgtgtagatgctcatagaaacaagctctattccacggtgaggatgctgcgctaagaatctctgcttttgcatgaaccatgctcatatgtgcgttaagttgtcaaagtcgtgggctataacattgtcctggtcatggtccac

SEQ ID NO: 124740 - DNA, 237 bp, Glycine max
  Clone ID: PAT_MRT3847_8364C.1
gggcataaaaaaaaaaaattattacagtgggccctgaaaacttaataataaaacactccgcaatttcatattactcttccccttcttagggaagtgatggagcatatgaccacaccctttatgacgcaccatgtctaaaattttcaacaaggagttttgggtgtagatatatttgcctaatcactacatgccaatgaaagccagattttttgagtcaaactttgacgccttcatttt

SEQ ID NO: 124741 - DNA, 533 bp, Glycine max
  Clone ID: PAT_MRT3847_83650C.1
ataggaaaaaaaaagataaaatataattcatcaaatgaatatatctacaataattgatggagaattccccgtttcatatctaaacatacatctgatcaagttgtaccaaaccaacatctaatgctaatgtttgatgaatttaacgaatcaattaaaaaaccccaaagaattgtgaccgacacaacacgaaaacaagaaaaaaaataataacaattccaaagtcacatactattagtaaagcctaattcttgcattaatggggctcctgcacatggggcatgactgaagatcttgtccacattcacaacatgtctgccagaaaaaagaaaacaaaatatgtcaaataaacttactttatttgatgtttattgaacaaatatgggaaggaaattactatttacctgatgcccacatccgaaggccatgtctttcgcattgcttagacaaatgggacaaagctgcgtaaggccaattttaatttgtcaactgttgtagattacaaatttatttataataacccttgaaaacataat

SEQ ID NO: 124742 - DNA, 164 bp, Glycine max
  Clone ID: PAT_MRT3847_83651C.1
aaaaccctcgttccttgtgtatctctcactttccattctcttcaaacctaacgcagcatcgtattctcttcattccatggtttgccaaccagcaaaccgtggataccctagttcaaactcgtatcgtcggcgatggtggcacaggaaagacaacctttgtgaaa

SEQ ID NO: 124743 - DNA, 433 bp, Glycine max
  unsure (1)..(433): unsure at all n locations
  Clone ID: PAT_MRT3847_83652C.1
acnnnttttnnnnattttttttttttnnatttttttttttttttttttttttttacaaaaatccccaaaaaaagggggaccgcagtttttgggcccttttcatttccccattaaaaatggtacaaaaaccctccaaatagagtttacaatttttttttttcaaaaaaacagggaaaactgcgggtagttttaatcaaaaggggcttaaacattctttttttggggagattggccaaaaacctttttgaacccttcccatgtcaagggggagttttttttgtgtccccctttttttaaaacttgggtgaaaacttcccttttttgttttttaaacataaaggggccccacaaaattttttccccttccccatttttttaaaaaaaccctttctttggggggggaattattttttttgaaaaaaagctttttttt

SEQ ID NO: 124744 - DNA, 287 bp, Glycine max
  unsure (1)..(287): unsure at all n locations
  Clone ID: PAT_MRT3847_83653C.1
cgcatgcacgcgtacgtaagctcggaattcggctcgagnnangnnacctgnttncganntcantanaanctcncnantnnctaatctcagctannaccnancatnagatgtctctggattccaggtttctncggtgcccgcaggnagcaaacgncttcgatgccanngcncactcgacattggggatcncttcaangatttncangttcccacnncnncngnttatgcngcncaattctgcanttcgngagcactcgngtngattggaaggnaaccccagaggcacn

SEQ ID NO: 124745 - DNA, 223 bp, Glycine max
  Clone ID: PAT_MRT3847_83654C.1
tgccaacttcacatctcaagtgcattatcatgaaccaccctggcgcagattggaaatggagacgcaccggtgcttggttgcgcacacttctcacattggtgtcaaggtttctgaaatcttgaccaagattgacaggcgatctggtaaggagcttgagaaggagcccaaatttttgaaggatggtgatgcatgtatgggtaagatgattccaaccaagcccatg

SEQ ID NO: 124746 - DNA, 252 bp, Glycine max
  Clone ID: PAT_MRT3847_83655C.1
tacaatgcacaattgggggcacaaagcacccttttgccccccccttttcccatccaggacactcttatctttgccatagccctgcaaagtgataacaaacgctcgaaatgaaaaacctaagagcaccccttgcaataatttgcaatctataactacattgtgggcaccccttatttaggatatactcaatccccctgttgacatgcctcaaaaaagggcgttatcaaccggagggctctttgggtatggggg

SEQ ID NO: 124747 - DNA, 144 bp, Glycine max
  Clone ID: PAT_MRT3847_83656C.1
gccacgcgtccgatttagggataattatcttgaggtgtatctcttgctgtcctggttctatggtgcttcaaaaggtaggctgacgtctctgtctcctgtaccatgcctccgcaagctgacaaagcttttcatcacgacctttat

SEQ ID NO: 124748 - DNA, 145 bp, Glycine max
  Clone ID: PAT_MRT3847_83657C.1
cggggaaaaaaattggccgaattttctttgcgggggttatccctttggttagccttaaagccatcaaactggtttgtttttcccccggttttgcaaaatttgggttttgtttcaaccccgaaaacctaaaattcattggttttcc

SEQ ID NO: 124749 - DNA, 529 bp, Glycine max
  Clone ID: PAT_MRT3847_83658C.1
cctcaatatctcatggcaaactctcttgaagtttctgctctcaatcgcataaaactgcatcttctaggagaactctctccccttccactcacaacctcctctcaatctagctccatctgttcccaatcttcatgttctgactcatccgccacacttgaccaaatcttctccgaattcctctatttcccaacttcttcctcagaaaaccacttttctgcattggagtttgaggcaaaacccgaaataatttacctcgaaacccccaacccacaattggaattcacgtctctaaccacacaggacagtaagaaacctcaatctagtcgaaagccgtcgctgcaaatctctctccccaagaaaacagagtggatccaattcggagatcccgaggttactgaaacggtttcgcagagtaatccaaacgcggaagagaagaagcactacagaggagtgcgacagagaccttgggggaagtttgcggcggagatccgggacccgaacaagcgcggctccagggtgtggctcggga

SEQ ID NO: 124750 - DNA, 221 bp, Glycine max
  Clone ID: PAT_MRT3847_83659C.1
cccacgcgttcgcggacgcattggcgaagcaatcgtaagtcagctgttctgtcccgcgggggcaggggacctgtcttggtggccaaacaacctcaaaaacattcatcaacgttcactattaatccattcatcattaagtcagaaaataagggtcgatttttttatccttggtttacttctgaaccatcatggacgtacccagttcctgggatgcccttctg

SEQ ID NO: 124751 - DNA, 417 bp, Glycine max
  Clone ID: PAT_MRT3847_8365C.1
gcttcttattggttgttgggacagttaaggtttattcatgttctatgattgtttagtatagtttttcttccactgcttttttttagtttgtttctatttctttgctaaccttgttgactttcttttgtctttcagttttcattttgtcaggtgtttcacttggttataaagagtaagaatttagtttcatttatgcatgcttgcttttgctctgttaatggttagtcacatatacaaggtttaatttttactgagtcatatgcatgtgtgcccctaactttgctgtttatttctcggttttcttacttttttgctaacgttgttgacttccttttgtcttttagtttgtgttttctcaggtgtttcacttggttataaagagtaagatcgtattttcatttattgtttaaatagaca

SEQ ID NO: 124752 - DNA, 321 bp, Glycine max
  unsure (1)..(321): unsure at all n locations
  Clone ID: PAT_MRT3847_83660C.1
gcgtccaaaaattgttangccttgggtgtttctttctgttggatctgcatcttctgatttattgcattatgtgatgcttttccttttttcttgtttctatacctgcttctgatggctacttgtgtggaagattttattagttttattggtaaaaactaacaagttgtctattgttttcttcattttgatgagtgaaggagtcatgatggagtttttcctttttaattctttttcaaagggaagtttgtattgcctttgaagtccttggaaggtgtttgatgttccatttctctcttgttttattgttgtaagtgatgggtt

SEQ ID NO: 124753 - DNA, 2330 bp, Glycine max
  Clone ID: PAT_MRT3847_83661C.1
aattcggctcgagctcgagccgaatcggctcgagcggctcgagctcgagccgaatcggctcgaggcagcaacaacaacaacaacaacaacaaatgcaattgaggcagcagcagcaacaacaacaacaacaagtgatgcagccctcttctgctgtcaagcggccatatgagagtagtgttagtggggtatgtgcccgtcgattgatgcagtatctctatcatcaaaggcaacgaccaaatgataatagtattgcctattggagaaaatttggctgaatattactctctccgtgcgtcaagaaacgatggtgcttgtcattatatagtaatgttgggcatcatgcacttggtgtttttccccaagcatctatggatgcatggcattgtgacatatgtggttctaaatctggaaggggatttgaggcaacttatgaagggttacctaggcttaatgaaatcaagattatggcagtggagtaattgatgaactatcgtttctggacatgccaccctgaaatgagattcgcttctggtgcgatgatgttagaatatggaaaagcagttcaagagagtgtatatgagcagcttcgtgttgttcgtgaaggtcaacttcgtatcatattcactcaagacttgaagatattatcttgggagttctgtgcaaggtgccatgaggaacttcttcctcgaaggttggttgcaccacaggtcaaccagttagttcaggtagctaaaaaatgtcaaagtacaattgctgaaagtggttctgatggggtttctcaacaagacatccaaacaaacagcaacatgttgttgacagctgggggtcagcttgcgaagattttggagatgcaatcgctaaatgagttgggcttttctaaaagatacgtgagatgtttgcaaatttccgaggttgtcaatagcatgaaagacctaatagatatctgtgcagatcacaaaattggtgccattgagagtttgaaaaattttcctcgtctagcaacagcctcaaaggtccagatgcagaagatgcaggaaatggaacagctagcaaatgttcaaggtctgccaactgatcgaaacacactcaataagctaatggcactgaatcctggattgaacaaccatataaacaaccctcataatatggttaatcgtggtgctttgagtgggtcagcccaagctgctttagcactgaacaactaccaaaatcttctcatgaggcaaaattcaatgaactctagccctggctcacttcagcgcgaagggtcctctttcaataattcaaaccagagtccatcttcagctttgcaaggagctggtcctgctttaattccaggcccaatgcagaattcatctgttagtggtttcccaagcccccgtctacccccacagcagcagcaacaccacctacaacagccctcattaagtgcaaatgctttactgcaacaaaatcattcacagggttcccaaggaaatcaagctctgcagcagcagatgatccatcaactactgcaggagatgtcaaataacaacgggggagtgcaaccacagtctcttggtggacccagtgcaaatatggcaaagaatgcactggggtttgggggccattatccatccttaagtggaggttctgccaatgttacaggaaacaatggacctatgtcaaggaataatagcttcaaaacaactgcaaatagtgattcttctgctgctggtggcaacaatggattaaaccagagaacatctgagatgccacaaaatctacatttgcaagatgtggttcaggatattggcaatgaattcacggataatcccttccttaacagtgatcttgatgataacatgggttttggctggaaggcatgactaacacaatcttggacatgaaatcggcatatcatgtgttgatgaagtgtttatcttattatctttgtacaggacactttaaatagatgctgtttttttccttgtttttccctgttattttcttgatggaatttgtttggactcggactcggactcgagtaggtttttagagattttatttgagggtttttgtcctgcaagtgtaatctattggacaatttaatgaacagttagtttattatacggcactcaaaaaaaaaaaaaaaaaaaaaaaaaaaccctgcggccgcatgctgttttttttacttgggtttccgtgttattttcttgatggaatttgtttggactcggactcgagtaggtctgtagagattttgtttgagggttttttgtcctgcaagtgtaatctattggacaatttaatgaacagttagtttactaaaaaaaaaaaaaaaaaaaaaa

SEQ ID NO: 124754 - DNA, 531 bp, Glycine max
  Clone ID: PAT_MRT3847_83662C.1
atatataaataaataaataaatttaaaaataaagcttcacaaaaaatgaagaaaacgataacatacaaaacatggaagcaagaaaccaagcttcacccatgctagtttgttaggaagaagttgcacccatgtaggtataagacaacaaggtccattattaaaaatatttttcaaacacaagttacatgaaataatagcagtttatgcacttagatattttcttcttcttcttcttcttcttctttttttttttttttattggccttacttagctatttcttatcattatcctcagctatggcaacaatttcagtgttggtttgccccaacaagctgcttatggatcgagctttcaccattccaagcttgatcctcctctttgtgacaatcacttgctttttctcatcattgttttcagcatcatttcccaaagggtactcttcatgagtgacacgacttgtagtactagactttgttgtttgtttttcgaataaattctcggattgaggcacaatattgatattgttcttt

SEQ ID NO: 124755 - DNA, 769 bp, Glycine max
  Clone ID: PAT_MRT3847_83663C.1
tgggggtcagcttgcgaagattttggagatgcaatcactaaatgagttgggcttttctaaaagatatgtgagatgtttgcaagtatgttattctagttcaaactttcaaagtttctgttgagtgtttagtagtatagagaaaactatacatttcttattctatttttatcaaggcttctaatagttgcctgctacaatggtttacagatttcggaagttgtcaatagcatgaaagacctaatagatatctgtgctgagcacaaaattggggcaattggtaatttgcttgtttttgtgactataatagttgattgggtgttttcttagtcatctttttctctcactggactcctaatgtttagttgtataattttaggtttttggaagtattttcatactctcaatggcctttctatatatattgatgcaatattttcctgcagagagcttaaaaaattatcctcgacttgcgacagcctcaaagcaccagatgcaaaagatgcaggaaatggaacagctaggaaatgttcaatgtctgccaactgatcaaaacacactcaataagctaatggctctgaatcctggattgaacaaccatataaacaactctcataatatggtaaatcgtggtgctttgagtgggtcagcccaagcagctttagcactgaacaactaccaaaatcttctcatgaggcaaaattcaacgaattctagccctggctcacttcagcgtgaagggtcctctttcaataattcaaaccagagtccc

SEQ ID NO: 124756 - DNA, 487 bp, Glycine max
  Clone ID: PAT_MRT3847_83664C.1
gtgacacccaaacattgatgaaaatatggaagttgatgaggaggtacaaggttgaaggaacacgtgtcacattcaacactcttgttgatggttttgctaaacatggtcactacaaggaagcaagagatgtaatatctaagtttgcaaatgttggattgcacccaacagtgatgacatacaatatgctgatgaatgcatatgcacgaggagggcaacactcaaagctgccagagttgttggaagagatggcagctcataacttgaagccagattctgtaacttattcaactatgatatatgcctttctccgtgttcgagattttagccaggcatttttttatcaccaggagatggtcaagagtgggcaggtgattgatttcaattcttaccagaagcttcgggcgattctggatgctaaagctgcaattaaaaaccgaaaggataggagatccttgattggtgtagttagaaataagatgggtgttgt

SEQ ID NO: 124757 - DNA, 211 bp, Glycine max
  unsure (1)..(211): unsure at all n locations
  Clone ID: PAT_MRT3847_83665C.1
gaatcagctccacgcagccgctgcaatcgtgattttcacaacgccgccccttcgctcaatccggttggtcaagcgggcgaagncaaacaccgccgcgctggccgggctcancgggagaggaaaaactggnatcttctatcagctcagggatggcacgactccgcagggcaccgttacacccatggagcctaatgaaggcactttaatcctt

SEQ ID NO: 124758 - DNA, 375 bp, Glycine max
  unsure (1)..(375): unsure at all n locations
  Clone ID: PAT_MRT3847_83666C.1
cgccagaccggccgcccnaaaaaaaggccgttcaaaactccgaacaaaaacaggcaacgaaaacagggcgaagggaaacaagagcaaacaaacccccacccacccccgaagcagccacttgctgaaaacacacgcgcacacctaggcacacacgcagcgatacacgaaaaaaaacagacaaagaacaagccgaagaaggaacaacaagcccagacaagcaggaaaaaaggatgaaaagcctagacaacaaagcccaagaaagagcagaaaacaacggcagagggcacgcacaggacagcaacagcggccacccaagcaacagcccagggagggaaaacaccgccgagaccagcaacaacacaccggcagacacaa

SEQ ID NO: 124759 - DNA, 280 bp, Glycine max
  unsure (1)..(280): unsure at all n locations
  Clone ID: PAT_MRT3847_83667C.1
gcctgcgtgtgcgcttttccctggttggggctctgcttcgcggagcgcctgccttgctctgcttccctccctcttctctttttgggcttccgctcttcgttcttggttcgctgtccctctcggtgtggccctggctcttcccccttctgctcgcgctggggcggggggcgggcttccggtgcctctggcggggcctacggtcccgtcntcgtcccggcgctggttggttcctgcccccgcgccctgttcgcgttcccctgggcggccgcgttgccgggtg

SEQ ID NO: 124760 - DNA, 443 bp, Glycine max
  Clone ID: PAT_MRT3847_83668C.1
ggagaagcacaatcattactttttaattaatttatattggtggattttgcaacacattacttttattgccaattacacattgtttttttgagcctatggtgttttggaacgccaggaaagcaaggaattacagggaccttaatcgaatgaggtccatgaaataacttagacggggagaaccaacccgctgcttttgaattgaggttccaaatcccggcccatttcacacgcgttgaatttaggcagaaccggggccaatcgtaggggtactcggaataaaagcaagtatccatcccagaaggaccctctaggacttgccatggcaatatacccatcaccggcaatcaaaacattaatggatgtggacatgatgatggcgcctggagcatttcttccatggacaaactaggccagccttgttctcaaatctcacagaggagaac

SEQ ID NO: 124761 - DNA, 157 bp, Glycine max
  Clone ID: PAT_MRT3847_83669C.1
taacacttgaacattcctgtttactggttgcatacgctcgctactgactatttctttcttagggtccgcacacgcgatgttggtatcgttcagagagctcgatgctctacatgtgaatcaccgtagaaggtgcaggctgatacgctacagcaccaac

SEQ ID NO: 124762 - DNA, 468 bp, Glycine max
  Clone ID: PAT_MRT3847_8366C.1
gggggcccttttttattttttttttttatcagccaaagaaagatcatattttgaatatagaaaaggtaccaggggaccataaaatacaataaggcatataacaagagttaccccaatgaaggagcctatcacaaagagcccttcatctcataactcatacgcagaaccaaaaaaacataaaaaacaggtgactacgtccatcccatgaccacattacagaaagggacccctctcaaaaaaaacccatcgctactgcccaaggtagaaaattcccttttaccacagctatccttcaagcaaaggcataattacaggaaagggaccttactaccagaaagttattttacattggaaaaagacatatacttcacactggagtgtagaacttaaagtgggaaattttttttctgggaggaaatttcccaacagtttaaaataaagtcagtgaacctaaaatcttatggaaga

SEQ ID NO: 124763 - DNA, 237 bp, Glycine max
  Clone ID: PAT_MRT3847_83670C.1
gataaatatgccaaccattataggagggggttaacagtgtaaaaccactgtaatgaatacaggtcccccactaaaaaagtacagagatcgagattatagccatcatttctcaagcatcaaacactctttgcactacacgcagatcccgtgactttacatactcacaacaagatcattacactgcactcgaagcattccagtgcacgttgatgcaaaaacttgtacagaagccactga

SEQ ID NO: 124764 - DNA, 1322 bp, Glycine max
  Clone ID: PAT_MRT3847_83671C.1
ggatcatcttcacaatcacatctccagaacacaaagaagagtgacccttcttcttgttattccacttgcgttaggtattggtgtgattgtttgtaccatccggtggtggagcttgttggaaattggagatgagtcagaggggtttaatatatagctttgttgccaaaggaactgttgttttagcagagcacacgcaatataccgggaatttcagtaccattgccgttcagtgcctgcagaagctgccatcaaatagcagcaaatacacgtattcctgtgatggtcacaccttcaatttcctcctagacaatggatttgttttccttgttgttgctgatgaatcgattggcaggagtgttccttttgtatttcttgaacgggtgaaggatgactttatgaagcgctatggtgctagcattaagaatgacggtgcccatccacttgccgatgatgaggacgatgacagcatatgggtacccacctcagaccggttatggatacccacaacagtcgggttatggatatccacaacaatccggatatgggtacccacctcaggctcagaaaccaaagaagaacaaatttggaatgggattgggagcaggattgcttggtggtgccttgggtggaatgttgatcggagacatggtatctgatgctgctgaatatgatgcgggctaatgctggctttgatgatgctggtggatttgatttttaattttcagtttttcaattaaccctgtttttttttttttcttttatatttctggatttcactttttgcctttttcggttgcgtaatgatgttctatgagattgcttattagtatttgtttcagatacctctcattacctgactctgtatttaactgctatgatataaagtataacatacagcctgtgatttcctcactattcgattctattctattgattgataaacgagagaaaaaaaagaaaagttttcatgctattggggatatgatgatgataaagctggatcaattttttctgttgtgcgactgatattttggttgattggtaggtataataaaaaatgatggttcggttgaattgattatagaaagaaatgacattgcaatttgcaaagttgtttttctaatcttatcgcttccagaatcgtaccaattttttgggttggccttgccagcgaatttcggggtggctattcctcttttcaattgtaaatttgattctcataaatttatttagaggaaatcctctcctaagtaggagaaagtttgtagcctcaaagtttgtaactaggcagatgaaaattgaatgaaaatttaagttttctc

SEQ ID NO: 124765 - DNA, 892 bp, Glycine max
  Clone ID: PAT_MRT3847_83672C.1
taagccaaaagattgaaattttactatcgtctagtttcaatgtgaatggatgtaacatgttaaaagatcttgtgttgtttctagcatttctcttttgtatatatagtagctcaatttgaagagatttgcttatgaaacttaaattgaattgtgttttgtcttctgctaaataccgcacaatgaactatactgtagatattttcttgttctctggttacatgctttacgtctgcagctgatgactttctagggtttctaattttcttttattttgggaccaaggctctggttgtatattctcaatttcctattgaagatgataagctaaaaaaaagataattgcaagcattgttttgttgatagattcagcaggtcgtgctggtggcttctccgttccagaggttatttagcggttctggtgtgatgcttttgcttgcttcttgccaaagctcagataccatttttattttgcaaggaacaaattttccttaggtccattttagctcaaaaaacatttttttaaacatctggtagactggtatactgaaatcgaattttaggtaggccctccttcaaatgaaggaactagattttcccctattttttggaagagaaattaccaaaattgtctggtgattttcgtctttcacatgtggatcgctctttgcataaccattattgatactgttatgggcttcctatccaatggatactgccttctttatttttactggagaatcactcgagactggtccgcgcgcgctcgccgggccagcaagggtttccttaagctaaggacaacaggtagcgtggtggggtcaaggaagtcactgaatgctgcgtgacagaggtaggattgcgcgctgagatcatcgaaacaactgatagggtg

SEQ ID NO: 124766 - DNA, 336 bp, Glycine max
  Clone ID: PAT_MRT3847_83673C.1
cattttaaatccgaagaagccccaagaattaaggggggcagataaaaagcaagtgggtctaagacaccacacaaaaattggagacaaacgcatgcaacctcaaggggggtaatgcccaaagcacacaaacctgtaaaagagcatgcccagcaatacaaacacatcacagccacgaatcacaaatgaacaagtggtgaacccaaaaacccaccaacgaagagcgaaaccccacaccaaacgaacaaaaaatatctgcaacacaatccaaatagcaccagaactcggaccaaatttcccagaaaaaggcgcaaccaaattcgacacttcccagaagcc

SEQ ID NO: 124767 - DNA, 748 bp, Glycine max
  Clone ID: PAT_MRT3847_83674C.1
gggttcttgagtttgactctagattttgacaaattcaaagtgtgcatgcactgatgcaacccccttcccctttttctacattaaaaaactatgaatgagatttttcttgcgatcatcattgcttgaattgaatcatattaggtttacattctgaattcgattagatttagcatttagggcctattaggtgttggtgtgattgtttgtaccttctggtggtggagcttgttggaaattggagatgagtcagaggggtttaatagtccgctttgttgccaaaggaactgttgttttagcagagcacacgcaatataccgggaatttcagtaccattgccgttcagtgcctgcagaagctgccatcaaatagcagcaaatacacgtattcctgtgatggtcacaccttcaatttcctcctagacaatggatttgttttccttgttgttgctgatgaatcgattggcaggagtgttccttttgtatttcttgaacgggtgaaggatgactttatgaagcgctatggtgctagcattaagaatgacggtgcccatccacttgccgatgatgaggacgatgacgatttgtttgaggacagatttagcattgcatataatcttgacagagaatttggaccagcactcaaggagcatatgcagtattgcctgaaccatcccagaaaaaatgagttaactatcaaaattgaaggctcaaataaatgaggtcaaggggataatgatggacaatattga

SEQ ID NO: 124768 - DNA, 272 bp, Glycine max
  Clone ID: PAT_MRT3847_83675C.1
cgaacctgatgaatgtaatttaatggtgtctggggtccatattatatcatggtactgtcgtgaacccggccatagtgcagtgttcacagcctacctcaaaaaatattgttctgaacctaagtggaaaagcccaacataggatcaaacactctggatagagggctaggtggcctgaacagatccctggagcttggtctggaccatcttggcctcaggagctccgagagcggcgggggaacggatggacaagaacacgttcccgggaactgttg

SEQ ID NO: 124769 - DNA, 2425 bp, Glycine max
  Clone ID: PAT_MRT3847_83676C.1
gaagagagggcaagtggcaatagtctatttaatggtaaaaacattgtcttgatacacacaaccaatccagatatgccatctaaagtaagagcttgattcaaaataactagcagctcaccacaagcttaattacagtctatgacagtgaccataaattccagtgccaaatttcatgtacacgtagtatatcattttgtgcatctcttgccttatacagacttaaacttccagtgtctccatcaacatttgaaacccccacaagcaataacccacagaattataattaagataaggattcctcctcccaccatcagcttcatttggagattctgcagccacatcttccttctcagctgcctgccctgcctctggaagctgtcagcctggaactgtaagttttctgttttgtccaccagcagttcaatcttctctccacgatccaaaaccttctcaatattgtccatcattatccccttgacctcagttatttgagccttcaattttgatagtagactcatttcttctggatggttcatgcaatactgcatatgctccttgagtgctggtccaaattctctgtcaagattatatgcaatgccaattcaaccgaaccaacaactcttattataccaaccaaacaaccaaaaaaacagacgcacaacagaaaaaaaagaaccaggaaaaacaacaacaaaaccccaaaagcatgaaaacttttcgtttttttttctagtttattagtgaggaaatcacaggctgtatgttatactttatatcatagcagttaaatacagagtcaggtaatgagaggtatctgaaacaaatactaataagcaatctcatagaacatcattacgcaaccgaaaaaggcaaaaagtgaaatccagaaatataaaagaaaaaaaaaaatacagggttgattgaaaaactgaaaattaaaaatcaaatccaccagcatcatcaaaccagcatcgtagcccgcatcatattcagcagcatcagataccatgtctccgatcaacattccacccaaggcaccaccaagcaatcctgctcccaatcccattccaaatttgttcttctttggtttctgagcctgaggtgggtacccatatccggactgttgtggatatacataacccgattgatgttgtgggtatccataaccggcctgaggtgacccatatgctgcttgaggtggggtatccaccatgcacctgctgaggtggatacccatattctcccgtcgccgcatattgctgcggcgggggagggtgtggcgtaccatagggcatcgaactggatcccgccccagcaggaggataagccatcaccggctcttgtcccgccttggccgctttgggtgtcttggcggccggggcgggaacatgttcgccgaatttgtaggagaaattcaaggatcccttggattttcttgattgcttcatcacctgataactgacttggcggaaggagctgtcatcgccggggttatccaggagttccctgagaggaacatggacggtgccgatgacggtgtcgccgagggtgcggtcggagatgagcttgatctcaagagataaacgattttccttcgccagcgattcgttgacagagaatttcacggggtagttccacgtggggttgctgccggcgtctttgtggacgtgggtggtggcgccctgagggtggagagggtcaccggagagcgaaacggcggcgtatacgtccatcttggagaagagattaacattcttgatgtcctttgcggatatgatgttgagttctaaggttctgtattccatggtcatggcagagaggaagagtttttgaggattttgtatagaactgaatgaatatatgatcactgagggagaaagactttgatgggttttgtttggaactgaaacttgtgaaatcttgatgcttatgggttctaatctgcaatgtaaatctgtcctcaaacaaatcgtcatcgtcctcatcatcggcaagtggatgggcaccgtcattcttaatgctagcaccatagcgcttcataaagtcatccttcacccgttcaagaaatacaaaaggaacactcctgccaatcgattcatcagcaacaacaaggaaaacaaatccattgtctaggaggaaattgaaggtgtgaccatcacaggaatacgtgtatttgctgctatttgatggcagcttctgcaggcactgaacggcaatggtactgaaattcccggtatattgcgtgtgctctgctaaaacaacagttcctttggcaacaaagctatatattaaacccctctgactcatctccaatttccaacaagctccaccaccggatggtacaaacaatcacaccaatacctgaatcccacaacaacttaacgcaagtggaataacaagaagaagggtcactcttctttgtgtt

SEQ ID NO: 124770 - DNA, 376 bp, Glycine max
  Clone ID: PAT_MRT3847_83677C.1
gaggcgtaagaagtcaagttcaaaaggagaagttcaggaacaatgcagaaaaaacgtggaaacttcaactcatatagcagatcaggatgtgacgaaaccatgtgatgtagccttatgcaatacttcagatgattgctcccatggacagtggggaaatattgtgctaaagcatttatatcagtcattaggtgatggcaatggcggcatagaggggtgcataagggaagcacttattcattatcctaaacataatcataccactacagttatggaaacttttaaaattgacaaagatggacaagaatgctctttgcaatttgagccactttctcatagaacagagaaggaagctaatgggcatgcagatgtcaggtgt

SEQ ID NO: 124771 - DNA, 395 bp, Glycine max
  Clone ID: PAT_MRT3847_83678C.1
attcttcttgaaaaatggatacttttcttttccttcatgttttcttatttgttggggttgatctttggttttacagtgtaaatcttttatgcgagaaccctataactaccaggattggtgttattgaggataaaaaaaccaaactgaactgaccggttcaaccaaaaaaaataatgaactagtcaggtgttcagtttgtttagcccaaaaaatcaatgaactaaatctgtggagaactggtcccagagtcagtggtgaagaacaggtttaaaccaattgtttcatttttcattgtatttttttttatctatcaaagtatacttagtcaaataaaagcccaatgtttattgttaagttacaaaggttcatatatgaagttcacttataaattggta

SEQ ID NO: 124772 - DNA, 394 bp, Glycine max
  Clone ID: PAT_MRT3847_83679C.1
ctatgactcttccgtctttacttttcttgtccttgtactttttggccatatcatagatctgggagcttgcgcattgtaaaagagtgttacataccttttcggagattgtccagggccgtcttcatttttattatgttaatcccattctccgaaggcgcgtggatccatttcgaaatctggcacaaaacctgggggattgttaacaggggatctattggcttgtgtactccaggcttgtttgtaccaacaaccatgttggttcaagggcatgagcatatgtttatatatttactgaactgcactgcggtgactttggatacccccgtatacggttactctccataccgtgcttgttacgggataatcttcatgttgggccctgtgatgactgcca

SEQ ID NO: 124773 - DNA, 288 bp, Glycine max
  Clone ID: PAT_MRT3847_8367C.1
accacgcgtgcggcccgtcatgattaattgctgacttgagtaaccgtataagtaacgtaggattgagctgtgcttgagccttaaggccctgtgttgtacgtatttgcttttatctgcctttatgacgcatgcatgtgaaagtacagatgtaattactgatcacctgaatactgatgatgaggctttggattatgacgtatcatagatgcttgacatgactctgagaaataatagagtcagttatatgatagtgcatggaataaatcttaatgatcaaatctttacttg

SEQ ID NO: 124774 - DNA, 243 bp, Glycine max
  unsure (1)..(243): unsure at all n locations
  Clone ID: PAT_MRT3847_83680C.1
aaaacgggaaaaattcagggtaatcttattgcaaagactttgaagaggttatcaccatcttacaaaactaaaanncgcaaatgcctccnttgggcgcctaaaacccgggaatcttcaacttagctacaaaaacctaccaacccccaggggaaaacaggcccaattgaaaagaaaaggtcccgttctttatttgggagactggtgagaagcatcaatcggctttttggtttgaccccgccccag

SEQ ID NO: 124775 - DNA, 265 bp, Glycine max
  Clone ID: PAT_MRT3847_83681C.1
ctactcatatgcttgtctcaaagattaagccatgcatgtgtaagtatgaactaattcagactgtgaaactgcggatggctcattcgatcagttatagtatgctcgatggtatctactactcggataaccgtagtcattctaaagctaatacgtgcaacgaatcccgacttctggtagggatgcatttattagatagaaggtcaacacaggctctgcctgttactttgatgattcatgatagctcgtcggatcgcacggcctttgt

SEQ ID NO: 124776 - DNA, 407 bp, Glycine max
  Clone ID: PAT_MRT3847_83682C.1
aagtttttcaggtgggtgtttttgaaattacatgggcatgtgatcaaagttctgtcggctatatatctgaggcaatgctattgtgagagacgggtaagcccagccgttgaaacgacacctgccacattactgaaagcattatcaccagctgattgcgccacaagtttggaaacacaacagtataccatcaatgcataatgaaccaaccacgtataatagcgctttacaatgggtgctccaagacccaacttgatcggggtaaacgtggaggttagtgagaagttacttttacaacatcactgggttgcttcggaaccaacatccctctacacaacctctcgattgttgtatcttgctctgtgctactacaaatggtgtttcagggactagatccatggggagttttg

SEQ ID NO: 124777 - DNA, 248 bp, Glycine max
  Clone ID: PAT_MRT3847_83683C.1
cggagatgatttacctgcttcaatggcgaataattgggagcaaccttgcagaagcacctgtagcatgcaaggagaaggtccaagacctttaagggaaaatgcttccccttgaaggtgaagatgaccaaggccctcctaggcggttggcttccggcaaccaaggtggccccagataacaatgaagattgaaggatgcaaacctttggcttccagtaaaggacttgaggctgtttaagaatgcttcagta

SEQ ID NO: 124778 - DNA, 292 bp, Glycine max
  unsure (1)..(292): unsure at all n locations
  Clone ID: PAT_MRT3847_83684C.1
cgtccgcatccccttccatggcagctccttcactctcttcttttctcaactctctctcctncccctgcctgtctttctccttctgcacgggctcccgccacttctttctcctccctccaccctcacaccaaccctccaaacccctctttcttacccttaaatccaaaccctcctactacatttacacatcgttcttcgacaagaatggtcaggtggtagtcttagttggcaaggccaaggaagtcattgccgccgttcataattccgccttcaatgcctgtagtaacatcat

SEQ ID NO: 124779 - DNA, 546 bp, Glycine max
  Clone ID: PAT_MRT3847_83685C.1
gttccaggaaggtttcccgtcatcactgtatgacgtcctccttctttgggggggggggggggcgggggggtatactaataaaggcaaaaagggaggcataattataacaatagagtatctaaggcgtagaagatacaaaaggcaaacaggagctgtggtgagacgataagcaatgaaagagcttaaaatgggaggtggtgataatggcgatacgggagggaaaggttgagccataggcaaaagtgtacagtacattgagacgtattagttattacggaatgatcagaaaggcagctagatgagttaatgttagcacaagtaacaaaacagtcagtgaagatggagaggcatggtataattggaaccatactaacgaccactgtttagtacccttgggcgtagaagaagggcgtaccagggtgggtagaggtagcgtttgagacatccccccaggggtggtgcagaataaggttgggaggccattagaatgtggtcagcgatagggacagagccgaaaaggtagcaacaaccggctgatacaaaggt

SEQ ID NO: 124780 - DNA, 140 bp, Glycine max
  unsure (1)..(140): unsure at all n locations
  Clone ID: PAT_MRT3847_83686C.1
ggcgnccacgcgtacgtacgggtggtagaatacgacagaagggggatgaagccacatacacacacaggggagggtgaattcttgcgtactaggcacaactctctggcaacatcggtatcttcagagattctatgcacaag

SEQ ID NO: 124781 - DNA, 346 bp, Glycine max
  Clone ID: PAT_MRT3847_83687C.1
aaaagaaaaggggggttggttttaatttcaacaaacggagatacttatattttggatcgcatcccatatcgattcctttgtaactacctcagattgagggtttcagagacaaaacaaattacccttttactactgactgtgcccccatttttggtgtccgaacctttctcaaacagttgtgggagagaaaaaaacaggctgttaacaggtgaactcaacatatgctctggcctttttcaagggtggaatcattgctgaaagagctctgaacaatccgctgatagcctctctccatcagctttcatcccagctgggaacaactgaccgtaaaaagcgactacccctc

SEQ ID NO: 124782 - DNA, 288 bp, Glycine max
  Clone ID: PAT_MRT3847_83688C.1
ccggactctgaattcccgagccgacctacccgaccgttccgagaagacaacagaaggggaggaccgattgaaagatgtgtgatcgggcctttgggatgaactatgtattctctatgtgtggtccgttcgctttaccacaatcctaattttacgatgctcgcataccacgatctatctcttacatgaagacaactactttcaaattcctacctttcttactattacgaccgaacacataaaagcttatcgaaactaaattttttagaatggcaataaatgttcgatata

SEQ ID NO: 124783 - DNA, 849 bp, Glycine max
  unsure (1)..(849): unsure at all n locations
  Clone ID: PAT_MRT3847_83689C.1
cgtgggcggaggctcggagaaagggaagaggagagagaaacgaagaagaagagtgtttctcacatcacatggcctccttgcccttggggcaccaccaccaccaccacaaaccggcggcggcggctatacatccgtcgcaaccgccgcagtctcagccgcaacccgaagttcctcgccggagctccgatgtggagaccgataaggatatgtcagctactgtcattgaggggaatgatgctgtcactggccacataatctccaccacaattggaggcaaaaatggggaacctaaagagaccatcagttacatggcagaacgtgttgttggcactggatcatttggagttgtttttcaggcaaagtgcttggagactggagaagcagtggctattaaaaaggtcttgcaagacaggcggtacaaaaatcgtgaattgccgttaatgcgcttaatggatcacctagatggaatttccctgaagcactgtctcaagctcatcccagagcacgtcaggcggcaaactggtctcggcttcctgtactcggcagaaacccaaacccaaatgtaaagagatagtgaaacatagagtcaaccgttctagtggattagtgtgaaatacatcatggcctgcttgtggtcaaaatagaacaggggttatgcctaaatatgcacagtttttctccccttgtgaagatgtatacatgtgctggaaactcagtgtaacccggaaatgttgattatgtctaacctttaatatttcattctagttaagccatgcttgttccttgcatatgtactattactttattcgtacagacatattttacataaatatattaaatttttcntcg

SEQ ID NO: 124784 - DNA, 496 bp, Glycine max
  Clone ID: PAT_MRT3847_8368C.1
ttggaacctttgggctgatttatgtgcttgcatggtcgtgagaagatgataaaagggggaggaagaaacgtactacactcgcgcccgtcgtaggggtccgatcttctcattcttcttcttcttcttgtcctattaaagatgaaatatctcagctaccatccccgtcctaaagctcggaggaggacccctatccaatctgccatcgaaaagccgcaaaagccgtggaggaaagggggtaaccgaacgcttcggacgcaaggggatgggaaagaacaaaaagaatggaaacacacccgaatggcggaaacgccccgaccgttaaggacccgggtcaaagagtcgctttagtcgtggaaaggaaggtgcaatatttgaataaagaggagaaagacaggaccaaggacctaaatccgtatcccctctctaaccgactaattttccattttcccacgtaactccacatccatgacacaaacagaggctacacgtactcccc

SEQ ID NO: 124785 - DNA, 623 bp, Glycine max
  unsure (1)..(623): unsure at all n locations
  Clone ID: PAT_MRT3847_83690C.1
ccaaaatgccgggctacctaatggcggtccactgcccccccttttaacttcaaacaggagttagctggagcatcccctgaactgatcaataggctcatccccagagcatattagccggcagatgggtctcagcttcccgcattctgccggtacatagatgtaaagggataatgaaacgatgagtcaacctacatagtgatcgatgtgaatcaacagaagggctgtttgaggcctatgtataactgggagtcccaacataatatgcagtttttcctcccccttgtgaagatgtatacatgtgttggttgctcggtaaagcttgaaagttggtgattctgtgtagtatttcattcaagttaaagcatacttatccctgcatctgtatattgttttggtcagatttcagaaagctaggagtataaaatgatagcaatcatgtcttcataggtagaggggcccagctgaattgaggggcccctatagtagtttggcttgctttttatgagattaaattcaggatgtcgtttatattatgtttataacaatctcttgattcaaaacaagaaattttctcgttgtttaatactctagtaaccccgttccttctacccaagaaanaaaaa

SEQ ID NO: 124786 - DNA, 2519 bp, Glycine max
  Clone ID: PAT_MRT3847_83691C.1
cggacgcgtgggtgaatgttgcgttttttccatggcggctctcactctcattgtcagtgtcatctaactgtcgctctcacttcctcactctcacagatccatcgagttggttcctgccaggattccaggctgcgacatcttcatcttttccagagctggactacaggatccgacagctagaccacgccatatctctttctccatctcccattctcaccgatccgctgctaacaacctcttcgatcccactcccacacgcctagatgacgtatacgcaattcttagagttattcagattctcggaatccaagagaagaataatcctgtgagcgaggacacttgtcagaaagtggttgaaaatctagcctcgtcttctcctctcaaggattaggtctataccttgttaaggccattttaaaatgcaatgtcaatggaaacgtttcccccacgcgtccgaaagggaagaggagagagaaacgaagaagaagagtgtttctcacatcacatggcctccttgcccttggggcaccaccaccaccaccacaaaccggcggcggcgtacggtcgccagaagacagaaagggaagaggagagagaaacaaagaagaaaagtgtttctcacatcaacaggacagcattgaccttcagagaagagtgttcccacattccatcgcgtcctcgccgtcggtgcacccccaccatcaccaaccggcggcggcgactatacacccgtcgcaaccgccgcagtgtcagccgcaacccgaagttcctcgccggagctccgatatggagaccgataaggatatgtcagctactgtcattgaggggaatgatgcacgttactggccacataatctccaccacaattggaggcaaaaatggggaacctaaacagaccatcagttacatggcagaacgtgttgttggcactggatcatttggagttgttttccaggcaaagtgcttggagactgcgagaggcagtggctattaaaaaggtcttgcaagacaggcgatacaaaaatcgagaattgcagttaatgcgcttaatggatcacccaaatctaacttacatgaagcactttttaatttcctcatcaagcaaagatccaactttttctaaacttgttaatgagatatgtccctgagtcaatcaaccgaattattaaccattacactactattaaccagagaatgcctctcatctacgtgaaactgtatacatatcaaatcttcaggggattagcatatatccataccgccctgcgagtttgccatagggatgtaaagcctcaaaatcttttggttcatcctcttactcaccaagttaagctatgtgattttgggagtgccaaagttctggtcaagggtgaatcaaacatttcatacatatgttcacgttactatcgggctccagaactaatatttggtgcaactgaatacacaccttctattgatatctggtcagctggttgtgttcttgctgaacttcttctaggacagccattgtttcctggagaaaatcaggtggaccaacttgtggaaattattaaggttcttggtactccgactcgcgaggaaatccgttgcatgaacccaaattatacagattttagattccctcagattaaagctcatccttggcacaaggttttccacaagcgaatgcctcctgaagcaattgaccttgcatcaaggcttctccaatattcacctagtctacgctgcactgcgctggaagcatgtgcacatcctttctttgatgagcttcgcgagccaaatgcccgtcttcctaatggccatccactgcccccacttttcaacttcaaacaggagttagctggagcatcacctgaactgatcaataggctcatcccagagcatattaggcggcagatgggtctcagcttcccgcattctgccggttcatagatgcaaagggataatgaaacgatgagtcaaccgatatagtgatcaatgtgaatcaacagacaggctgtttgtggcctatatataactttttcgtcccccttgtgaagatgtatacatgtgcttgctgctcggctaagcatggaagtttgtgattctgtctagtatttcattctagttaaagcatacttatccctgcatctgtatattgttttggtcagatttcagaaagctaggagtacaaaatgatagcaatcatgtcttcataggtagaggggcccacctgaattgaggggcccctgtagtagtttggcttgctttttatgagattaaattcaggatgtcctttatattatgtttatgacaatctcttgattcaaaacaaaaaatttcctcattgtttaatattctagtaagcaaaaaacattttgcttgtcatatgtcgacatgatgtatgtggacaacaagaaaggatccaatccaaaagttatttacgggcttggacagtccccccctgccctagttttccacctatttttttctccgtgcagcgtgttctcacacttctttactttcaattgttattaaaa

SEQ ID NO: 124787 - DNA, 687 bp, Glycine max
  unsure (1)..(687): unsure at all n locations
  Clone ID: PAT_MRT3847_83692C.1
ttttgcagaggtttcggtgggataggtgggatcttgcgttaccagcttgatatgcgatcatttgatgatttttctgatgatgnaggcgtgtatgatgattctgaatagcaatcactgaaaaacttcctaccactggtgcaggaaaggggagccaagatacctgcaccaatatgggaggtggaggtggttgcacctgctgcagctcctcctcctccatgtctgtctctggtgttgcagagagtgtttgattgtgaatcgagatgctctgcccccaaggtgctcctttctgatacgagttaccttgtccttctaacatgcacactctggcaccacaaattcctgcaaagcttctggcagcacctgctcccctgctctctactacttacacccagaaaagcaagaacaaaaacatgtttattagagaaacactatgcagaagcagtgatggttaatccagatgatttgtcacatgcagtgttttctaggatgctccagcatatacctggacagcatatactggcacacgagtgctagagtctacgactaaatctttcatgtgttaaatctatctttcaaaactttggaaacttacccgtgatgaaataatgttcattttgttttcttgatatttcacacatgttgtgcttatatttgacaatatgacttctatttacattgcttaatggt

SEQ ID NO: 124788 - DNA, 2187 bp, Glycine max
  Clone ID: PAT_MRT3847_83693C.1
tgttcgctcatcgagcccgacgcactctccctgaagaatcgcattccatagttctcagatagggcacgtctctcgcggcctcttctctccctcgcgccgcccacactaaaaggttattgctctattattgtttgacgatggctgatgctcatgggactgataagaacattgaggtgtggaaaatcaagaaattgatcaaagctcttgaggctgccagaggaaatgggacaagtatgatttcccttatcatgcctccacgtgatcaaatatctcgtgtcaccaagatgcttggtgatgagtttggaactgcatcaaacatcaaaagcagggtgaatcgacagtcagttcttggtgcaatcacttctgctcagcagaggcttaagctctataacaaggttcctccaaatggtcttgttctgtatactggcacaatcgtgactgatgatgggaaggaaaagaaggtgactattgattttgagcctttcagacctattaatgcatccctttatctttgtgacaataagtttcatactgaagctttgaatgaactcctagagtctgatgacaagtttggatttattgtcatggatggcaatggtactttgtttgggaccttgagtggtaatacgagagaagtgcttcataaattcagtgtggatctcccaaagaaacatggaagaggagggcaatctgctctgcgttttgcccgtcttcggatggagaagcgtcataactatgtgaggaagacagcggagcatgctacccaattctatatcaatgctgccaccagccaacccaatgtttctggattaatactggctggttcagctgatttcaaaactgagcttagtcagtcagatatgtttgatcctcgtcttcaggcaaaaatactgaatgttgttgacgtctcctatggaggtgagaatgggtttaatcaggctattgaactatctgctgaaattctgtccaatgtgaagtttatccaggaaaagcgactgattggaaaatactttgaggaaatcagccaggatactggaaagtatgtttttggagttgatgatactctaaaagctttggagatgggagctgtcgagacacttattgtctgggaaaatctggatatgaataggtatgtcttaaaaaatagtgctactggtgaggttgtcattaagcacttcaacaaggaacaggatgccaaccaaagcaattttcgggatcctgagagcaatgctgattttgaggttcaggagaagttgtctctgctggagtggtttgcaaatgaatacaaacggtttggttgcactcttgagtttgttaccaataaatcacaagaaggttcacagttttgcagaggtttcggtgggataggtgggatcttgcgttaccagcttgatatgcgatcatttgatgatttttctgatgatggaggcgtgtatgatgattctgaatagcaatcactgaaaaacttcctaccactggtgcaggaaaggggagccaagatacctgcaccaatatgggaggtggaggtggttgcacctgctgcagctcctcctcctccatgtctgtctctggtgttgcagagagtgtttgattgtgaatcgagatgctctgcccccaaggtgctcctttctgatacgagttaccttgtccttctaacatgcacactctggcaccacaaattcctgcaaagcttctggcagcacctgctcccctgctctctactacttacacccagaaaagcaagaacaaaaacatgtttattagagaaacactatgcagaagcagtgatgtatttgttgaacctgtctgtgtatgtagctctccaaagtcttgatgaagatgctcacagtcaataggttattctgcttaaaggttaatccagatgatttgtcacatgcagtgttttctaggatgctccagcatatacctggacagcatatactggcacacgagtgctagagtctacgactaaatctttcatgtgttaaatctatctttcaaaactttggaaacttacccgtgatgaaataatgttcattttgttttcttgatatttcacacatgttgtgtttatatttgacaatatgacttctatttacattgcttaatggtatgtgatgtgttcttatgaaaatttcagtttgtcattaatatatatatttgacagttatatcaaaaaaaaaaaaa

SEQ ID NO: 124789 - DNA, 272 bp, Glycine max
  Clone ID: PAT_MRT3847_83694C.1
aaatccgcaccaccatttaataagccggcttttacctaacctccagtctttaaatattaattttcggcccagaaaacaaatccgtcatggtaattcttgggggaacctaaaaattggttaaggccttcaattctattccccagggttggaaatggaggtcaaagggccaaaccaaatttttttgggccaccaatccggattccttggtgggttaaccaataaccctggccacctctttcaatttcatcctttttctggatagcatacctggt

SEQ ID NO: 124790 - DNA, 214 bp, Glycine max
  Clone ID: PAT_MRT3847_83695C.1
tgcagtccaggtgtcgacttatggacacccgccgtaatacaaaattccgctgctgatggggcatttgaggaccattcagaatgcgcctatggggctcgattatgatcatgatataaagatctccgagtgtgtgaaagaaatgttcgttatgtgcctgcgcaaagatcaaacaaagaggtcatctgtggagaatgtcatcgcacactccttcttc

SEQ ID NO: 124791 - DNA, 202 bp, Glycine max
  Clone ID: PAT_MRT3847_83696C.1
cagacatagaagttttcagtttcacttatcacgatccagcaatagcactgggctgggtccgtgagactgtcgattccatcaaatatcttcagatcagacatgtactcagccatgctgttatcctacgcatgattgttacgtctgcactgataatatggaaagcattcatgtccgtaactggtcagtgaatctcccgttgttg

SEQ ID NO: 124792 - DNA, 434 bp, Glycine max
  Clone ID: PAT_MRT3847_83697C.1
tatctctctctctctctctctttctcttcttgattattcatggtgtctcaattaaacgggtgttttggtctgaattgaggagggttgtgaatagtgatgttcctctcgagatcaattctctttgcgtttggggtcccaacttggttgcttctcattcccgcccacggaattcggtcatttgccaaaacaaacgggtatgaaactgaaggtgaagaagtggatccctttggcaatttcaaaagggccccatattcctaaacccgccaaagggcactctaattgacacacccaaagcgccacctggatgcgatcccttacttgttcatggtggcatgaacactgattgggactacttaagagggtctattgctgcaatgcattctgtcgagaatcacacattctgccccgtgaattggttctttcattttattgca

SEQ ID NO: 124793 - DNA, 509 bp, Glycine max
  unsure (1)..(509): unsure at all n locations
  Clone ID: PAT_MRT3847_83698C.1
ttttggttgtgagagtgaaagagaacaatggaagacataacagagggagtgaacaacatcaacatatctccgattcgtataagaaaaatcgcattcaggtctctaacaccaagaagcccctcttcttctacgttaatctcgccaagagatatatgcaacagcatgatgaggtcgagctctcagctctaggaatgggtattgaaatccctctcgtcttttttcctcttttattccttgaatttcgcttgttggttctattgatcagtaatgcggactcgttcttttcgttcattcaggtattattctagttataggcttgctaaatataaatccgtgtgattgagaattttgaaaaactcgcagaatgatccaagtatccaacattcgttggactaaagatgttactctgttcttctgactaaactttctatactgatactggcaaccatcactatgtgcttatgctcagttntaacgtttggcctccccttctccaatcccttacgtag

SEQ ID NO: 124794 - DNA, 340 bp, Glycine max
  Clone ID: PAT_MRT3847_83699C.1
tgtgttgacgtgggcggaggagagcagtgatggtggcagaagttcgtgctcttcatctacaaggtcatgtgggagtagtaatggtggcttctctttgttgctatatgcttggtggagagactagagtctgaaattttggaactggattagttcattgttcttttccacattcattatttcacttgtgattattgatttttaacttctatgtttcaattaattattgaaactattgttttcatggggtttcaactttgaattgctctgaattggagagcagtttcttgtatacttgcctgtctctcttgtacagttatttatcttaagtttgtcttcaagg

SEQ ID NO: 124795 - DNA, 1486 bp, Glycine max
  Clone ID: PAT_MRT3847_8369C.1
tacggctgcgagaagacgacagaagggggagcgagagacgaagagaagaggaaagagcgcgttatgtggcctcttgtctcgttatttgcagaaacacccgcaaagccagaacagaaatcgcatataaaatgcgaaaagaaatgaattcaatgttcggagatctgcacaggatctctctccgtcaaactttctttaccccgtcctcataacatatttcagatccgaaaaccagatcccgcgaactctgaagatctctattctctttccctcacctttccactcaaattcccctttccactttcccgagaaaattaactttttccgtcaattttccctccacctcttccttcttcctcacaatggctctgagcttcaacaatcgaagaatccctctcgctcttcgcattttccttctgttctccttattcttcagcctctcaccgaccttcgctcaggattctctcgttcagaacgcgaaggaagattccggcggatctgtggatctcggtcgccgcgccaaaattgcattgaatgacatagagaatgattcgatcctttctcttggcttggactccaccggtcctggactcttcgacgcatttttcgcgagtttttcgatgatccttgtcagtgagattggggatgagacgtttataatagcagctcttatggctatgcgtcaccctaagtcaattgtcttgtctggtgctctcagtgctctgattataatgacagtactttctacagggctggcacgattctttataatttgatttctatgaagcatatgtacattgcatggagatcatcagattcaaaatcctcacagaagaaagaaatggaagaagttgaagaaaaactggatggtggacaagggaaaacttcagttaggcgcttcttttcaagattttgtacaccaatatttttggagtcttttattttaacattccttgctgagtggggtgaccgtagccagatagcgacaattgcactggcaacccacaaaaatgcaattggagtagcagttggggccactataggacacaccatctgtacctctctggctgtagtgggaggaagcatgctggcatctaagatttcccaacgctcagtagccactgttggtggcttgctcttcatcggcttttccatatcttcatacttctatccgcctctatgataattacaagtgcagagtaatctgattcgtaatggcttgtggcctctctgtcctgtttttttccccccctacataattgtctttattgtagatttgtgttgtacttgttccctaggaaagctcgatactaactggaacatgagattttgaatcccattctttttttgtaaaatatgttaagttttcgtctcctccacacattagcacgtagacagacattgttatttatcattatttttggaaggtaaaagtatcatccccttttccatggttcgtaaaaaaaaaaaaaaaactcgagactagttc

SEQ ID NO: 124796 - DNA, 236 bp, Glycine max
  Clone ID: PAT_MRT3847_836C.1
atttcattatagtaaccacatttactattgctggagtaatgatcacgtgaaatcacattagttttatggactacgtgcacttacgatccaacatgtaaatagcatacaagttacacacacaatcaaatactgcacagacttaagcaagaaataggcagtaaaccaacgtataggccagtgttggtcataaatattgcatcccatacgaaaatcaacacccgtttcaaatgcaacca

SEQ ID NO: 124797 - DNA, 505 bp, Glycine max
  Clone ID: PAT_MRT3847_83700C.1
cagatatatataattttgaagttaataatacagagcttttcatcattcttggctgtgatggtttgtggggggtatttggtcccagtgatgctgttgattttgttcagaagttattgaatgaggggctacctgttgccacagtgagccgtcgtcttgtaagggaggctgttcgtgagcgtccctgtaaagataactgctctgccattatcattgtattcaagcacaattaatccctgaggcaccatctccatgtgtgtgtaataccaggtggggtaccaatatagatgtgatttgttttcagtttctgctttcaaaagcaatgtaaaatatgtgcattacttctccctgcaaaataaatggtggcgctaaacgcataccaactagttttttactcttataaaactgattgttgttgttaactttttgtaatccatgttgaagtgtagtgaagatcaacttgctttaaaaaaaaaaaaaaaagaaaggggggagggggggggagagg

SEQ ID NO: 124798 - DNA, 609 bp, Glycine max
  Clone ID: PAT_MRT3847_83701C.1
ccacgcgtccgttctgttctgtgtttcggggttacgctttgcgagtgagaattgataaacaaatcgttagggttttttggttgtgcgagtgagagtgagagagaacaatggaagacataacagagggagtgaacaacatcaacatctctgattcgtataagaaaaatcgcattcaggtctctaacaccaagaagcccctcttcttctacgttaatctggccaaggtaccaccactccattttcaggtttcgaagctcgcgagagttttttcttttcatgtttaattttgttgattctgcagagatatatgcaacagcatgatgaggtcgagctctcagctctaggaatgggtattgaaatccctctcgccttttttcctcttttattccttgaatttcgcttgttggttctattggttgcttattgattagtaacgtggactcgttcttttcgttcattcaggtattattctagttatagccttataggcttgctacatataactttatgtgaaaaactcacagaatgataacagttcaatgatctaaccttcgttggactaaagatgttactctggtcttctgactaaactttctatactgtgatact

SEQ ID NO: 124799 - DNA, 190 bp, Glycine max
  Clone ID: PAT_MRT3847_83702C.1
ttttctcatatttcacaggaacagacacacttccatgtagaacattctttctatatgtggcaaaaacaacgtagacacacttgagcgacacatgcaagggcgaaagtgatctaccaagaaattgagattgaaggggagcgaacgaaagagagcttaatctcgtggatacagtgacgaaattggggatgcc

SEQ ID NO: 124800 - DNA, 235 bp, Glycine max
  Clone ID: PAT_MRT3847_83703C.1
tagctcgggatcgctcgaggttgaatgagggacatagattttgatcaagccgtcgcttgaaacgcgaggcaagagtcacatgtcgataaggagtgggttaaaccaggcgggccatgtacatttgcagagattgacttggactctacttatagcaatattctagcttttgggctacctggaaatactgtcaggtatttagtgcgctttcatctatttgggatccttgcaatacggt

SEQ ID NO: 124801 - DNA, 465 bp, Glycine max
  Clone ID: PAT_MRT3847_83704C.1
ggaaagaaaaatggttatggtttgatagcggtgtgcgggtgtgaatctcagactcaaattcagcagtagagcacatggtagctgcaaattccaaccatcaccatgccttccaattcctcctcacttcactgcaaattccagaccttagcgtgccaaacaaatcccaaccttgatcaaaaggatacccctaccacggtatgctactttccttgctttatttcgtaccttaacttcctttaacctcctctgctcaggatgaagaaaaacttgtggtcgagcccagccatacaaaaacttcacttcctcaattgcccgccaaagacatcaacaacaaaatctcacttgttctaccttagcggctttgggccttttcttgtctacgaggttggatttcggtgtttccctcaaagatctctctgccattgcaatgccttacgaagaggctctctccaatgggaagcccac

SEQ ID NO: 124802 - DNA, 438 bp, Glycine max
  unsure (1)..(438): unsure at all n locations
  Clone ID: PAT_MRT3847_83705C.1
tcacgcgtccagaaattcngataaacacgagatgcacaggttggcgcaccttaaagccggaaacaaaagcaattgtcacttgatccacaagaatcgtccaattgcttgctacttgttggtgtacgatcgctcaagggaaagaaaatcactctctgggctggccacagacttcgtgaatcatttgcttttccactcttagtctatttgctgaacactctcctattagagataggactccatgaccgattgaaactttaactgactctttctcagctctcttcttaatttcaagggcaagctggtgaaatcttggattagtgctcccactctcctatctggtataggactctcggggtagacttctgtatttctgaactttttttcactgtcttcttctcactgatccgcattgacgttcaaagtggtcttatttgaaaa

SEQ ID NO: 124803 - DNA, 382 bp, Glycine max
  Clone ID: PAT_MRT3847_83706C.1
acgagctagagcgtaccttctcctgtttccgataaagatatttgacttaaagatggttgtatgtatggctgtgcaggtcttcagctatagcgatgaaagagatcgacatgagtgagccacggtcttcattttccaaagatgaattagagaatgattgtgacttttacgttgctagcagctcaagattaggtgggaacttcaatgctcaaaatttaattccagaagatgtaagggataattcgagcttgctgagcgaagagtcaagctcacgcactgccgagaggggtgtgtccactgcgcattcaccatcaacaatattgacgggagagaacagaagaaaacacagaaatgcttttgcaagccctagaaaacatagaaatgt

SEQ ID NO: 124804 - DNA, 198 bp, Glycine max
  Clone ID: PAT_MRT3847_83707C.1
cctcaggccattttaaggtaactgtccggaagcaaagggcaacagtgagaacaccatggaatttacgactctaccacgcagagcttttggcaactctctatcgaccttctaggtggaggaattccagtggacaaaactgcacgattggatcacactaatacaaaattcttcaattagaaacttggagagagcagctgc

SEQ ID NO: 124805 - DNA, 849 bp, Glycine max
  Clone ID: PAT_MRT3847_83708C.1
tacggctgcgaggacgtaagcaagggatcacactaatcactcactcttcactcaaaactcttctctttcattttcataattcccacacattatggctgagcttcactaccaaccacaacaccaatacccccaccgataccctaacgatccacaccaacaaacccgttcctccacccaccaggtcgtcaaggccgccaccgccgtcacagcgggcggctccctcttgatcctcgcctcgttgatcctcgccgccaccgtcattgccctcaccatcgtcacaccactgttcgtcattttcagtccggttctcgtccccgccgtaatcaccgttgcgctcctgagcctggggttcctcgcctcgagtgggttcggtgtggcggcgatcacggtgctggcgtggatctacaggtacgtcaccggcaagcaaccacctggcgcggatcagttagacagcgcgcgtcacaagatcatggacaaggcgcgtgagatcaaggactacggacagcaacaaatcagcggggtccaggcttcttaattctgcactcgcacgcacatgatcgtatccatctcgtggaatatttctctctttgtctagttagtttatatttaccatttatgaatgaatgaatgcatgattgagcgttaaagttgaatttgaatctctcttttctttgtattttcgtttattgtgggtgttcgctcatcatcacttgttgtaatgtcttaattttgtgtgcatgctgcgactattcaaggacgatccatttgtgtatttattctagttttttctttccttttatgaatcggtttgcttgtttttaagccgaacaacaccacaccaccccaaaa

SEQ ID NO: 124806 - DNA, 478 bp, Glycine max
  unsure (1)..(478): unsure at all n locations
  Clone ID: PAT_MRT3847_83709C.1
cctatctgctgaatttgagcacatgatgatgagggagatgcccttgctccatgaccatcagcttcttagagcctagatcgccgcaggtgagaggagtcacctttatgttcccgggctgctttggtggcctaccctatctgtctaggccttttctttttttggagggggggctgcnncccagncaccccctccccccctaattattatccccctgccgggcgggggggcccgtnccttccatccgccccgacggcccaccgcttctcccccgccccgccccccccccctctccgccctccccccgcccgccgcccccccccgccccgcgcccgcctccccgcgccgctcccgacacccgcgcctccccgccccccaccccctcccttccccgcccgccccccccccccccccctttccttcccccccctcctctcccttgctcatcgcctgagcgcccccgtccccccccccccccccc

SEQ ID NO: 124807 - DNA, 1532 bp, Glycine max
  unsure (1)..(1532): unsure at all n locations
  Clone ID: PAT_MRT3847_8370C.1
ggatgggtcatttcacaaaaggctaaataaagctggaatatatatggttgaagacttcttaaaacttgtggtcagagaccctcagagattgcggaatattcttgggagtggcatgtcaaataagatgtgggatattcttgttgagcacgcaaagacctgtgttctcagtggaaaactttacgtatactatcctgaagatgcaagaaatgtgggtgttgttttcaataatatttatgaattaagtggcttaattgccaatgaccaatattactctgctgattctctctctgctaatcaaaaggtttatgtagacacattggtgaagaaggcatatgataattggatgcatattattgagttttattgaactgaacaaaaaattttctggttgtatcatcctttggatctcagtcattcctgacattcagagttggtgtcagaatatacaatcttaccaggggcaagaataagaaatctggactgactttatttagtgcctacccaacttaaagtggattcaggagtaacagttggaggttatcatgatgggacagcttctagattcttcttgcaaccacatcctaatcttaattcttccattcagtttgatgatgatgcatttccactacaaaaccagttgatgagtgcttcacaccatgcccaacttccaagaaatgaaaatgggcagactattggtcctccacaatcatccacgcacggctttgagcctgtaagcatttcaaatcctacgtacagaggagttgaagagtacttcccagaggaggaaattcgtattagaagtaatgagatgctagaaaatgaagatatgcagcatctactccgtatttttaacatgggaggccaatcacatcctacccttaatgctcaggatgatgggtaccctagttcatctacatacatttctgcanaccccatgggctacaattttgatgatgaaccaaaccgttcctcgggaaaagctgttgtgggctggctcaagctgaaggctgctttaagatggggtatttttattcgggaacaggctgctgagagacgtgcacagctcgttgaactggatgacccatagagnncttgggggggcattactgatatttagtgatctgaacaataatttttctggttatagtatccaaggtttcttagtctttcaagacagacagatttggtgtcatgctgaaatctcatagcacgagcaaggatatgaaatctggactgaattatttggtgcagacttaacttaaagattccactgtgccttgatccataaacagttgtgcatagacctctgtctgtagaagaatatcattctgcaacatctcttctttaactgctttgcttgtgatgttttcctgcatccaagttgtaaagactcgaaggtttgctcgtttttaaactgaagcatgttgttggaatgctgcttaaacttggcaagctccaagtgaaatcacaaggagctagctactaggatctttacagcatttaccaggttgtattcaattctgtatagtaag

SEQ ID NO: 124808 - DNA, 460 bp, Glycine max
  Clone ID: PAT_MRT3847_83710C.1
gttattattcaattgtttagttttatagattacagagagtgtgtgtaagagaaaaaagttgtccccctcttttcccttcttctttctctgagatccaaaaaaaaattcaggtgaggtcttgtgtggtagataactgactccactcaactcaacctttttgattttgcattcactgagagagagagagagagagaaagaaaaacataaaacataaaacatcagcatcaatacagagtttaactgaatcatcatcagttttggttcgtgccggtgccgccgcaatgaaggaaacagacaagagtttggatccgcagctgtggcacgcgtgcgccggcggtatggctcagatgccgccggtgaactccaaagtgttttatttcccgcagggacacgcggaacatgcgcagtccaacgtcgatttctgagcggcgaggattccgattccgccgctcattctgtg

SEQ ID NO: 124809 - DNA, 455 bp, Glycine max
  Clone ID: PAT_MRT3847_83711C.1
tgaagagattttcatgggggtcaactggagctgatatcattgttgagtccaccggagtttttaccgataaggacaaggccgacgcacatttgaagggtggcgcgaagaacgatattatttctgacaccagtaaggatgcccccatgttatgatgttggagctaacgagcacgagtacaagccaaagcttgatattatttacaatgctagctgcacaaccaactgtactgctgcaattgctaaggttattaatgacaggtttggcatatgatgagggtatgatgaccactgataattccatcactgtcacccagaagactgatgatgggccatcaaccaaagactggataggtggaagagctgcttcatttaacatcattcctagcagtactggagctgtcaaggctgacggaaaagatcttcctgctatgaacggaaaattgactggtatggcat

SEQ ID NO: 124810 - DNA, 106 bp, Glycine max
  unsure (1)..(106): unsure at all n locations
  Clone ID: PAT_MRT3847_83712C.1
gntttctgtccttctattangaaatcnttaactccgcccagatccgggcangtaatcttgcccaaacaggcatttgatgaggccaatttcccgagcttgacacatt

SEQ ID NO: 124811 - DNA, 979 bp, Glycine max
  Clone ID: PAT_MRT3847_83713C.1
gggtctccgacgctggcatgcctaaaattctgattgctaatagttctatcttgaagaggaacttgtaaaaatgcctcatcccacgttatgagatcctaaagagtgtactttgtgaagatcgggaggttgttagagctttgagaaattccccgtttggttttaaatattgtgacttcttgacgaccttggttccaaacatctggttttatgaggaatctggtgtggcccatgactcaataaattacctgattgatgaatgctggggctttagcctccggggaccattccaaatttgtggaagctgttaacactgctaaggaaattgggtttaatcctttgaaaagaacttttgtcgtgggtgttgaagttcttgccattaagagcaaagcagtatgggaatcaaggtttgaggtttatgagaggtgtggctggaaccgcgaaatagctcttggagcagttcgaaagtttcccagtattgtgaagttgtcagaggaagtgtttataaaaaaaatgagtttcctagtgaaggatatgggttggtcatcagaagatattgctgaatatcctcaagttgtaacgtacaacttggagaagaggattatccctagattctcggtaatcaaaatgttgaaatcaaaaggtctgctcaagaaaaatttgcactttagttccattatttgcataaccgaggaaaagtttttggagaaatttgtcgtcaattttcagaaagatttgcctttcttaccagatgtctacaaaggtgtgatcaatcctccaaatgtattgtagtctttgaaggtttttactggttattgtcctaacttccaacttttttttttcaatgctaaattgaactttgattttagctgcttctttccgttttgtgtcagtagttttgagttttattttccttgggtggagaaacttttggtctgatttatagcatattgattttataatcaagtatattaatccattt

SEQ ID NO: 124812 - DNA, 380 bp, Glycine max
  Clone ID: PAT_MRT3847_83714C.1
ctagatcgcgagcggcccttagattgaaatggaggggttaatgaaatcactccagaagatctgagtggtttaaaaagaaaagtgaacggaaatgcactccgcgacatgtggcttgaagcacaacccattttacaaaacaatcctaacatgttacgcattccggtgactgctaataaagacgacacagctctcaatgtatcaatgagtggcaggagcactacttttgtggaagggttggttagccttatgagcccagaagacctgataataccaaggattagtcctatggatacgcacattggcggaccttggttggtgtgacacttacacttctcattttttaaaacttattaaatttataaataaaattttatattttt

SEQ ID NO: 124813 - DNA, 645 bp, Glycine max
  Clone ID: PAT_MRT3847_83715C.1
cacaaagaggggaaggggcagaagggccccgaaggagaaaacttcatcaacgaacgaagccaacaatcaacatcttagtctcagccacaccaattccgccctcatctgataagaattgcttgagatgcgtcttgagaaggagaagactgaagagctcgaaaaccgtgggcgtgagcaatagaagcttcagactgagctgaaacagttgaaggattttaaacctaccatgctattgagaaatgttataactttagtggggattgggtccgggttacactaatgaaagctgcgacctcattgtatctcatcaaaattgcttgaagaatgggaggcctgatagagagtttctgtattggaggtgggctccaagagattgtgatttgcctcagcttgatccagaaaggtttctctacatgatgtggagcaaagcctgggcactcgttggtgattccatttcactcaacaatgtgcaatcgctgctctgcattcttgccaagatcttgtttttttggttccaatgccaaatgctggaggggtgggttatttactttgaacaataaaatcaaggatctgttgctgttcaagtgagaaaggtggaacaacttggctcattctaccatggcgaggaatacaagtgcaaaagct

SEQ ID NO: 124814 - DNA, 264 bp, Glycine max
  Clone ID: PAT_MRT3847_83716C.1
acggaatgtacccccaatcgggcggtaaattccgcccaaagctaaatcctggcgagaaaccgatagcgatcaagtaccaccatggagatgaggtgtcaaatgataacgcacagcatcacatctggagcctatggaaatgcgtggctgcttcatagtctctgggcacgttggcgccgtttaagacaccacaattcctgttctatgcctacctcgcgagtgcaaataacaaaccatccaaacctaaacttgagctgggactgtttc

SEQ ID NO: 124815 - DNA, 467 bp, Glycine max
  unsure (1)..(467): unsure at all n locations
  Clone ID: PAT_MRT3847_83717C.1
acgagaaaagattatcataggtttttttatgtaaaattaatatatatattcctatttctctattttaaaaaattcaattacaattttaattaattattacgcaataatgaatttttttgtaaaaattactaatattccaacacactactcccaacgatacagaacccaaccatatccgacctctcgattgttataaaaataaaataaaataaaataaaaggaataaataagaataagaggtaaagtcttatactaaataacaaaatcacattagtaaattaacttcaaaatataacaaaacatggattaacaatgcaatataacatacaattagcataaagaaaataatgttaagggataaattttaaataacctgngtcaaaacacgcaaatgttatccttagagagagaatatcctcactgcattggtagaaaaaaatcagattatgctctattccaaagatacg

SEQ ID NO: 124816 - DNA, 1415 bp, Glycine max
  Clone ID: PAT_MRT3847_83718C.1
ctaggcacaagcaagaaattgtgaggctgctgaaagaggaaggggaagtggtagccatgactggggatggtgttaatgatgctcctgccttgaagcttgcagacattggtattgcaatgggcattgcagggacagaggtggcaaaggaagcttcagatatggtgttggcagatgataattttagttcaattgttgctgctgttggtgagggtagatctatctacaataatatgaaggcctttatcaggtatatgatctcttccaatattggcgaggttgcttctatatttttaacagctgcatactcttttccttaacactcgacacctgtccagcttctgtgggtcaatctcgcaactgatggaccccctgcaacagctttgggatttaatcctccagataaggatataatgaaaaagcctcctcgtcacagtgatgactcattaattaatttgtggattttattccgctatctggttattgggatttatgttggattagctacagttggtatcttcatcatatggtatacacatggttccttctttggtattgaccttagtggggatggacatagtcttgtgacttacacccaacttgccaactggggtcaatgctcctcatggcagaacttcactgcttctccattcactgctggtgctaaaactatcacgtttgataacccctgtgattacttttcaactggtaaagtgaaagctatgacactgtcactttctgtgttggtagccattgaaatgttcaactctctcaatgccctatctgaagatggaagccttttgacaatgcccccttgggtcaacccttggcttcttttggcaatgtcagtatcatttggtctgcactttttgatcttgtacgtgccattcttagcccaagtatttggtatcgtgcctctgagcttcaacgagtggcttttggttttggttgttgcacttccggtcattctaattgacgagattctgaaatttgtggggaggtgtacaagttctcgagcatcaagtgcaagaaaatcaaagcaaaaatcagagtagacggtttactgtagtcattagaaaagttgctcaatccttcagcgacatgaacgatattatattagagactgaagaggtggcatcaacgccaattaatcttaagttagtgctattttaggcctttctgtagtcttccatcccattttataattagggatggccgggcttgcattgggtgcactatatgttgcttttttttaatctcttattatccttttgcccctgttctttgaacaattttaagattttcacaaaaaaaagggaaaaaccttcaaatttgtcttcctgaaaaccaaccagcttctatattcttgtttgtgtttgctcagacacagaaggtgggaattttattaatcctaattg

SEQ ID NO: 124817 - DNA, 249 bp, Glycine max
  Clone ID: PAT_MRT3847_83719C.1
aatcggaactatttgactttttgttacaagacaagtagttttgaccgggactttaatggctacaggacaggtagtattgtccaaaattaagtacacattaattacacacagacggttttttgaccgaaaatagattaatctaaacagataccaaaacaatcatcttcgttttggtaaaagggatcttcttcttcttctacttcagcagaacttgtttcttccttctttaaggatgaaccttcttcttcc

SEQ ID NO: 124818 - DNA, 916 bp, Glycine max
  Clone ID: PAT_MRT3847_8371C.1
ggaacagaaatcgcatataaaatgcgaaaagaaatgaattcaatgttcggagatctgcacaggatctctctccgtgtccgttgaactttctttacgccctcctcgtaacataaaaattcagatcccgccaactctgaagacctctattctctttccctcccctttccactttcccgagaaaaataaacttttccgtcaattttctctccacggtttccttcttcctcacaatggctccgaacttcgacaatcgaagattcgttctcgctacttcgcattttccttctgctctcctatgcggcaacctctaaacgaccttggctcaagattctctggggcagaacccccccccaaattcccgccgaatctggtgggaaatagttcgccgcgccaaatccccctcgactggcatagagaatgattcgatcctttctcttggcttggactccaccggtcctggactcttcgacgcatttttcgcgagtttttcgatgatccttgtcagtgagattggggatgagacgtttataatagcagctctcatggctatgcgtcaccctaagtcaattgtcttgtctggtgcgctcagtgctctgattataatgacagtactttctacagggcttggcaggattgtgcctaatttgatttctaggaagcatacaaatagtgctgctacagttctttatgctttctttgggttaaggttactgtacattgcatggagatcatcagattcaaaatcctcacagaagaaagaaatggaagaagttgaagaaaaactggatggtggacaagggaaaacttcagttaggcgcttcttttcaagattttgtacaccaatatttttggagtcttttattttaacattccttgctgagtggggtgaccgtagccagatagcgacaattgcact

SEQ ID NO: 124819 - DNA, 415 bp, Glycine max
  Clone ID: PAT_MRT3847_83720C.1
cgagtcatgatttggctctctgctcttggcggcgcaggccccatctcctccaccggcagtgccatcgccaccgtcacagtcgccggcaagcagtttaagctgtataaaggccccaacggacagatgaccgttttctcgtttgttgctgtcagcccgatcaacagcttcaacggcgatctgaatgcgttcttagtataccttcgtagcagccagggcctgcccgccagccagatcctccagtctgtcggtgcaggtactgagccgttctctgggtccaacgcagtccttacaaccaccgcattcactctgtctgagaaataagcgagcgcagcgagtgctgtcgacacggttgtcgcgctttgattctttgtatatatttgccttggtacatatcatgaacgatatctgttttctc

SEQ ID NO: 124820 - DNA, 888 bp, Glycine max
  Clone ID: PAT_MRT3847_83721C.1
gagaagacgacagaagggatttgttatctattttatatatttatatatacgtatctcaaataaaaaaatattgttgaagtttttgctcaaaacatttttccgatgcattcaacattgatatgtcacaaccacaactcagcttttataatatgtatacatttgtgtttttaaattgtgacaaacaacagtcatttcattagtgctttttttaacagaattaattttaaatccttaaatataattagaagtgtaattacattaatttcaactataaattttatattaaaatatgtgttacgaactttaaaattgatctcatatactataaaccaagcgtatagtaagcttcacccacatgaaaaactacaatactaataacaatacgatccagttgaatatatatgctggaattcatgattttaatctttatcctgttgaatgtagattgtgaaaagaaaaagggtgattataatatgtgtttacaaggcacttttatccgagttaatgacgccttccataatcatatctcaaccttttaaacccatgcatcatacctcataattatttagctagctagaaaaaatagaaccattgattatagcactggaggcagcagtaattgtaagcatctactatatagtaaatcgcaattttctatccccaattccacatacatatgttactaacacaagatgtaggcatgttactcaattaagaaatttggctttttgaaaaagaccatgcgtaggacctttatgatctacatatatattcaaggataagggtagggacgaacttgatccatgtcccccagtgcaccagagtaaagctaaaagtatatctgaattagctagccatgacgtctcctgcctatatgggattcccgcc

SEQ ID NO: 124821 - DNA, 359 bp, Glycine max
  unsure (1)..(359): unsure at all n locations
  Clone ID: PAT_MRT3847_83722C.1
cttcgccgctgtgntcaccgccgcgatggcgtngcngcncacanacgccgacgacatcntngatccgtcangnntgtgcctagatgttggacgnaancnggnaangangacnacnctggctgnacgccgagcaaccacttcgcgagcttcaagggccaagttcgccaagacctacgccancaaggaggagcacganatcgcttcggcgtcttcaagtccaacctccgcagagccaggctgtacgccaagctcgaccccnccgccgtccacggcgtcaccaaattctccgatntaatccggccgagttccgccgccagttcctcggntcnaagccgctcngcttcncggcgcacgcccag

SEQ ID NO: 124822 - DNA, 197 bp, Glycine max
  Clone ID: PAT_MRT3847_83723C.1
cccacgcttttgtatttatttcaacaagaccccgaactccaagcttggtggaaagaacttgtccaagtgggtcatggtgatctgaaagataagccatgggggcaactgaggctaatcaacctcttgtttgtgacaatggaacaagaatggttaaagctggatttgctggagatgatgccccacgtgctgtgtttccc

SEQ ID NO: 124823 - DNA, 1968 bp, Glycine max
  Clone ID: PAT_MRT3847_83724C.1
cctagccccgtgcctattttaccttatgcagggtggagatgttccagaatcgttctgtagcggagtgaggacccttttgggttttgccagccccccctttggcaaacaaaccgtgtgcaaatgttttcagcaagctgttaataactatggcctcaacggcgaatacgctcaggccctccccgcccgctgcaatgtcagggtccctttcaagatcagccggtccccccactggggctccctcaagttttaaagggggggggagctttgcccattttttccccgggataatgaggccccgtttgctgtaacccttgttttcgttttccttaaaataaaagaaagcgggtgtggctcgggttcccctcatgggggccggtttttgttttagtttttgtttcagaaactctctagtttttgttggtccggggggaaagacagctaactactagtgactataatcgatcaattttcaattttcaattgtgcccatcttcgttgctgccaccatgcataggatcaacaccgcgcggtaagacgatagcgggggaccacattccaaaacacaaacacatacattgtagtatcacttttgtctcggaatttgttcttttgagttatggcaagcttaaaggttgcatgtgtggttttgatgtgcatggctgtgatgagtgcaccaatgatggtgcaagccgtgtcatgcaatgatgtttctgtgaacctagcaccgtgcctatcttacctgatgcagggtggagatgttccagaatcgtgctgtagcggagtgaggaacattctgggttctgccagcaccacctttgacaaacaaaccgtgtgcaaatgtcttcagcaagctgctaataactatggcatcaacgacgaatacgctcaggcactccccgcccgctgcaatgtcagcgtcccttacaagatcagccgatccaccaactgcgactccatcaagttctaaaggagcgggtagctttgccaatttcttccgcgggataatgaggcaacgtatgctgtaacacttgttatcgttatcattaaaataaaagaaagcgagtgtgactcgggttccactcatgtgagcctgttattgtattagtttctgtttcagatactctctagtctttgttgtttcggtgtgattaaatgtatcttagttgattgttgctcgcaacaattaatcacgtatttgatataataattccaagctactttgattgttgcatatatgtcatgatgtctgggctggatctggagagacttgttttggcagctggtcctcttggtattatgcaggcatgtcttgatgtcgtccttccttatgttcgacaacgagagcagtttggtcgtcctattggggagtttcagtttatacaggggaaaattgctgacatgtatacttcattacagtcttctaggtcttatgtgtattcagtagctcgggattgtgacaacggaaaagttgacccaaaggattgtgctggagctatactttgtgcagctgaaagagcaacccaggttgctttgcaggcaatacaatgtttaggtgggaatggttatgtgaatgagtatcctactggtcgtctcttgagagatgccaaactctacgagattggtgcaggaactagtgagatcagaagaatgattattggacgtgaactcttcaaggagcaataacatgccaccataccttacatattggatggtgctgagccacttggggaattcccttgcagatgtttgtgaaacaaatgctacattcatcaaacgagaattgatcattggtccaaggaataaaattctgccatattacatttttatatactttgaaaatcttcaaagcgatcatccatcttagaaaacaatgttgtaaaactatcaacagcagttgacacagataataataacttaagtatcttaatcaaataattcaagattcaaatcttatttgaaaaatactcg

SEQ ID NO: 124824 - DNA, 243 bp, Glycine max
  Clone ID: PAT_MRT3847_83725C.1
gttcacaatcttgctcgatttatttcagtcatgcagtttcatcctttatcttggcgaacttcccactcttatgttatggtagatcgttttgaagacatcactcctcctgaaaaagtgcacgcaaataataaatgtgacagaaaagtcactctttatggttatcttagaggctgtaatttgaaaatgggcaataaggtgcacatagcaggagtgggtgattatcatgtagctggtattactgct

SEQ ID NO: 124825 - DNA, 283 bp, Glycine max
  Clone ID: PAT_MRT3847_83726C.1
ctctgtaccactgttccgctgcatactgagttatggatcctcgtatgctcttatcatctgggcaacgaccattcctgcgaccatgtctgccgagaattacaagttccgaccgcctaccggctattgtgaggcccaaactttccaactacgctcttgtgcgatcgcctttacataaattacctgggactggggtcttctaacaaatactatgcggtaaaggtctagcatcagagctgacaagcattggaatgggcttggaccagccaattgggggggtgcgtcc

SEQ ID NO: 124826 - DNA, 624 bp, Glycine max
  Clone ID: PAT_MRT3847_83727C.1
agaattctaaccaacgaagactagtaagtttattcttcaccattggatttttagtctaagaatctcctttcctttctcttttctccccctagttttcctcatctcacacatatatatatctgtacaccaagatatttactcaacagatatcatctaattctggaacaaaacacctgtttcagttttaacaggctctagatggtattggtagctagagaagccatagtgaaacacttcttctgtcctaggaatcctgcatagagaggttgttcaacaaaacaatttcttaacttgtcagcaaaatgaggttgcacttgatttggctcactgtgattcattcccatttaggtctgctcgcggaaggtaagagaccgcgatagagccgcagggttggcctgcaacaccggcgatgatgcttcaaccatttgatgattgatatcatttcccttggatgatggaaaagccttgaaaaggcctccggaactggccttgtcatcattcttgatccctagttttgaccacatggaaatggaactctttgcagcttctctagggtcatcaattctaagtgtcttggggatcaaggcattgtgttctgagctgttgtgctccatgtcatgcatt

SEQ ID NO: 124827 - DNA, 974 bp, Glycine max
  Clone ID: PAT_MRT3847_83728C.1
ggattttgttgcagagttttttttgcatcctaacttccacctaacagttattgcactgctccaccgagctctcacatgctttgctttcagtccacagcttcactgcatcgtgcctctttttttcaattgttgtttattaagctttgatttgttgattcattcgtttagaatttgagttgaggctgaattggggttgtgcaattgtgtataaagttttttttttttatttgattaattcgctttgatgcttacaaattaaagttgctgttttgaaatatgatatttttgaatgaggaagtttggttttgattttattttaattggtggaagagaacccaagagcagagaagaatcagagaatggcaactatgactggtgtgagcctttcatgccccagggttttcttcaacgcatcaggctcaccgcaaaacgcgcatgctcagtattgtattttgtccagcagattctatgacttgacaggactgcagaatggaattctgaagcgagggagagagattttcctcactggttgctacctccgaactcccactggaggttctggacattcacgtcttttgccaacagagtatcttgtgattctattggatgaagtaatggtcaaagattttttaattttaaatttgtccactgtgaagtttaattgggctaacaagaggagtgagtgagtaggctcaacatacataaatgcctgttaggaagtcaagcccaatgattcaatttaatgagagggacctctgagtatcttttttcttatcacgtcaatcatcttgttttatattctctcttttcatctttctttattgcataacatttatcacgaaatttttgtaccaatacaatttctcttctaattttttttaattaaataacttttatacttttgatacaatattttttaaaaataaaaacttgatatttttgtatttttaacatgtgttgatgatccatgagta

SEQ ID NO: 124828 - DNA, 157 bp, Glycine max
  Clone ID: PAT_MRT3847_83729C.1
atcatatgtactctttattttttggtgggatcaacgtcaacacccataggggggtaatgctatttaatgcgggttccatattccctacaattaggtgataaagttgcaggataccaacctgtatgtatcatatgaatataaatataattaacatatt

SEQ ID NO: 124829 - DNA, 364 bp, Glycine max
  Clone ID: PAT_MRT3847_8372C.1
aacagaccttttgaatcaataaatcataggtagaaatatcgccaacattgcctgttagatcaccgatgggaactattacaactaactgcaatacagatccaacgaattataggcctatgataccaaaaaccgagattttgattattcgaaggaattacttttgccttggattccaaagatgctctaggaaatggggatagcacctcataggaataattatgtcaatgcaataaaagttgctaaccaatctcctcagtttgaagcccgaaggaagaaaattttatccatgaaaaaaatggtggagacgaacattacaggaccccagaataggacaaatgtaaaaattggaacccacggagacatt

SEQ ID NO: 124830 - DNA, 312 bp, Glycine max
  unsure (1)..(312): unsure at all n locations
  Clone ID: PAT_MRT3847_83730C.1
gncgcatgctcgcgtgcgnacagctcggcgnncggctcgngctttgcctcgntntganagcttttcccaannnagangtgaggtctcntnnagtcctttngaacgnttttgtttctcttnttggnngcctnntgcatntcaggcnnaggttttntggtnatctgggntttncngttccttttgtgcctnccanctttctcattaactgcgtggnttgtcacaggctaagtgtganggcggnngtggntgtccctggtcatgcagcntcatggggtgttgggtgtcctgatctttggccancaccctcctgtt

SEQ ID NO: 124831 - DNA, 256 bp, Glycine max
  Clone ID: PAT_MRT3847_83731C.1
atgtattttttagctattattggatttaaaattgaaggtcaacttcaattattaaaataaattttaaaccaaaaataatataaaatagcatttatgatagtgtccttaattaaggttgttccattttttgtgtaaaaatatatatcagacatgacaaaacagcaagcacattttggaggagctgaagcataccatgtgtggttaataaaacttattgaaaaagcagctaaaaaacatgtgccctgccttataatat

SEQ ID NO: 124832 - DNA, 1336 bp, Glycine max
  Clone ID: PAT_MRT3847_83732C.1
cccacgcgtccgcccacgcgttcgggctgcgagaagacgacagaagggggtatgaattgggttgggtactatattactactctagtgcctgcaatttctctctaaaaccctaaacctcattctcctgatttctgttacattgagtttaggaaacaaaaaacaacacagtcaattggcaaatgtctaactctaacccgttacccctcaagagacaaggagaacaatcgtccgatgatggcgcctctgccattaaaccttctcgcctcaaaatcgcaataccctctgaggattccgacaagaagaatgcgaacaggaggctcaaagatgttgaaatctgtgtcccaatagtgtatgggaccattgcattctatcttggaaggaaggccagtgagtctcagtcacataagtggacagtgtatgtacgtggagcgtcgaatgaagatcttggggtggtggttaaaagggtcgtgtttcagttgcatcctagttttaataaccccactagagttgttgaatcacccccttttgagttatcagaatgcggttggggtgaatttgaaatagccatcaccctctatttccaccctgatgtctgtgaaaaacagctggacttgtatcaccatttgaaattatatccagaagatgaatctggcccccagtctatgaagaaacctgaagttgttgaatcttataacgtgaatgttttacctgaaccctcgtagggttttcgcgcacgtgtcactgaatcatcctgctgttaatgtgcctaggcttcctgctggtttgaataagcaaagtcctgtaccaattgatactgtgaatgataaggagataggtgacacctaagatcatcctctaacccaatggttcatgaacttctctgaggctgatgagctcttaaaacttgcagcagctcgccagcaggtgcaagctcatattgttaagctgcgaagacaattaagtttggtggaaggactacctcagctgtctaaaccgccctctggttatgaatgcacatgattcttatttttaaatcttttgggcttcccttttgggtcaaacttggaagattcattatgaacaagtatgtatatatgcgtatagtcatccttgtagattgtgttgcttatttttatctatggcagccaaaagattagaggtttgaactttgaagaatggacatgatcctgggcaaatactagttgtaacctgaggagtataatattttatctcaaacttatctaaatccctgttgctttaacagtttaatcatttaacaaccgaacttcgattattctataaggcatccaaagcttacgttacggcgttgcatgcg

SEQ ID NO: 124833 - DNA, 524 bp, Glycine max
  Clone ID: PAT_MRT3847_83733C.1
acgagattgttttccttgaaccctcggaggttttttttgcacgtgtacagaatcatcctgctgttaatgtgcctaggcttcctgctggtttgaatttaccaagtcctgtaccaagcgatactgtgaatgataaggagagaggtgacaccaaagatcatcttctaacccaatggttcttgaacttctctgaggctgatgagctcttaaaacttgcagcagctcgccagcaggtgcaagctcatattgttaagctgcgaagacaattaagtttggtggaaggactgcctcagctgtttaaaccgccatctggttatgaatgtacatgatttttattttattttattttaaaatgaaattttttgggcttcccttttgagtcaaacttggaagattcatgatgaacaattatgtatatatgcttccttgtagattgtgttgcttatttttatctgtagtagccaaaagattagaggtttgaagaatggacatgattctgggcatttatgcttaaaatcttatttggt

SEQ ID NO: 124834 - DNA, 193 bp, Glycine max
  Clone ID: PAT_MRT3847_83734C.1
gcatgaagctgtcctataacgcttctggactgtggatgtcttgggataagagtgacattgatcgtgtggagcaagccattatcatagcgctgtttgccgtggctgaatctaagtgggtgagccagcgcgctctttaggtcgcaacctccaattagggctctccagagctgtttgattattgccctggagaact

SEQ ID NO: 124835 - DNA, 361 bp, Glycine max
  Clone ID: PAT_MRT3847_83735C.1
atccaatcgcaacggtgtcgcttggctctcacacccataccctatctgccgaccgtggtccactatcgtatccgccctgacaggaggaaagtccacgaccgtatctaagagctccgatccctaacttgctgtgaatgacaagggagccgccacctaggcttggaaacctgccggcacagagaacgctatgattgaccgtgtcaagccataaaggccgacaagagctggcatcagaatcatggaacactgcaggaaggcattacacaatgaacatcctgaagacaaagcagagtttcctgctggcaaatctgctgaagcaacatgtaagaccatgtatgatgctgaagaagcaccttatgtg

SEQ ID NO: 124836 - DNA, 376 bp, Glycine max
  Clone ID: PAT_MRT3847_83736C.1
ggggggaaaaaaacagtaatcatgggggccttacacaagaaatagaaaacatcaacttacttttcagttactaatttgaaaaaaatgtagttgaatgtcaccctcaagagttaaaaagaataagaaaacaagggtcaaataactatcaccgccagattttcagtatgggatgtttggttcaacgttactttcacaaaaatcaattcacttttatgcgttgataatgagggaacttcctggaacgttaacttttacacatttttcatgggcattctttggtttcaaagcaaaacgctttggggcctatactaaaatttcggcttcaggacgggtaaaagggccaaatgaaacaactggttattttaaccccaccaaa

SEQ ID NO: 124837 - DNA, 410 bp, Glycine max
  Clone ID: PAT_MRT3847_83737C.1
actagcacatattgtttaatctcactacatcaaaaaacccaacgggacaatacaaacaacaggagaaggatatcagattacagagatagctgcttgtgcttatagccagctgaataatgggataatacaaatgtttgctaccaaaactactgcaaactatgatgctgaccacaggccaaatcctgcctctatgacagcgttatcattatatatatattgggcaaaccatgcctaacggaacatttgatctacgcaatcagtaccttgttataccgtctccgtgcggtatcacatccttgaaggatccattactgggaatcatcggcaacacatgctcctgacgtggcacactgacatcaagaaggtatgggccacgggaagccaacatttgacgaatttctgctctaagc

SEQ ID NO: 124838 - DNA, 269 bp, Glycine max
  Clone ID: PAT_MRT3847_83738C.1
aacacgcttatctcttgcatattagaacatactcatcttatatattaacaaattcaaagtgcaaacaccctttcattttatttcatagaaatctccaattttttttgataaagcatagtcctcattctatactatagctacacaatcttccgaatcttcgattaaaccgtgttttttttaacggttgagaaaaatagcaagacatggctgaaaatacccaagtttatgaacgaactctggaggaaacaccaacctgggctgttgcggtg

SEQ ID NO: 124839 - DNA, 295 bp, Glycine max
  Clone ID: PAT_MRT3847_83739C.1
gcgacgcgttccttcctccggtgcgagaagacacaaaaggggaggcccggtttggtcatactgagtcaagcacatcgggagcaaaagtcccaacccttccatctttcccacattaacccccctgacccaaccccattcaaaccccactttactattctcccccttttcagcaaccttcccatcacagtgaatgaactcttttttcggctcaaccaactttggaaacctctttttgggcaagaaccttttagaccttaattccctttcttaacgccggatcttcgttttcttatcc

SEQ ID NO: 124840 - DNA, 183 bp, Glycine max
  Clone ID: PAT_MRT3847_8373C.1
caaagtagttttatttttttggaaccaaaggaggcccaattttttgaaaaccagggctttagaaaattgttaagggaaagcaatattataaatgtcatggagaggaataggaacctattaaagtggtcctttaaggaagggagctaagttaaacaaaaaaaacgggagcccaattcccaaaaa

SEQ ID NO: 124841 - DNA, 237 bp, Glycine max
  Clone ID: PAT_MRT3847_83740C.1
aacgcttgacttgattgaataaattatgcgggcataaaggccaacaagtgtacatgatcagggctatatattgccaaagacgatattaaacaatcacagttgcacatcaccctgtatacgacttatactaaagctctcactctcaacgaggattcactagatgcaatgtcaatacctgccgacaaattagactccacatctgagtgcagcacaactggtacatgtcaataggataat

SEQ ID NO: 124842 - DNA, 356 bp, Glycine max
  Clone ID: PAT_MRT3847_83741C.1
atgatattgtctcgggaacacatcatgaatatgaaattgctggtaaggctcttctgccagctccctctgtgacacatgctactggcaaaccttattaaaatgcggattcctttgcgtgaactgtaatatgggaactctttcgcttgaacggtcgcttgattaaataaaagcaactaaacgtgaccgtcttgtcgagaatactctgactatatgataattctcacaactatctcaattgtcggaacgatgcgtgatatgggtctattgtcaaattttttgacagagggcaattttagagcaagtgttgatttgcagcgcactcatcgtattagaggaatgattaaaatggtggccac

SEQ ID NO: 124843 - DNA, 1626 bp, Glycine max
  Clone ID: PAT_MRT3847_83742C.1
gaagccagttccgcaaaaaactttccaacaatccatccttgaacgtgcctttagatctgcaaacttcagcttagagcaaaacaataaataaaaaatccaccttttctatcaacctctagctatatccatttttatccaaatgacagaaaaactttccaacaatccatccttgaacgtgcctttactatccgagtggaatcaccatgatgaggagaaagccatagcctctcatccttctaccaaaaatactgtgtccttctttcgcacatgccttaatggactcaatgcaatatcaggtgttggaatactgtcagttccatatgctcttgcatctggagggtggttaagcttggttcttctatttgctattgccgctgcagcattttacacaggcacgttgattaaaagatgtatggacaagaattcgaacattaaaacctacccagatataggtgagcttgcatttggaaagataggaaggctaataatatcagtgtccatgtacacggagctctacttggtttcaatagggttcttgattctggaaggcgataacttgaataacttgtgccccattgaagaggttcagatagctggcttcgtaattggtgggaagcaactgtttgtgatattggttgcccttatcatcttgcccacagtttggttggacaacttgagtatgctttcttatgtatctgcaagtggagtgtttgcttctgctgtaatcatcctatcaatatcatggactggaacatttgatggagttggttttcatcaaaagggaactcttgttaattggcgcggaatccccacagctgttagcttgtatgccttttgctattgtgcacatcccgtcttccccaccttgtacaattccatgactaacaaacatcagttctctaatgtcctattagtatgctttctgttaaccactgtgggttatgcatccatggctataattggttatctaatgtttggtgctgacgttgaatcacaagtaacattaaacctgccactgaacaaagtaagctcaaaattagcaatatatacaaccttggtcaatcccatatccaagttcgctttgatggcaacaccaattaccaatgcgttgaaagatttacttccaagggcgtacaagaatagagcgaccaacatcttagtcagcactgtcttggtaataagcgctaccattgttgccctcagtgttcctttctttggggatctcatgtctctggttggagcgtttttaagtgtcacagcttctattctgcttccatgcttgtgttacttgaagatttcaggcacttacaatgaatttgggtgtgagaccatagccatagtgacaataatagtagcagctatagcaatgggaatatctggaacatatacctctgtcatggaaatagtacatcatttgtaatagacaatgcagtggtccattctattgactgtaaatttcctcaaaaaaggattttttttttttctttctcatgtgactgtatgtcttacgaggaaaaggagaggtaaatactgatgaagaagtaagatatggttggtgaaaaagaggaaaagaaaaatatatgatacagatcatatatgctatcctatatctagagagagaaagaa

SEQ ID NO: 124844 - DNA, 237 bp, Glycine max
  unsure (1)..(237): unsure at all n locations
  Clone ID: PAT_MRT3847_83743C.1
tccggagagggtgataggntcgccaacgtttctcggaaattggcttgcgatgatgtttgtgaggagtatcttcaccccccggctatctgcacccagttgctcttgccaggatgagatacgctgcgacagcttttagaccttttttttttttcctcttcttcccccactccgactaagaagccttactatgaccaggtctttgaaggcacccttgcggctactccattactttgccaa

SEQ ID NO: 124845 - DNA, 782 bp, Glycine max
  Clone ID: PAT_MRT3847_83744C.1
ggaattcggctcgagtagagcttcttggggggaaagcaggggtttcatgtggtagttatcattacggcagtgcttttggtgttagatttggtcatgctgacaaggttgaaaccataagtgaaactcttgtgagtaaaggcttcaactacagtgggaaagatttcatttattcaggtgcttgataagatgcatgctcgtggtagtggccctcgtgtcatgttaactagacagcctacagaagggagagctagaaatggaggtcttcgtgttggagaaatggaacgtgattgcttgattgcatatggtgctagtatgttaatttatgagcgactcatgttgtctagtgatccttttgaagttcaggtatgtaccgcatgtgggttgttaggatattacaaccataagctgaaaactggtatttgttcatcttgtaagaatggagacaatatttctaccatgaagctaccatatgcatgcaagctcatgattcaggaactccaatcaatgaatattgttccccgcttaaaactggcagatgcgtgagtttaattgatgatccaattctgggaaatgcatatgctactgtttggtcaattacaaggcagaaaaattgccattggccactgttgatgaatttctactgattctttgtatattagcctcttcaattttgctcaaccctccccctccttttcacctccttaaaaaaaattgtaaaacttagggactgtttgtttcttttttattattattattattagaaaaaactattttgtaaaact

SEQ ID NO: 124846 - DNA, 270 bp, Glycine max
  Clone ID: PAT_MRT3847_83745C.1
cttaaagggggggttttttttgatgccaatcaattctacacaaggaccacaactagcaaactgcttcagacaagaggaaccggcgtacaagcaaaggcacaccaacagaaccacgacaagcctaagagaggaagaaaaacaacagcaaaaaaggaaaaacatgaaaagcaatgaaatgccaagagacccgccaactgacccatagagtcccaacagcatggcttctgaaagaagaatccagcaaggcttaatttcaaaacctatgctcag

SEQ ID NO: 124847 - DNA, 1232 bp, Glycine max
  Clone ID: PAT_MRT3847_83746C.1
acgacccacgcgtcctagagcatacacgtacgaaaaaaacggtttcatcagcaaattttcattacggtgcatatcgggccaatgcacaatcattcaagggtaatggaggagaagtagttgatagggtggttctatgctcggataaggataataacatgtgtatcaaatttctaattcgtcacactcgtagacctgagcttggtgataagtttagcagcattcatgggcaaaaaggtgtttggggaactattgtcccgcaagaagactttccgttttctgagaaaggcatttgtcctgatctgattatgaatcctcatggtttcccaagtcgaatgactgttggaaagatgatagagcttcttggggggaaagcaggggtttcatgtggtaggtttcattacggcagtgcttttggggagagaagtggtcatgctgacaaggttgaaaccataagtgaaactcttgtgagtaaaggcttcaactacagtgggaaagatttcatttattcaggtattacgggttgcccactgcaagcatatattttcatgggtccaatttactaccagaaattaaaacatatggtgcttgataagatgcatgctcgtggtagtggccctcgtgtcatgttaactagacagcctacagaagggagagctagaaatggaggtcttcgtgttggagaaatggaacgtgattgcttgattgcatatggtgctagtatgttaatttatgagcgactcatgttgtctagtgatccttttgaagttcaggtatgtaccgcatgtgggttgttaggatattacaaccataagctgaaaactggtatttgttcatcttgtaagaatggagacaatatttctaccatgaagctaccatatgcatgcaagctcatgattcaggaactccaatcaatgaatattgttccccgcttaaaactggcagatgcgtgagtttaattgatgatccagttctgggcaattataaggcagaaaaaatgccattgggcactgttcatgaatttctgctgattctttgtatattagcctcttcaattttgctcaaccctccccccctccttttcacctcctgaaaaaaaatgtaaagcttagggactgttcgtttctcttagtgtttttttttcttaaaattaaaaactgtcctgtaaaactttttctactgttcaactgtcaatttctatttaaaaattgattaagctttgataaaattgaaaa

SEQ ID NO: 124848 - DNA, 233 bp, Glycine max
  unsure (1)..(233): unsure at all n locations
  Clone ID: PAT_MRT3847_83747C.1
ttcaaggccgtncatcgcatctcaccgtattgctgatgatctctggtcaagcgtccgtacatcaatggtgtgtgcatgagatgattgtgccccggattcggaggaacccaacccgatccgaatttaactctcaaggttcatcggagggggggcaagttatattagaaaggaatatgttgtaatcgggctgattttctctccggtaggtattgcgctggactggacagaagggc

SEQ ID NO: 124849 - DNA, 1287 bp, Glycine max
  Clone ID: PAT_MRT3847_83748C.1
gtacggctgcgagaagacgacagaaggggacaacaaaaaatttctttagttcactatatccatggcaatgtcttaccaaattagaaattctggtgtcttctttttcctttgtgttcttctctttggtgtgtctgctctgggtcgaccagccacttttctgcaagactttcatgtcacgtggtctgactcccacatcaagcaacttgatcaaggcagggcaatccaactcagacttgaccaaagctctggatgtggatttgcttccaaggtgaagtacatgttcgggcgtgttagcatgaagatcaaactcgtccccggagactctgctggcacggtcactgcattttatttgaactctgacacgaactacgttcgcgacgagcttgatttcgagttcttgggcaaccgtactgggcaaccttacacagttcaaacaaacatctacgctcatggaaagggtgacagagaacagagggtcaacctctggtttgaccctgctgcagacttccacacctattcaattctctggaaccatcaccatattgtattctacgtggatgattttccaatcagagtatacaaaaacaacgaggctcgggggattccatacccaaagatgcaggcaatgggagtgtattcgacattgtgggaagcagattactgggccaaaaagggttgaattgagaaaatagattggagcaaagcaccattctacgcttactacaaggacttcgacattgaaggatgtgcaatgccaggacctgcaaactgtgcctccaacccaagtaactggtgggaaggggctgcataccaagcccttaactccattgaagcaagaaggtacaggtgggttcgtgtgaaccatgtcatctatgactattgtaaggataagtcaaggttcccagtgaccccaccagagtgccttgctggcatttaattaaattaattttcggtggtttctcaacattcatgcatgcctcacttattttttggtggttttttttttttttggtcccttttttttcattcctctctctgtgttgggttgtgtacacattgtgcatataacaaattattcttgggtccgagctcgtacgttggacgaagcctatgttcgaatctgacggggcatttgttgtttgagtaaaaagaaaaaagaaaaacctcttcaggtcctctttctttgtattttagtgcgcgtatattggttgtgatataagaaagctttgtaattgtactcattattgggatgaaatgaaatgaaatatatagttattgtttaaaaaa

SEQ ID NO: 124850 - DNA, 581 bp, Glycine max
  Clone ID: PAT_MRT3847_83749C.1
attggagaaatagatggagcaaagcaccattctacgcttactacaaggacttcaacattgaaggatgtgcagtgccaggacctgcaaactgtgcctccaacccaagtaactggtgggaaggggcagcataccaagcccttaactccattgaagcaagaaggtacaggtgggttcgtctgaaccatgttatctatgactattgtaaggataagtcaaggttcccagtgaccccaccagagtgccttgctggcatttaatttaattaaattttcagtggttcacaacattcatgcatgcctcactaatacgtagtacatgtttgttattttgtttcttacactgttaatttgtttttgttgtgttatgtacacattgtgcatataacgaattattccatgggtccgagctcgtacgttggacgaagcctgtgtttgaatcagacggggcataggttgtttgagttaaaataaacctcttgtggccctctttctttgtattttagtgcgcgtatattggttgtgatataagaaagctttgtaatgtacccattattctgatgaaatgaaatgaaatttattgct

SEQ ID NO: 124851 - DNA, 265 bp, Glycine max
  Clone ID: PAT_MRT3847_8374C.1
agattctgctgcataggggcttgatatgaggggggtacaccactggcaaaccttgcagctgaaatgcccctgaattgaagtggctgttactgacatctctaaatccaggagcgcagcattgaacagcgaccagctacctatctatcacccaggccctgatgatgtgatgaagcaatgacctcgcacgaaccatttcttcgcactgatggtccaaacatgtctatgaggccaccgtaatgctcgtatccgttgacaccccgacaaa

SEQ ID NO: 124852 - DNA, 476 bp, Glycine max
  Clone ID: PAT_MRT3847_83750C.1
aagggcttctccaaattaaaaatctctttgttttgggcttttactgaaaatctaaaattttattttggagacctggaaaaaaccaaatatatgtcaccaatattctttgtgtgaattataatcaaataaatatattatattccgccgaggaaaacatcaggggattgaacaaattttaagtattggtttgaggaaacacaagccccatgttaactacagggcggtatttccttccgaatcatacagctcaaaaccttctgctgccaaaagcccggggaaggacctctttttttctttcccaaacttttctcgcataaaatatttttttttatataaagaggggggccttttaagggtattcgagtaatattcacgctgaaccccttttttctcttggccagaaacctccttgcttcttctgggacaaattctgaacgaaaaaagtgcacgcccccgaaagatttaactcccgctgt

SEQ ID NO: 124853 - DNA, 317 bp, Glycine max
  Clone ID: PAT_MRT3847_83751C.1
ataaaagagagagaactactcgaatataattgtatagccaaattaagttagagctacatctaactcttagccatgagattgtaaagaatggctttagagagaaaaactcacccacacatggaatggaagaatgttttttgcctgggtagcatcattagaggggtgaagatgatacataaacactacccgagcaaagatagagccattctctaaggtatagccattcgacttatctagcagagagccattcttgggctgcctataaatcaagaagaacaactgcaccaaattggctccattgcaaagtatctacttgt

SEQ ID NO: 124854 - DNA, 417 bp, Glycine max
  Clone ID: PAT_MRT3847_83752C.1
cgaggcggcggccgccctgggttggggggtcagggtctctagatttattaacccagggccgccggggggggcccaagggcgggatagaagcccacaaaaccaaccaaaaacaaccagaaaaagggggcaaaaacaagaaccccgggggcacgaaaccagaaaggaacccggacccaaaccacaacaaccaaaaaaaccgggcaagagcaaaaaccctaaaggaggacctcaagccctaggggcggcaagccgcatgaccaccaggaccaccccgagaggaaccacggggaggggcgcccgcataaccaccaacaccaccaccagcagaggcaccggggaaaccaccgggacggggacggggtccacccccggcaccgggaccgggactacgggcaccagaaccaccggggccaccaa

SEQ ID NO: 124855 - DNA, 628 bp, Glycine max
  Clone ID: PAT_MRT3847_83753C.1
aataataaaaaagaataatattttattaaaaataaaattgaccgtatataatagaccaaatcttacacagacacatttattcaagtggtgtacatttattcaagttgggttgatgggtcatatttagcatgacacaactattttttctcaatgtaggccatcagactttattcaacaagcatttgattggcgtgcatccttggaatcttatctaaaatgttcccaacgcatgtgcagatattttgataatctgactgtgattgtgacctttatttaggtttcaatatgcaaactcctcacaattaaatggaagctgggttggattcccattcctttgcaacaagacttctgagcttatttgttagtatctcaaaatcatcttggctcttaataagactgagacgcacgtaacgttcatctgcactaaagttacttcctttacggccaatgatgccagcagcttttagggtttcatagcaattcatgtcttggtgtctttcacactttaaccaagcgtacgctggtgaaggatctctgaccctcttgaaaaaggtacagtactggggagacaatttctggagagaaaatcggtttgaattatatatgaattggttcaaccttatccaac

SEQ ID NO: 124856 - DNA, 1094 bp, Glycine max
  Clone ID: PAT_MRT3847_83754C.1
ctcctttgattattcttgttgagaatgaagctgattgctactggtgctttgaccgtgcaatgcgaaggatgagagagaacttcaggagcagtgcaagttcaatgggggtccaatctcagctggctacactctcacagataatgaaaacagttgatccaaagcttcatcatcaccttgaggatttagatggaggagaatatctctttgcatttcgcatgcttatggttcttttccgaagagaattttcttttgcagatactttgtatctttgggagttgatgtgggccatggaatacaacccatacatcttcaccaaatatgaggatccagatcgtgcaaaaacaaaaggcccatcacctgcaacaaataacaaacatttgaagcaatacggaaaattcgagagaaaaaatgtgaagactgggcatactgaggaaaatagtgcactgtctgtttttcttgttgcaagtgttcttgagatcaagaataggcggattttaaacgaggccaagggcgtggacgatgttgtcaagatcttgggagacataacctcaaatcttgatgctaaaaaagcacttaatgaagcactgaaaattcagaaaaaatacctaagcaaggccaagaagggatgacaaagacaacaatagattttctgtaactatatgatggcagctgtgtttgcatgatcttctgaggtttcagttgctcttgacagatcattgttttctttctttcttttttagtcttagtgatggcaagcagtcccctgctctgcctgtgttaatcatttgaaaatcaaattataatcttatacttaggaaaaaaatacttcattattgatgtctggatatccagagaaccagaatacttcattttgtgggattctttgttggggggatttcatgttgtagaaatattttataggtaaggaagatcttttcttcctgaatgaggggacatttatgctatcaaatcaaaactgataaaattgtaacgtatatatttttaaccgaagtacagttaaaaattcagagtgatatatagtacatacacaattccacatttttcttaaaaaaaaaaggggggcccgccgatta

SEQ ID NO: 124857 - DNA, 295 bp, Glycine max
  Clone ID: PAT_MRT3847_83755C.1
tatgctgagcatacgcttcacgagaggactacgcgaactagcctacctggccggagcctcccatctagctcaggacgaagtaggcaatgcgtctcaagccagacgactttacagagacatcagcggactggttcatacgatctactatggtaacggagtcttagcgttcacgagacacctatatatgccggaattcactctgtgtaaagatcactgtatacggctgtgacgatcatgatcaggagctgatgacattgctattacatggctagaacgaacatgttctgcaaagctt

SEQ ID NO: 124858 - DNA, 614 bp, Glycine max
  Clone ID: PAT_MRT3847_83756C.1
ggattgtggctaaggctggggacactgttgaggtgcgtgatgggaaactactggtaaatggtgctgctgaagaacggcaatttgtagtagagcctctagcttatgagatggatccaatggttgtgccagaaggatatgtgtttgtaatgggagacaatcggaacaacagctttgattctcataactggtgatgaaggtttccagatacgttcatctattctaaattgacagtttctcccgtctttgcctgggaatgagctgttcggagattctcttagaagagccagcttgacctgactttgcatgcagtttgggatgaatatcttattcattgatacagatttgtcaatgacctaataatgccattatgcgttaatttgtgccatctgagatgtatttctattgctgaagtgcggggagaaaaaaagaataaaaaaaaaaatgatgattttacccctcaaaaatgaaacatgatgattgatttgttttgtattctttcatataagctccataatcaagcctcctcctgatttgaatctataatgccattcagtcatacatgaaattgtatgggcacgattattgttgcccatttttaaatcaagtaagaatgc

SEQ ID NO: 124859 - DNA, 694 bp, Glycine max
  Clone ID: PAT_MRT3847_83757C.1
cattgccaaccctttatttcccgccaattccctcaatccgttccaatccttcaacgccgccgtcgttctcggcgacgacgaagacgacgccgtccaagactccccttccccttcctccgtgcaaaaattctcccaagattcactcgacagcatttcctcttccttcggtttctcctccggcgctggtgtatcttctctcccatgaggtcgcggtagcctagcgctgagatcttctccagcgcggggaagccggagccgtccatcaccatggcgccgatgttcatgaccccgtggaacctccccgacgggcgccggatctggaaggcgctgaagcagggcgtggcgtcgtcggcgtcgggggagaacatgttgctgatgaggaagcgcacggtgccgacaaggtggtggcggaaggtgccgacggcgtagatggcgacgcagacgctggaggtgtcgccggcgagaaagtcctttgtgacgccgaagaggaacttgtcgttccaggtagggttgtggccgccgagcttgtcgacgcgtgttcggagcttggtggcggggtcgatccacgtgacggcgtaggtttggagcctccgccgtggagacgaaggcggcttcatgccctgcgcagagatcaagttgatctccaatacttggtgaatcttcgccgccgacggcattcccctcacctttcgta

SEQ ID NO: 124860 - DNA, 1543 bp, Glycine max
  Clone ID: PAT_MRT3847_83758C.1
ggattcagactctggaagcttcctttggccgtagaagaagacggtgtcgtttgagacttgggggagaggagaatgacagagttgagcagcagagaggtggaatacataaggagacaccacagcaaggcagcagaggacaatcagtgtgcctctgctctcgttaagcacataagggccccacttcctctcgtaattccctttgcatcattaagtaattaagtaattattatattattaattactttatgatttgtaggtgtggtcgttggtgaggagatttgatgagccgcagaagtataaaccgtttgtgagcaggtgcgtggtgaggggaaaccttgagattgggagtttgagagaggttgatgttaagtccggccttccagcgactactagtactgaaagattagagattcttgatgacaatcatcatatacttagcgtcaggattattggcggtgatcatagacttaggaactactcgtctatcatgtccctccacccagaaattgttgatggaaggccaggtaccctggtaattgaatcatttgtggtggacatacctgaaggcaacaccaaggatgagacctgctacttcgttgaagcattgatcaaatgcaatctcaaatcacttgctgatgtctcagaaggccttactttgcaggaccacactgaaccaattgatcgaaaatacgagttattgatcacaagaggctgagaatttggctgccatggatgaagctttcccaactttggaggcatagaagacggaatgccaaatggcaatggtgctttattctctgttatatatgattgcttttgctcgtttctctctttagtggtagttaaaaagaatagaatgttttagacaaatgtctgaatcagtgcaggaaaaggtgactgcatgttatgttctttctgtatataggtgttggtcaaagttggtccgtaaaattgtttccattggtcagtactcagttgtaatttctggttgcagtaaatttttagcaaataacagaggtttcttcttaaatgagtactattatattataaataatatctcgacagcttatgttcatggtttttgttttgcggtatgttcttttttgtatataggtggcggtggtggtgaaacttagtctgtaaaattattttgattggaaagctgtagtttctaattgcagtaaaaattgaaacttctagtggggattacttaattcttatcacggagttccagttgctttggttctttctttgttccttttccctttggtacatactcttgtttcttctcatggtttttgttttgcggaaatgacatacaacctagtggagacctgtagaagctcatacggaacccaagagaaagggaataaaagagggatagaaagaagtctcaagtttaaacttgtactctcgtattgcaaagtatgacactattccgaagatgtttcaatcgggagggatagaaagaataagtctcaagtttaaacttgtactatcttattgcaaagtatgaactattcctaaatgtttcaatcggact

SEQ ID NO: 124861 - DNA, 3060 bp, Glycine max
  Clone ID: PAT_MRT3847_83759C.1
aaggagggaaattgcattcttactttattattttaaaataggcaagtccatacaatttcatgtatgactgaatggcattacagacagattcaaaatgggaggaagcttgattatggaactcacagggagtcaattagctccatgtcaaatctttcctccagtttctagcattcatacgctatgcatacattaaagaatacaaaacaaatcaatcaccatgtttcatttttttttttgggggggggcaaaatcatcatgcttttttaattcttttttttctccccgcacttcagcaatagaaatacatctcagatggcactaatgaacgcttaatggtattattaggtcatcgacaaatttgtatcaatgaataagatattcatcccaaactgtgtgcaaagtcagctcaagctaacaatttagaacaaacgaccgtatctggaaaccttcatcaccttcacaaagctgcgggaatcatgtcaagaaattgccacaggtttgttaccaggggggagtttacgatgggtatcagtgtcagatgccttggatggaggccagtaccgaaacatggacctaccaacaatgttctcaaccggcaggggaccccagttatgagaatcaaagctttcccttccgcaacaccgtgttaaagagggaaattgcattcttacttgattttaaaatgggcaaccataatcgtgcccatacaatttcatgtatgactgaatggcattatagattcaaatcaggaggaggcttgattatggagcttatatgaaagaatacaaaacaaatcaatcatcatgtttcatttttgaggggtaaaatcatcattttttttttattctttttttctccccgcacttcagcaatagaaatacatctcagatggcacaaattaacgcataatggcattattaggtcattgacaaatctgtatcaatgaataagatattcatcccaaactgcatgcaaagtcaggtcaagctggctcttctaagagaatctccgaacagctcattcccaggcaaagacgggagaaactgtcaatttagaatagatgaacgtatctggaaaccttcatcaccttcagaaagcagcgggaatcttgtcaagaaattgccacaggtttgttcccaggtgggagtttacttagggtatcagtgtcagatactttggatggaggccagtagcgaaacatggacctaccaacaatgttctcaactgggagagggccccagttatgagaatcaaagctgttgttccgattgtctcccattacaaacacatatccttctggcacaaccattggatccatctcataagctagaggctctactacaaattgccgttcttcagcagcaccatttaccagtagtttcccatcacgcacctcaacagtgtccccagccttagccacaatcctctttataaacacatcagacgaactaaaaccaaactcctctaaacaaggaggcgctttaaaaatgactatatccgaaacatcaggctttctaaagaagaacgaaaccttctcggttagaacacggtcacctacttcaagagtagggtacatagaagaagagggaattgatcttggttcagccaaggacgatttaaagagcaaactaacagtaacagcagtgaacgcagccttcgcgtcttcggaacacacgttcatcaaccgcgaaagccaactagtcttggcaaaattggattcggtgtccgaaacgacgcgtcgcgtgccacctttgtcgacctcccaggaagtggtggggtcgggaacggactcgttgcaaggaagccacttcgaaccaggcaagaagggaacgatcgaagtggttttgaagggcgaaataccgaaaatacccgcagccgccgcggatgacccagacacacccgccgttgacttcatgatcgaaatcaggcccaatatgattgggctcttgcagctcgtcgccgaggaactccccggtgagggtggagtaagtggactgggcccagcagttgggcttgggcccggcaaaattgcggactccgccggcggaggaatctagatccgtcttctgggtggcgccagagaggcgcgtacggatccagcattcctggacgcaacgcgaattggcgacgcgcacgccggcggaggaggcgaggctctgggcgacatagcccgaaaaggaaaaggttacacgaatagccatagcaaagaagttgattagtcggaggaataaaaggtacagggtgctttccgaggaggagatttgggagagggaaaaccctagcaagcgatcggaagcattttgaaagagggaatcagtgaagcgaagacgagagggttgaattgaagggtggagagggaaccggaggggggaatcgccggcgacgccacccccagaacgccggaagagagagggtttggtttgggaattgggggaagtgtgagaaggaagaaaccaaatgaaaacaaaaaaagtcgcaggaagtgggttttattaatatacggcggctctcgagcctgtcgcccattacaaacacatatccttctggcacaacctgcaccaaaacactaccattaaccacattctcaagtcccacaatcattcaatcaaacataatcaccgcagcaaattgtaaacattaccattggatccatctcataagctagagcctctaatacaaattcttgttcttcagcagcaccatttatcagtagtttcccatcacgcacctacaacaaatttttttgcacagcaaaaatatgatatatattatatataaggaacagtactaggtgtactgaaacgcacctacaacaaatgaacaacccaaaacaaatataagactataaataaaagaacaaggcataaccaccagtttgaaggtgatcaattaattaattactcaaaaaataaaaattatacctcaacagtgtccccagccttagccacaatcctctttataaatacatcagacgaactaaaaccaaactcctacacaacagaaaccaatcaaaaacatcacaatgcatcatcaccttaacattaaaagaaaaagaggaag

SEQ ID NO: 124862 - DNA, 374 bp, Glycine max
  unsure (1)..(374): unsure at all n locations
  Clone ID: PAT_MRT3847_8375C.1
agcaattccacattctgagtgattcaggacgcagagagccctaaaaaggagaacttgaaggcaaggccaaggcagagtcaatcagctactgttacaaggagcaggattgagttgagacaatattttatagtatttgagatggaggaagtgataggacccagattgtacggttgctctaattgtagaaaccatgttgcccttcacgatgatgtgatttcaaaggccttccanggaaaaagtggacgagcttttctgttttctcatgcaatgaacgttactgtaggaccaaaagaagacagagaactaatgacgggtctccacactgttgctgatgtctactgttctgactgccatgaggtgcttggctggaagta

SEQ ID NO: 124863 - DNA, 792 bp, Glycine max
  Clone ID: PAT_MRT3847_83760C.1
atatatattactagcgtgtggcgaatatatatcttgtttcgtcccttaattctctccttacaaactcagtggttcttttgctcaagatttctgaactcagcctctgattcccaggaaaaaaaaatataaaagcaaaaatcagagtccagaagtaataataagcggcaaacagaagacatagatcagcacaagaaaagcaaaggaagatgggttttctggaactattggaggtggcttctatgccagttattcaagtcctacttatcagtgcattgggagctttgatggcaactcagtttttcgataatattctttcaccagacattcggaaagccttgaacaagattgttttcgttatattcacaccttcacttgtgttttccagtttcgccaagagtgtttcacttgatgatatgatatcatggtggtttatgcccgttaatgttggacttaccttcttaattggagggattataggatggatacttgtaaaattactgaagcccaatttgaaagtggaaggtcttattattgctgcatgttcatcaggaaatatgggtaaccttcctattgtaatcatccctgctatctgtgatgagaaaggaggcccatttggtgcacgtgatatttgccgcaataatgcactctcttatgcatctttctctatggcgcttggtggcatcttcatttggacctacacataccagacggtaaaaagcagatctttgaaatttaaagcactggaagctgctgagattgtaaaggttcccaacaaaaatttgatgctattgc

SEQ ID NO: 124864 - DNA, 210 bp, Glycine max
  Clone ID: PAT_MRT3847_83761C.1
cacgcgtacgcacggctgcgagaagacgacagattgggagtctgttcgaatcgatcacgaagcgtcggttcctcatggatgtcttggttctctatgtcacagaggagcagagaaagctactccaccacgaagaagccgatggtgggattgtaaaaacaagaggagcgcagcaaatgctgaatgggagtccctactatgctaatggcttta

SEQ ID NO: 124865 - DNA, 265 bp, Glycine max
  Clone ID: PAT_MRT3847_83762C.1
ggctacctcaatgatctcttccctaactgctaccactgctaaccgcaccgtcgccggcgtggctgctccattcactggcctaatgtccatggttgggttctcagcgggaataccatcagtgacattacctccattgttagctacgtgtggaagagtgcaatgcatgcaggtgtggacaccagtgtgtaagaagaagtctgagactatttcctacctgctagaccttgatgatgcacatttggctaaggaagtagaataccttgtg

SEQ ID NO: 124866 - DNA, 447 bp, Glycine max
  Clone ID: PAT_MRT3847_83763C.1
gaacaattcaatggagcttgtatcccccagaataaattcagaaaatcataatctgcctcagtcaaactggcactttcctggttctagggagatgtcagagcttggagcaagaaaacctgatggttatgataatttgtcacaggatcctcatcaaggaggtattgttccgcattcacactctggagcacatggaccttccattccaccaccacaacaaattcagtcttctccttttgttcgccctgtttatgttcctcctaatggtccatgggatcgtcggggaattaataatcatttacctgtcagccaattcaagacaggagtaatgccaaataattttcatggtaatgctgttgtcagtccttttattcctgcttcagtaactccacttgctcagatacaaggaactccaatgcatccttataaccagcatgtgcctccatcaat

SEQ ID NO: 124867 - DNA, 365 bp, Glycine max
  Clone ID: PAT_MRT3847_83764C.1
ctcgcaaatgtgactcaagcatcgcatcgggacacgcgcgcactagctcgccaagctcgaatgctagctctctgtcgtatagaatggctgcaggcagctgacatgcctactatagctcgaatcgaagaactacatacacatgcaacaggctatgaatgctaatgattcatacgataacatacacctactgctaaccattcatatgctgcggaataatacaactagcaagcatggactttccccacatgattcattgtcatgataaacatgactaccctagcacacattaactacttgatggaaatgcttcacacctatctatgaacataccaatttgtgtcaaatgatctttatcctgtatgcca

SEQ ID NO: 124868 - DNA, 408 bp, Glycine max
  Clone ID: PAT_MRT3847_83765C.1
ggctcgagaaaaaactaacaaggccatacctgttctctatcccattgtccgtcgaccttcgcacaaccccagaaacaaggggttgcgcctgtcatgagacttccatacgcatggggttgcgacacccacgcgcgcgcggcttcgttcactgctctagaaggccaccacttttgctggtggcgccactgctctgtaagcaaaggtcgtggtcgctggactccttacgcaacaaggtgaggctcagtcgcaatgggaactggcagaactcgcacgcgaacacgctgcaccagatgaggacctggttgatttacggaccgcctacatcgaaatacgctttagattttcttttgcttcgacgctgttgagcgcgaaccactcctctgagattttctacgcgatcttggtctc

SEQ ID NO: 124869 - DNA, 521 bp, Glycine max
  Clone ID: PAT_MRT3847_83766C.1
attcaatcggagactttttccttctttttttttctttcttaactagctaaataaccttatatatcagagttgatgtcttgattatgatataaataaaaggcagagaagagagaaaagagaaagaatggatgtgaggaacattgctgtggtggtggaagacgtggatgctgctagaactgcactacaatgggcacttgacaacatcattcgctatggtgacataatcacactgctccatgtctaccctttatcaagatccaaaagcaaaagcaaagctcgtcttcttcgactcagaggcttccagttagcactttccttccaagacatttgcaacaacttctccaatacaaaggttgagattgttgtcacggaagagaacaaagaaggaatgaaaattgtggctgcggtgcgagagattggagcttcaatgctagtggttggacttcatgatcaaagttttctttacagcttggcaatggtccatagcaacatagctaactactttaactgtagaatccttg

SEQ ID NO: 124870 - DNA, 252 bp, Glycine max
  Clone ID: PAT_MRT3847_83767C.1
gcttgctctctctctctctctctaatactcacacataaaggaatagacaaaaaaacttctttttcctttcaacgatcttcttcttcgaaatcagaaagagggcactttctcttgctttttttttcatcatttcagtttgaaagattctctaaggccagagaactcatcatcaggaatgaggccaccaccaactctcaacattttcccatctcaacctatgcacgcagtgcaccatccaattccaagttaaca

SEQ ID NO: 124871 - DNA, 334 bp, Glycine max
  Clone ID: PAT_MRT3847_83768C.1
cttgatactgtaactgcctttcttttttttttcgtttccccaaattaaatataaggtagggtttatgttttcaacggttttccatctattcgcatacgctttcatccgggcgacaaatattgggttttgccccccctcaaaaaaagcatacatgcccaatgggatcaaaccgaatggcatgccaactcttgaaacccaatcacattttttctggaaacccttaccaacgatgcgaccctccttgacgaatatcgtcaggggccgctttcaaatggcgggccgttgccgatgaatgcaacgtatgtttccaccggccaaaacaatactcctggca

SEQ ID NO: 124872 - DNA, 327 bp, Glycine max
  unsure (1)..(327): unsure at all n locations
  Clone ID: PAT_MRT3847_83769C.1
cnataaacnntnacgtcgcatgcacgcgtacgtaagctcggaattcggctcgaggtgcantgctggctagcaacgccatggccattnangtgttgctgngtggtgatgacgggnctctggcttncgttcccaacaattnctccgnggcctctggggagaagatcntgntcaagaacaacgcaggtttcccccacaacgntgtgttcgacgaggacgagattnctagnggcgtggatgcagggaaaatctccatgagcgatgaagaccttctcaatgcgcctggtgagacttacagcgttactttggatgctaanggaacctacagtt

SEQ ID NO: 124873 - DNA, 370 bp, Glycine max
  unsure (1)..(370): unsure at all n locations
  Clone ID: PAT_MRT3847_8376C.1
catatatatgatagtgatttatatgagtgtgagtatacttattaatacacagaatctccatattcttgcctggaaagaaataacaatgatggaaacatggtcatgggaacagcccctattaccctgtggaatctcgagcaactcgtgaaagttcacaccagctatatttgtagcacgaaacaacactttttcaagcaaaagctgagccgcgcctccctggggttgcaatgtgatgaaaagctccactttaaccactgccttttccttcgacaggttctgatagagcccctcagagcgtagaatcaaatatttggcctttgggcctaatatgnggtgttttagatatggcaggcctcttatgtacagagag

SEQ ID NO: 124874 - DNA, 940 bp, Glycine max
  Clone ID: PAT_MRT3847_83770C.1
gacgtataaagctcagaagcctgaagtttattaaaatttggaagtactaacacagtgataaatccttctctattcacagaaacacctctaaagctagaggaccgaagtcacccccaaaaattatagaacacaacctaattgattttggtcagaaacacaaagttgaacgtgcccctaaaatttcccataccatattcagggcaatcctaaacacaattggaaactaatccatcagccaacacaaaagagactggcactcctgacacctcttgtcaacaatttatgctagtccacaagtatatacacgttgaagtgatctttttctgaaaaaattccaatcgtactttgatacaaattgtcaaaacgtgccaaagtaattgactacaaaacacgactgtttcatttgatgtgtctctttcgagtaacacggaaggttggcaaaaatctcgttacagaatattgaagaccaaaaaatgtaacaagattttggcaatctttcttttcttcttcattatctgtttgtgaactcaagtgactcaaataagttttcccctggtatatataggagagctgctgccataaaagaatgctcaatcctatctgcaatgaaacacttgcaatgaaaagataagcaagaatgagtcccctggaggaaagaagcagggcagatctcaggaatgcaacaacgatttcattcatgattctccatgccagttcgctgctactaaccccgtttatgtgcccaagggagtacttcaacggtggccatgtacgcaagcctgcatatgctgacatgatagagacatagattgtactcaacactgcagaaatgaggaaggcaatgaagctccggtgattagctgcaccaacacagttcccaataaatgggcagtgatgatccatgtcctatgacgcattttctacaagaacgacaatgatg

SEQ ID NO: 124875 - DNA, 1684 bp, Glycine max
  Clone ID: PAT_MRT3847_83771C.1
cctaattatgtatgaccatgcaatatataccttcaactatattagaacaaatgatagggtacaagctgagaaaagtttcaacatcagcaactgaatatccactacaattaacacggcaaacaaacgctatccatgtaacaaatcttactaacacaaataagcaccccatggtgaagcaacatagcttgattcatagtagacagagactagagatttaggctttcttggtgtcatctctggaagctgaatagaccaagaatcttttaaactttggttcttactgttaaaatattactccctatatttttccaaaacatgtaaatttcaatcattaaaagattggtgttcccattttttacaaagaactagtctcccaattttcatttagtattaaggtactagttcacttgccaccaaaatcctatcgaaggaaaatataaacgatggatatccaaacataaaaaaactaatggcttacactgactgttgggtgccagtctgttgtatcaactgagagtatatatattcatcaactctctgttttgccaaagctacctgttgaccaaattcacgtatctgcatgggcataagatacaatacacccttaccaccataaaccttaatcattgctccagactcatttctgatcctcgagatgtttgagccacaccggccaatcaacccaccaaccatcgtttccgaaatcagcatctcgaatgtaacataatcaactgcaagattggttgtcctgaagttgggtcaagatatggctgggatggtcgaattgcagcataattgtatgttgggctaattgaaatgacttgtcttggtgggttttcccttagctgacaacctatctcctccaaagctttcatgactgcaggaacatctcctgataactgcacaactctgtcagattcatgagcagaagcacataaaggcaactgatttggtgcaagaacagtaatagaggcaccagaagagtccctcaacttctcaatgttttgaccagacgtcccaattaatccacctgcctgggaccctgcaatcaaaagtcttatcgtattggcagccacatgtcctgcagtaacttttgacgcatcaagactgctatcatcttcctttaaaattaaatgggctatttgctcaagagctttctctgcatcagtaactttttcatcattgtccttagaactaataatgataacacgctcttcatgtctggcaatagcgtcagcgattttgatggtggctttcgtgtcttctcgaatcttctgtatgcgatgaccttccttcccgatgaccttgccgatgtggcgggagggcacgacgatcctgaatatcacatcctgtcccttggcgcgcttcgccgccgattgatccggcgcggcggcggtgccaggagcctcgtcgtcacggcggcgcttcccggaggagggggcggtgtcctgggcggagaagggaatctggagcggcatgggaaggggcatgtgcatgggcatgggcatggtggccatcgggttctgcggagggagcatggggtttatcggaatttgaccttgctgcgacatcgcatacgctggtgggaaagagtgacgggcctgcatggtgagccaagggttctctcccaaccattccgttacgagcctcaccccacttccaaatggcctcgaacagccgagcc

SEQ ID NO: 124876 - DNA, 1143 bp, Glycine max
  Clone ID: PAT_MRT3847_83772C.1
acgcgtccggcactccatctcctagtctctattgtttttcccattccctttcttcacctaatcctgctcctatttccccactaatcacgcaggttttacctggcgtgggttggattgaaacatgtcaggtttgaactggttagtggaatttaatattttaaggtaaaccccatctctttgcggctatttgggggcttgtttccttggggagaaaggtcatccatgtcataggtggcatcccaggtttccaaattttttttaaagtttgattatttttaagaatatcttaagagattatgtctccaatcaggaaatgggttgttggaagatatgtatttcactcctttcatttgatcacatatttcatcctctgtaattgaaaaaaaaaaacgagcttttttaggtggggtttgtactttgtactgtggcattgtcaggagtatcttgagagtgaacaatttgttaatggatcaacatagaggtgaggtattggatccggttcatgataggaatttgagtcattcggttgaaggtgttgcaattgcaagagctagtataagtggagaagtaggagaggtggatgaggatttgggatctgataaggaactaaaggacgatgttaagggtcaagacaagcatgatcaagaaaatattagtgataaattgcctggggttgatcaggggactagttataattcaaacaatttggttaatcaggaagtgatagaaactgtggttgtaattgagtctgttcagaccgagtatgccaatgaagataatacgaaactggaagcaaaagttgatgaatcagggttgagcttggtatccatgaaagcaccaaaaggggtgtctgaaactgataaaaattcatgtgtgattgatataaagtgcagcagccgcaaaaaaatttacaagagttctgaaggtgaaagaatttgtaggatttgccatctgacttctgggcagtcatcggatgcaacaactgttggcacttctgatagtgctacaagcgcagatttgattcagcttggttgtgcgtgtaaaggcaagccaggcattgcacacgttcattgtgctctggcgtggttcaagcttaaggggaacatgtatctgttcttgccaaatatcagtttgattatcaac

SEQ ID NO: 124877 - DNA, 650 bp, Glycine max
  Clone ID: PAT_MRT3847_83773C.1
gctgaactgctcatatctacacacaaacggcatgaacgtgatgcttatatagaacttgaacgctaccattaaacggggacatcctaaatgtccatgaaaataccagaagttacaggtgtgctaactattgtcaacctctactagactactctagcatctggacaaaatgtgaagtaggatacagcttacacatttaaagaaactacttgaaaaacacaagtaataagaataaatgcatgatcagaacaacagacatggaacttgaatcaaactggacaaagcataataaaatcatgatgactacatacgtgcgtcaaagtgatctcgtatcagcaaaacaacacatgccttgagacttgaaacaatcccgtaaaggtgaaggatagtaagaatgcttctagttaaatgcaactgagtaacacattactacattatttggcttataaacttaacataaaacattctaccatctaatacatattgagtgaaaaaaagcctgtatatactgtggtaaagaataaatatatccaaccatatatgtggtctaccaatttgatcaagcataatatagcaaatctattccaatgattacttagcatattccctagagacgctgaataattgattatagccccattctacctggactg

SEQ ID NO: 124878 - DNA, 669 bp, Glycine max
  unsure (1)..(669): unsure at all n locations
  Clone ID: PAT_MRT3847_83774C.1
accaggcatcatagnaggcaatccanncaaactgatannccannctttgacaggtctctgtgtcataagtaaatcacagctaacatcactaacgnnngctgcttgctcttcnnctgatgcctggacannnnacccgcaaaagaccctatttggtaaacaacacagatttctgcatacatgcagaggaagaaaggaagcctgcaacacttagcatgacatgctcagatcctaactctaaatgggaaatgatttcagattcgaacatgcacctttcatctaaactaagcgacggttctaatttatgtctagatgtagatgataacaacatcattgtgaccaatgcttgtaaatgcttgagcaaagataagacatgtgaccctggaagccaatggttcaaacttatcgacagtggaaggaggtcaatctccacaacctcgacattatccatgctgaattcaccggaccttttgtggaaatcattgagctcaatataagttgcttttaagaatttgggtcgatatgttgtactcatcaaaggtatcccttgcttacgttttaattgcatgaacatgatgcagtaaataagcatatccgtgtgaatattcagtgcatagtataataatagtgaaaatgtataaatttataagtgttaacgaggatttttggctt

SEQ ID NO: 124879 - DNA, 282 bp, Glycine max
  Clone ID: PAT_MRT3847_83775C.1
tataaaaaatgaattgtgttcactgaaagtatatgtttatcttagaatgttacctttgccggtacagtatttacaataaataactaatgactcctagttatctaccaagctgaaaaccacaggacacgactatatcatcaaataattgtttccttcgaaggccaaataattgctaagcaaattttagcaaaaacgtaccagaaaacactcaagaaaaaaaaaataacattattctcaaacatcggtacaaacgcaaccttttgagaacgtccggacgcgtgg

SEQ ID NO: 124880 - DNA, 164 bp, Glycine max
  Clone ID: PAT_MRT3847_83776C.1
gcgtccacgcgtccgcccacgcagtccaactagatgcgacaagacgagagaccggggcttctcttcctgagtcagtaactgtcagttcttcaccgccatgactgctatagcctctgcttagggtgtctctaggctgattgttcttagagctgggaagcttgaca

SEQ ID NO: 124881 - DNA, 267 bp, Glycine max
  Clone ID: PAT_MRT3847_83777C.1
ctcacaagttatttgggagagaagaaaatttttttactctttatggcgggcaccagccacatgaccggacggcattaatagtttatcccgggataaaatctctgcggcaatggatagcatataagctaatacgcagtcaatctacttacgcagagtgggtatgcacgctcccccttcaggagatagctgccaatttcagaatctgtgtgtcacttgaaggatcaacttgttgctggggctgcctgagacgctgagatccctgtagca

SEQ ID NO: 124882 - DNA, 429 bp, Glycine max
  unsure (1)..(429): unsure at all n locations
  Clone ID: PAT_MRT3847_83778C.1
ggttctcaactttctagaagagctcaccagttcggngaagaagaggagagcatattgtatgtctctgattctcttggttttgcagcgacggacccgtcgttaagggacccttctctggaagacaatgacttctcagaaactgcaaagttcataaaccaaatcctcatggaagacaacgttgaacagatgccattctatgattcactcaacttgcaagttacagagaaatccttctacaacgctctcactggcaacatacctctttcccccaatcaacatccccttgttctcagtccccaagctgaaaccactcccaccaccagcaacagcagcaacaacagcaaccacaactttttagatgaaaattctcgtgagttgaatccttctccagatttctgttctgttttggcttttcagtttaacccccac

SEQ ID NO: 124883 - DNA, 466 bp, Glycine max
  unsure (1)..(466): unsure at all n locations
  Clone ID: PAT_MRT3847_83779C.1
tcgagcccccaattcctaanttgtttaaacccctaattctnncatttcttcatcgtnntcgattctgtctgccgtcctaaaggtacgtgctcgtgggtgttcctctcttcnttcttgttcaaattcttttcnnngtaatagccaacccccttattangcnccttcngnntttattcgattnnntttctcnnctaattaccacnnttcaatnntttttnncgatttgtcggtttcgttaccgtnncaatctcgtatatncnnttttttgttcgggtcgtcgaaatccccgaaacccttttcaattnncgcctnnttctcgattccccgtaaanntcgtttggttanaagtgccaacaatnnctttccctnnngttcttagcgtattcnntgattcgatttctctttctttctnnttttttttttatcaaagttttgaggggaattacgggttcgtcgatcctgattt

SEQ ID NO: 124884 - DNA, 995 bp, Glycine max
  Clone ID: PAT_MRT3847_8377C.1
ccacgcgtccgagctgacccattttctctgtttttatatatagtctgcgttttcttccggttccctctcatccctctctctctctcttccattttctctctctagataggtaaaaatggctactccgccggtggtaaggtttccgatcttcacggcggtgagggcggtcggcgttgccgttactgttcttctgctgacgtgggccgtccatttcagaggaggcctcgctctcgtctctgataacaaagatctcatctttaatgtccatccagtgttgatggtgattgggcttgttctaatcaatggtgaagggatgcttgcatacaagactctatctggaactaaaaacttcaaaaaatcagttcatcttgcgttacagtttgccgctctcattttgagcttgattggtgtctgggctgcttggaagtttcacattgacaagggcattgacaatttctacagcctgcattcatggctaggccttgcatgccttttcctattcaccatccagtggggtgctggctttgcaacattttggtacccaggagggtcaagaaatagtagagctgccttattgccatggcatgtgttctttggtatctatatctattgcttggctatagccacaactgctactggtattctagaaaaagctacattccttcaggtcaacaacatcatatcacgctattccaatgaggcacttctggtcaattccttaggcattctgatagtcattttaggtggctttgtgattcttggaattgttactccagtttatggtaaagctgatgtcataaggggaaacgagtgaccatcatctatatgattcaaaattgaggaacattaacatttgtatcatctttaatacaaggttacatggatgtatgaaaacaaattcattaaacgtgtatccaggtttaattttatgttctattttatttactatgtgtattttccttctattagtgaatattcgtgttttgtgcatcaaa

SEQ ID NO: 124885 - DNA, 305 bp, Glycine max
  Clone ID: PAT_MRT3847_83780C.1
gtacacatctcttgtttaaacttttgacacctactacatcataggaaatgctggggatacgcggcactttcttcaaggatttggggctagtaaatcttatccaacaaatggcagctgacatgtttaaggacatttatagagtatgcaggacaatgattatagctaacacttgaagatccctaatactccctctcatttacctacttggaagcgttatactaccaaaacgagacattcctgattaatcacaataaactcaactgagagtcaccattcacatacggatataatgccttgtcatgtta

SEQ ID NO: 124886 - DNA, 162 bp, Glycine max
  Clone ID: PAT_MRT3847_83781C.1
cacgcagtcacttcaaaagggcgatcaggaaatgctgctcaccgtcagtatcgacacacacagcgaccgcaccgatcacagctcagtgataatggtatctgatcattacatttacagggatcgcagttctaggtcatgacgattacttcgcgaccacagtga

SEQ ID NO: 124887 - DNA, 616 bp, Glycine max
  Clone ID: PAT_MRT3847_83782C.1
atagattgagaaatgggaatagagaagcacttactgcattaaggaaaagggctcgaacaacaaagagcagtgttccatctccttttgaatcaataatgaagggagttgcagggtccagctcaagacctttggtgcaagaggtttgcaccacctgtggcaaacatgactcttctgagcagacgtggatgatgtttccaggaactgatctgtttgccagaattccatttcatgcggctcatactatattggaaacagatcaaacgcagcttgacttcgagtcaaagagactacagagcattgtgaaggaaaaatcttacattatatcagaggcaggtgttcttgcagacaagataagtcctggagtgctcaaatcacttgtatccttaaacgacaagccaaagtaagatgctttgagctgactatttagtgagaaaccttgtggtggcagtatcaactgggtggaaaatggcaagtgttttctggaagtctttcatgaggcatttaggctgaggtttatctattctgttgctgtgaatgtgtaaaaaaggtcccatgtttatactatggctgctacattcaatcctaaaaatggagccaatggttccccttcagagcc

SEQ ID NO: 124888 - DNA, 236 bp, Glycine max
  Clone ID: PAT_MRT3847_83783C.1
ggatgccgtcgatgcatattactcagaacctatatactatagaatcagacgagtgaggaaagatattgaagatgaggtgctgcctaataatttcactggtgcacactttactgctgaaagttatcaaggaagtgctggcatatgacttaaaatggagccatgtgacttcaattgaacatcatatgttagtggattctttcaaggtccatgtggatggaacttggtaatgatgcata

SEQ ID NO: 124889 - DNA, 1023 bp, Glycine max
  unsure (1)..(1023): unsure at all n locations
  Clone ID: PAT_MRT3847_83784C.1
ccacgcgtccgcagaaacgaagcgaagccccaaaagaggagagaaagaagaataaacactcgagaaatttctcacttagggtttggatttttcgagtaatcttctctctccgtcacttcatctcacgaccagccgagnttcccggntccgncgcgatctcgttccgatcgcacgcgttttaatgatcgtcgtcttccgcggcctctgattcggctctgatcttcctcgccgcacctctccgcacctctccgccggaaccatgatctccgtgcagggcgacctccaccgccaccaccaccactaccaccacacctctcggcagcagttcaccgcggatcgcgtcgagccattctccgtcaagcaggaacccgcgtcgctcactcttctgccgttgcgcgggcatgattctagtgaagttgatgaagatgtgcacttgtctcttgcacatcaaatgtacaagaggctcgagtataagcaagccctagaacacagcaacactgtctatgagagaaatccgctccgtactgacaacttactactcctgggtgcagtttattatcagttgcatgattttgatatgtgtgttgcaaaaaatgaagaagcactgaggattgagccacactttgctgagtgttacgggaatatggcaaatgcatggaaggagaaaggaaacattgaccttgcaattcgctactacttgattgccatagagctccgtcccaattttgctgatgcatggtcaaatctagctagtgcatacatgcgtaaaggaagactcactgaagcagcccagtgttgtcgtcaagcacttgctataaatcctctaatggttgatgcccatagcaacttgggtaatcttatgaaagctcaaggcttggtgcaagaattcgatacagatatgaagttgttgtcttcaagccagggctcagatgatggttgctcttgttgtaacttccatctccaagactgcaaatagtcagaatctaacattntttgcaggcatacagttgttaccttgaggca

SEQ ID NO: 124890 - DNA, 971 bp, Glycine max
  Clone ID: PAT_MRT3847_83785C.1
ccgtcgtccgtgttctccaagccacgcgttcctctaccttttctttgccgtttaaaccctagcagagggtttaagctcgcgccacacgaagcttctccatgatccatttcgaaggcgcattctaagccatggctgcttcaaagttaacctcatgcgtggcggtaacttccgctgcggtggtttccatgtccgccttctccgatcgtgcctacgccgattcttacttccgactccctttcttctcttctaaatcttccagtgagccctcgccgccgaaccagacctccgactccaattccgagcctccgccgcccgatgaacctaacaaatcgggtttcgacccggaatccttagaaagaggagccaaagctctccgtgaaatcaatagttctccctactccaagcagctgttcgatttaatgcgaaaacaggaggaaactcgcctcgctgaattagatgctgagaaagtgcattacgaacttattcaatctcaaggagatattgaaaggcagcgtaaaatggctgaagaacaacgcaatctaatacaagaccaagcccagagacaggcccaggtgttgcgatatgaagatgagtaaggaaatgcagaattgcagacagatcatgaagcccaaaggcaacataatgttgaattggtcaagatgcaagagcagtcttctttcagaaaggagcaggcaagacaggctactgaagaacagattcaatctcagcagcgtcagactgagagggagagagctgaaatagaaagagaaactattagagttaaggcaatggcagaggctgaaggccgagcccatgaagcaaaattgactgaggatcataacaggagaatgcttatagaacgaaagcaaggtgaaagagataaatggcttgctgcaattaacacaacttttagtcatattgaagggggcctaagggccttattgactgatagggacaaattgcttatgact

SEQ ID NO: 124891 - DNA, 794 bp, Glycine max
  Clone ID: PAT_MRT3847_83786C.1
cctattccaatcagcgcgagggaggatatgaaagactaaggattggttatgtgagtagtgactttggtaatcatcccttgtctcatctcatgggatctgtttttggtatgcacaacaggaagaatgtggaggtgttctgctatgccttgagtgctaatgatggtactgaatggaggcaacgtattcagtctgaagcagagcactttgtggatgtatctgccatgtcatcagatgcaatagcaaaaatgattaatgaggataagatacatatccttgtcaacctaaatggttatactaagggtgccagaaatgagatatttgctatgcaacctgcaccaattcaagtttcatatatgggattccctggaacaactggggctacttacatagactacttagtcactgatgagtttgtttcaccactagggtatgcaaatatatattcagagaagattgtacatctcccccattgctactttgtaaatgattataaacagaaaaatcaagatgtgttagatcccaactgcccacacaaacgatcagattatggtctacctgaggataaatttatatttgcatgcttcaatcaactgtacaagatggatcctgaaatatttaatacatggtgtaatattcttaaacgtgtacccaacagtgcactctggctcctcagatttcctgcagctggggaaatgagactgagagcatatgctgctgcacaaggggtacaaccggatcaaattattttcacagatgttgccacgaagaatgaacacatcagaagaagttcttta

SEQ ID NO: 124892 - DNA, 947 bp, Glycine max
  Clone ID: PAT_MRT3847_83787C.1
gagaaaaatacactcccgaacattttatcaaaactgaaaagaaaaagggagattatttcaaataaaaagggctagtacctctatctaagaatgttgtcaatgtaattaagcagagtagaatgcaaaaacacaagatacatcacaattttgcatgtccaacatagtcatagatccatccgcagccaaaaattcaggttattgcaatgaggtcagtaactttaacagtttatttccactggcggcatctttgcagcatacaacacaagtggaacctaaactacaatccaatttgcaagagttagcatcatccaaacaagataatgtagcttgctttaaaaccggagcagcgctgtgatattttgatggccatatgtttgggaggattctcaaacattcagtacaataactaacggctgaaaaaactgtctcaaagtcaccctgtcattaccatgctttcttgcccctctgaatttcagtgtcatgaatgacgttgtccctaagaattgacaggttttccatttaatttagggaaagggtcttgcttgctcaatacaactaccttgcttttgtgggcaaagtaacctttcataagattcttatatatcagtatggccactatacactctacctcatccacgtccatatcaatttcaagccatttcaatgctttaacaataacttctaacttcacctgatgagctctgcctgggtccttctgcttttgaatgatgtaaatcttctttactaatctctggtatacctgaagttctaacttctctaagacaagatatacacctgacctcaagaaccggtcctcatgatcttgcagtgcacaccgaagaagccgaagatcgccccttctaagagcttgtacgattttactatactcaagtagattgtacttctccaagagactgtttttaggtaatatgcctattgaaagcttc

SEQ ID NO: 124893 - DNA, 6540 bp, Glycine max
  Clone ID: PAT_MRT3847_83788C.1
tacctacggctgcgagaacacgacataaggggatagggtttggatttttcgagcaatattctctctctgtcacttcacctcacacgatctcgttccgattgcacgcgttttaatgatcttcgtcttccacggcctctgatttggctttgatctctcttgtcgcacctctctgccagaaccatcatctccgtgcagggcgaccaccaccactaccaccacgagattgggttttcaattagggtttttgttgaatcgtttctttgggttttgattctggaatttgaaaattgaagggaaaatgatggaaagaagagaggaagaagagggagagcgtatgtagttgttttgggggacattggaagaagccctcgaatgcagtaccacgctctttcactcgctaattagtggacatgtagaggatgctgtgaagagctataaacaagcattgattcttcgtccagacttctctgaactaacttacaatctccttcatacacttcagcttgaacaaatagaatgcagagttaatagtgctgagagagaagcgaagttgctaaccgaacaactgaaacatcttatatgaggatcagcatgatgagcctgcaaaactaacattgctgattacatgctagctgccgttgaaaattaagagacacatatcagacctctgttttccaaggagtttcttttcttcaaatatggatgagaacatgaaacagttccaaaagaaattaacagaactggaagtggaagctgagcatcttcttttagcccgacatcagctggttgagaacgatagattgagaaatgggaatagagaagcacttactgcattaaggaaaagggctcgaacaacaaagagcagtgttccatctccttttgaatcaataatgaagggagttgcagggtccagctcaagacctttggtgcaagaggtttgcaccacctgtggcaaacatgactcttctgagcagacgtggatgatgtttccaggaactgatctgtttgccagaaatccatttcatgcggctcatactatattggaaacagatcaaacgcagcttgacttcgagtctacggctgcgagaagacgacagaaggggacatgtttaacagaaaccaagcgaagccccaaaagaggagagaaagaagaataaacactcgagaaatttctcacttagggtttggatttttcgagtaatcttctctctccgtcacttcatctcacgcgatctcgttccgatcgcacgcgttttaatgatcgtcgtcttccgcggcctctgattcggctctgatcttcctcgccgcacctctccgcacctctccgcacctctccgccggaaccatgatctccgtgcagggcgacctccaccgccaccaccaccactaccaccaccagccgcagcttcccggctccgccgacacctctcggcagcagttcaccgcggatcgcgtcgagccattctccgtcaagcaggaacccgcgtcgctcactcttctgccgttgcgcggtcatgattctagtgaagttgatgaagatgtgcacttgtctcttgcacatcaaatgtacaagactggcaattataagcaagccctagaacacagcaacactgtctatgagagaaatccgctccgtactgacaacttactactcctgggtgcagtttattatcagttgcatgattttgatatgtgtgttgcaaaaaatgaagaagcactgaggattgagccacactttgctgagtgttacgggaatatggcaaatgcatggaaggagaaaggaaacattgaccttgcaattcgctactacttgattgccatagagctccgtcccaattttgctgatgcatggtcaaatctagctagtgcatacatgcgtaaaggaagactcactgaagcagcccagtgttgtcgtcaagcacttgctataaatcctctaatggttgatgcccatagcaacttgggtaatcttatgaaagctcaaggcttggtgcaagaagcatacagttgttaccttgaggcattgcgcattcaacctaccttcgctattgcatggtcaaatcttgctggcctgttcatggagtctggtgatttcaacagagcccttcagtattacaaggaagcagtgaaactaaaaccttccttccctgatgcatatctgaaccttgggaatgtatacaaggctttagggatgcctcaagaagctattgcatgttatcaacatgctcttcagacacgaccaaactatggcatggcttatggtaatttggccagtatatattatgagcaaggtcaactggatatggcaattctacactataaacaagctgttgcatgtgaccccagatttttggaagcttacaataacttgggtaatgctctaaaagatgttggcagagtggaggaagcaatccagtgctataatcaatgccttacgttacagcccaaccatccacaagcattgaccaatcttggaaatatatacatggaatggaacatggtagctgctgctgctcaatattataaagctacactgaatgtaacaactggattgtctgctccttataacaaccttgccattatctataagcagcagggaaattatgttgatgccatatcatgctacaatgaggtcctccgcattgatcccttggcagctgatgggctagttaatagaggcaatacgtataaggagattggtagagttagtgatgctatccaggattacatacgggcaattgctgtcagacccaccatggctgaagcccatgctaatttggcttcggcttataaagatagtggacatgtagaggctgctgtgaagagctataaacaagcattgattcttcgtccagacttccctgaagcaacttgcaatctccttcatacataccagtgtgtatgctgttgggaggatcgtgataaaatgttcaaggaagttgaagcaataatcaggaggcagattaatatgtccgttattcctagtgtccagccattccatgcaatagcatatccacttgacccaatgcttgctctggaaattagccgtaaatatgctgcacactgctcggtaattgcatctcgtttttctcttcctccattcaaccatcctgctcctattccaatcaagcgcgagggaggatatgaaagactaagggttggttatgttagtagtgactttggtaatcatcccttgtcacatctcatgggatctgtttttggtatgcacaacaggaagaatgttgaggtgttctgctatgccttgagtgttaatgatggtactgaatggaggcaacgtattcagtctgaagcagagcactttgtagatgtatctgccatgtcatcggatgcaatagcaaaaatgattaatgaggataagatacatatccttgtcaacctaaatggttatacaaagggtgccagaaatgagatatttgctatgcaacctgcacccattcaagtttcatatatgggattccctggaacaactggggctacttacatagactacttagtcactgatgagtttgtttcaccactacggtatgcaaatatatattcagagaagattgtacatctaccgcattgctactttgtaaatgattataaacagaaaaatcaggatgtgttagatccaaactgcccacacaaacgatcagattatggtctacctgaggataaatttatatttgcatgcttcaatcaactttacaagatggatcctgaaatatttaatacatggtgtaatattcttaaacgggtacccaacagtgcactctggctcctcagatttcctgcagctggggaaatgagactgagagcatatgctgctgcacaaggggtacagccggatcaaattattttcacagatgttgcaatgaagaatgaacacatcagacggagttctttagcagacttattccttgactcgcctttatgcaatgcacatacaacaggaacagatatactatgggcaggtttgccaatggttactctgcctcttgagaaaatggctactagggttgctgggtcactctgtcttgccactggactaggggaggagatgattgttagcagcatggaagagtatgaagatagagcagtctcattggctctgaatcggccgaagcttcaggctcttactaataagcttaaagctgtacgcatgacttgccctctatttgacacggcccgttgggtgaggaatcttgagagatcatattttaaaatgtggaatctgcattgctctggtcaacgtccacagcattttaaggtcactgaaaatgatctagaatgtccttatgacaggtagacgtaggaattagacgggaatgtagataaagaaaattaagaggcgtagttacccacattgttgaggcgtagttactcaaaatgttgatgggctatttagttactcattgttgatgatgtattaccttacctcggattagtaaaagagaaaattcgtgacgtactcatcaccgtcggtggactaccccgtagtagtaagagagtaaaacaatgtgacttattcttatttataaaagaaaatgtttggcttttttgtaaatgattataaacagaaaaatcaagatgtgttagatcccaactgcccacacaaacgatcagattatggtctacctgaggataaatttatatttgcatgcttcaatcaactgtacaagatggatcctgaaatatttaatacatggtgtaatattcttaaacgtgtacccaacagtgcactctggctcctcagatttcctgcagctggggaaatgagactgagagcatatgctgctgcacaaggggtacaaccggatcaaattattttcacagatgttgccacgaagaatgaacacatcagaagaagttctttagcagacttattccttgactcgcctttatgcaatgcacatacaacaggaacagatatactatgggcaggtttgccaatggttactctgcctcttgaaaaaatggctactagggttgcgggctcactctgtcttgccactggactaggggacgagatgattgttagcagcatgaaagagtatgaagatagagcagtctcattggctctgaatcggccgaagcttaaagctcttactaataagcttaaagctgtacgcttgacttgccctctatttgacactgcccgctgggtgaggaatcttgagagatcatattttaaaatgtggaatctgcattgctctggtcaacgtcctcagcattttaaggtcactgaaaatgatctcgaatgcccttacgacaggtagcataggaattagacgggaatgtagataagaaaattaagagaaggtcgcattgttgagacgtagttactcaaatgttgatgggttatttagttactcattgttgatgtactacccctatcttgtattagtaaaagagaaaatttgtgatgtgtactcaccgtcggtggattacctcgtagtagtaaaaagagtacaacaatgtgacgtatttttatttataaaagaaaatgtttgcctttggtgttcaaaaaaaaaatccaaatatatatatatatatatatatatatattatattttaaataaaaaaaaccttgtgatttagattcaaggttattgtgtttaaaatgtggtactagttagcatttcatcttgtatcattgatgtcttacattcccggatatgtctttaatcgcataatataaagatttttaaagcaaactaatattttagtgatgcatatattaatcttatgatgatgtcatggacacagtcttttcactatatgaaaggcaaaagtgacttaagttgagaatgtgttgtaattagtatgtctagtttaaacacaaggattcattctatagcaatagcatcctgcaggactatgaggaatgaattgttaaaagagactacagagcattgtgaaggaaaaatcttacattatatcagaggcaggtgttcttgcagacaagataagtcctggagtgctcaaatcacttgtatccttaaacgacaagccaaagtaagatgctttgagctgactatttagtgagaaaccttgtggtggcagtatcaactgggtggaaaatggcaagtgttttctggaagtctttcatgaggcatttaggctgaggtttatctattctgttgctgtgattgtgtaaaaaagttcccatgtttatactatggctgctacattcaatcctagaaatggagcaattgttacacattcagagcatggttggttttaacttttttttttaaagaaataaccatttatttttaaaaaaaaaaatggtcatatccccaaaaaaaaaaaaaaaaaaaaaaaaaaaatgtgcttttgcggccaaagtatatgtaggctaggttttttggacaaaccctttgatggattggtctttccaaataagatttaatacctttttagatgagaataggcacatacctgattgttctatgtgctgacccgtacccgtaggaatatgtttagtttggatcttcgtttctaatgatgaaggcaacagggaaattttttttt

SEQ ID NO: 124894 - DNA, 192 bp, Glycine max
  Clone ID: PAT_MRT3847_83789C.1
acgaggttctggcactttgagggaccagaatcctccttcccacctatttccaatttcccagtacctgtctaacaattaactctctcctttaatactatttataccatagttattagtattgtatgaatcatacgattcgtatcccgatttgaaacaacaatcatgtccagcgatacaaatcgtagcatgact

SEQ ID NO: 124895 - DNA, 986 bp, Glycine max
  unsure (1)..(986): unsure at all n locations
  Clone ID: PAT_MRT3847_8378C.1
gtgcggcgctcaggcggcgggtccgtgatttgagcacctcaacaaagacaacctctttatgagaagatacagaactggttagaggccatataccaattgaatcttcaacttatggggacccaacaaaactggattcaattaacctacgagatcttcaccctagatcttggttctcagttgcatggtatcctatttaccgcataccagatggcaacttttgtgcatcttttttgacttaccattcacttggacatttggttcgtagaagaacttcagatttgtcaactgtaggttcttgcatagtatctccaactgtggggcttcaaagctacaatgcccagggtgaatgctggttccagctgaagcattctgcacctgcagcagaaatggtgaacttagaaccttctttacttcttaaagagcgtttgaggacacttgaggaaacagcatctctcatggcaagagctgtggtcaacaaggggaacctaacctgtacaaacagacaccctgattatgagtttttcttgtctaggcgacggtattgaatactgatacctcaaaatttgcaccattaataatcaccatgagtaggccagctgctagttacaacttacaaatgaatgattttggctacattcatcacataggatattaccccaagtaggatctaagtgtgattgatggtgttggatgtgtcttttaggccctagtttcaacataaattcgtttgtacatacatagttttgtgcagtaccatttttggttttttcagttctcacttttaattttgcttcttgttagagagcaataaatttgtagcgctgatgtgagagattatgattcttgtttttcatagcttgaatttagtgaatgctgccataagtgcgttcatggttcatacaaggttttgcttttaatgcattcatacttaatgtccttgtgtccaacttgctcttnnngcatttaaaaatgcaattgaatcaatc

SEQ ID NO: 124896 - DNA, 272 bp, Glycine max
  Clone ID: PAT_MRT3847_83790C.1
aataattcatattcatacaatgctaaaaatgattcccccatggggactcgaaaaggacttccgctacagagcattaaaactataaccccatgtccacggcccccatctgcctgagacaaggccccgaatagctcacaacgtgataacagtcacttggctcaatgaaacatgtgataaagtgaaggggctgcgtgcctgaatgtgtataaatactgcggaactaggccatatcataagagggtctttgctagccgatcacatttcctttaacc

SEQ ID NO: 124897 - DNA, 364 bp, Glycine max
  unsure (1)..(364): unsure at all n locations
  Clone ID: PAT_MRT3847_83791C.1
ggggggtaggggttttgttaagngaaacgtanctaaganccgggccccgcgatgacaacccaaaaacataatttggaccacagtggacaagatcagttttaagggctatgtgacgaacactcatatacccatgtttaacagaaaagaaaagtgttgttccctgggggggtggccaacccaggaggacagatattttaaaaaggaacccagggttttctaagcctctgcaccggataaagaaatttcccccccaggaaagataagcaaggagagaggtggcccaagcatcattgagggggggggcaaaatatggagcaaatccggagccaaaaccccttctttttcttcttggatggggcaaggt

SEQ ID NO: 124898 - DNA, 181 bp, Glycine max
  Clone ID: PAT_MRT3847_83792C.1
attaggtgaggtgagctcacacgcgaggagggcgctaggtcactgcgaactagcgagagctgcaacgcacgatgtggtcaccatacatgtgcctactcactcaatcgagaacttcaacttcaacttgaacttggacttgttgcatttggatctcatggcagaagcagcactactgcaggac

SEQ ID NO: 124899 - DNA, 253 bp, Glycine max
  Clone ID: PAT_MRT3847_83793C.1
ataaatattgagcgggggttgactagttatctctttaaccctttaattaataaaaaaccgggaccggccccctacaatttagctctataacccgtaaaataaatccgaaccgatacctgaaaacagaccattttttcttaaaataggtctattataaactttccgaaaaacagaccaaacctattccctgagtgaaaattctaaccttccaaaataccaaacaaaataacagccggaaccttaaacttaaaac

SEQ ID NO: 124900 - DNA, 562 bp, Glycine max
  Clone ID: PAT_MRT3847_83794C.1
acgtcgtatgcacgcgtacgtaagctcggaattcggctcgagcttccttaccaggctgctcatccacatgggtctgctcaagagtgaagacaagatcaaggccattcctagcctgcatggccccctgatggtgttgaaccacgtggtacagcaggactatttccccaagacccttgcaccgctgctgctggcgtttgtgacaaagcccaatggtgcactggaatcctgctcctttgcccgccacagtctgctgcagacgctgtacagcatctagatctaaaaccagctgcttcttgtccctcaccctgccccagtgactgggggacttggatggactgagctcagccagcatctccattggataggattttgaccagaggcagggaagtgtctttgtccctcgtgtcgtgttggtcctttgatactatgttggtttggtgtgtgtgggtatgttcttcctgtctggactgcagagcttcatctccctgctggactcaccctggtccactgtagggcattgatgcccaggggaagggctgaaagctgcttagttattaaactt

SEQ ID NO: 124901 - DNA, 406 bp, Glycine max
  Clone ID: PAT_MRT3847_83795C.1
aacaactacttcgactttaccaccaaacaaccaccaactaaacaaatcaatcaagatgtctgacatgggccgacaatctctcggggacaaggctggggcggctttgaagcctgacagccagaagacctacctcgagcaggctaccgacgccgtcaagggcaaggccgactccgccgcatctaccgggcagccggacagtcaaaaatcctggacccagtccgccggtgacgccatctccggcaaccagaacgagaactctggttccatcctcgactctgccaagaacgctctcggcatgaacgacaagaaggcctaatcgaccgacgaccgaccaacgatgatcctcaccgatcgacgatggtagcttgtattctggttccgacgtattgattgaagagagagagag

SEQ ID NO: 124902 - DNA, 423 bp, Glycine max
  Clone ID: PAT_MRT3847_83796C.1
catggggaaaaagtctttattttaagaaaaaaatttagttaacaaaaaatttaacaagtttcccttagcaaattccccccaaagggaaatccccgcccaaagaaggctttaagtcaaggcctccccaattcctgcggggttagaattgggtctcaattctcaaaactaccttttaaaaagcttaaacttaacctaagaattttaaatgaaattttaaccttaattgaacttgagaaatgcttttttttgcatcagggatctagccccttgagttctccaaaaaagtccatgcccccagggggctcactggggggggctaaaagatccactccacatacttaaactacttaactcagataacatccctcttaagtatcctaccaaaaatgttatttgaaaaaagcggagaaaaaaagtttttag

SEQ ID NO: 124903 - DNA, 349 bp, Glycine max
  Clone ID: PAT_MRT3847_83797C.1
gaagcctactaaagccggcttggaggagcctcaagagcaaatccataagattaggatcaccctttcctctaacaacgtctacaatctcaagacagtgtccaccgaccttgttcatgatgccaaagacaagctcctcatgatcaacggacctgttatgatgccaactaaagtacttaacataaccaccactaaatccccatataagtaaaagcaccaacacatagaacaaatttaagctacgttacacaacataattattaatctctacaattcccctaatctagttaatcatattacttcaatcacaatgtaaccagatattaatatcataatcaccattacacatcct

SEQ ID NO: 124904 - DNA, 332 bp, Glycine max
  Clone ID: PAT_MRT3847_83798C.1
tcggaagggtccagagtaaaaaaatgtctcaagatattgcattggatttctatgatcttctccggctccgggatcatatccaaaagacctctaaccctatctcttctctcctcctaaattcataacctcgaaaagttatcatcagattaatcttctactcacattcctgcgcccatttctatctttactaatatttctccttcacctactcattattatgctgcactctcattattcatttaataccattatagttacatagataacatatatgttttaatcgaggtaatccatcacaataattttgaatcctattttaagtctatatcatt

SEQ ID NO: 124905 - DNA, 285 bp, Glycine max
  Clone ID: PAT_MRT3847_83799C.1
ctttcttttttttttttaaaaatcaaacgttccatgtgattgcaaatcgaaattggctcagatctcgaggaccgagaccaccgccggtgacaggcgacagcggatctattttaaagggtagcccaagttcacgtacgcgggcatgggcctctaatggggtagagcgattagaccctggggtttttccctgtaatgctttataaaccatcgtcaatttgtagagctgaaggagtaacaaagcttctacacgtggtttccataaacataaaccccactgctagaaat

SEQ ID NO: 124906 - DNA, 173 bp, Glycine max
  Clone ID: PAT_MRT3847_8379C.1
tctgggtttgccttcttcatcggagctctccacttggctccaatcaagtggcagaatcgcaattcaatattatttccgcttctctgttcgcgccactttgcatctcgcgcttttcgcttttcgcttttcggtatcttcagctattctgtgatattgaatcttcggagattcaa

SEQ ID NO: 124907 - DNA, 299 bp, Glycine max
  unsure (1)..(299): unsure at all n locations
  Clone ID: PAT_MRT3847_837C.1
ntgtangcacacgtacgtaagctcggaattcggctcgagntgattgatgactggaggaaccgtntaaaagcancagcgattgttggatttgccagacagcgcagggggagaaaccatagcanatcgtcttgattgtcctctccccagtgaccaagagctagagacccggctgnnattgtcctnctctgggtgcttnctttggatcagacaatctttactcttctagacttcctgccaccctgactgctgacttacagcagcnatgaggtcccgnnttctgctgcctgtgccccatttgc

SEQ ID NO: 124908 - DNA, 241 bp, Glycine max
  Clone ID: PAT_MRT3847_83800C.1
agcttgtgtaccaaactgggttgtctcaagaccccagcaacactctcctccttgtcaactatgcccagttcctctacctcgttgttcacgattttgacaggttcgtgaatattaagcatccttaacttttttttatatatatatatatatatatatatatattattaacgttaaatttcagtttttgctatgtttattttacttttattgattgataatacatattatttataagactcaa

SEQ ID NO: 124909 - DNA, 219 bp, Glycine max
  Clone ID: PAT_MRT3847_83801C.1
ctggattgcgcagaccaacaaacaggcccgagtggaatttcttgtgacgaacacgacaacgtgggggttgcgaagtctatttccgaagcaagatcgtgaacatcactggtgggtcagacagtgcaatcgcaagcttaaatgcatcgttcctataaatagtcggaggaatacaaaacaaaagggaaaggatgattagcatcctgagccagcggtggattt

SEQ ID NO: 124910 - DNA, 234 bp, Glycine max
  unsure (1)..(234): unsure at all n locations
  Clone ID: PAT_MRT3847_83802C.1
taaaattcttacaatattcctaatactttcaacacaaaggagacgtgattagttttcacgaaacactacaagttgccttgattgtatgtgagctacgctcctaaacctaccatgtacatgccttgttactgggatgtattattatgcgatcctattccaaagatattctactatggtacatgtactggaatagtgggggganngcaaaggcattaataactgacactctccgtc

SEQ ID NO: 124911 - DNA, 504 bp, Glycine max
  unsure (1)..(504): unsure at all n locations
  Clone ID: PAT_MRT3847_83803C.1
aattcggctcgagcaaaattcttagatagatcgtatagaagttatggaacaaaataagataaaaatgactggagttgtgattatgataatgattagggtgagttttgcattgggtgattacaatcatccatttgatcaaattggaccaaatcatgtgtctgacaaactcagatgtgttgacctttgtaaaatagaatgtgcgcctttactaatacctcctggcggtggccttctatatatatattgtgttaaaaagtgtgtggctggttgtggcttgagcagatccattgatgctcgtcatattgcggccaacagagcaggttcctgcgtgcaaagatgtcaaaacaaataatattttgttacaaaaatgtttagaaaaagagtgtcaagagaaataatactcatgtatgattgtaatgaataaatcataatcaatgaatagcatctacttcttcttctttcttttttttccannnnnaaannnnnaaaaaaaaaaagggcggg

SEQ ID NO: 124912 - DNA, 331 bp, Glycine max
  Clone ID: PAT_MRT3847_83804C.1
ctagaagacgtggtttcgaaccaaggcctttgtatgaattgcggtgaacctactacattatactctgatcaggtgatatctgtcaatgccactggtctctcagtaacacacagcaagccagtagtcatggggtaacgtttattgagctactatgagaacgggtataataattgactgaacggtttaatatcatgggatagagggctatacactgctcatactttagctgtaagatatacataatccacacttctacttatggcatcaaccattcatgtggatcttacaatgtttagaatgatagtataagttgcaaggctttccatgctag

SEQ ID NO: 124913 - DNA, 1338 bp, Glycine max
  Clone ID: PAT_MRT3847_83805C.1
gggagaccaacaccttccaccttctagtggggggagttgacgatcacactagacgatatggcatgtctcctccatcttcctatcacaggggcattacacaggtttgagcctctgggcgtggacgaggcggtcttgttgttgatggagcttctagaggtatccagagaggaggctcgagctaagatcgtacgtgctcatagggcttacgtgcgactgtcatggcttcgtgaggtgtatcagagtagatgccaagcccgatgttggattgtagcggtgcgtgcttacctcttccacctggtggattgtactctttttgctaataagagtgcaactcatgttcatgtggtgcatctgaagggtttttgagacctatgttagtctgggggctatggttggggagttgccgcgctggttcacatgtatgaccagctaaaggaagctttgcagacccccacacgacatatgggtgggtatttgacgctattacagtgctggatatatgagtattttcccagtgttcatcagggcgtcattgatgatgggtacgcaaagatgaccccacgtgcctccaggtggcttacgatgaaggcgcacatgaaggggatcaagggaacaccatacagggcacgtttagatgctctgacgatcacgaacttttcttggttgccctacaatgagcaccgggcagttaggggcttcgagcttatttcatgctaccaggggcggctcagatggggtcatgttgtggtctatgtcataccagagagggtggtacaacagttcgggtacatccagaccatccctccaccgccggttactggttcgttgttgtatgaggacatagatgacaggtggatgcatttcgggaatcatctagcacccgcgggtgagatttgtgttgtccccggccaggtatcagcggactacatggagcggtttttccagatatctcaccctttcatcacgccgacccaagaaggtgatgagcccagacatccacttgccccagatgtggatgcatacgtcgagccacatatcccagaggttccagtcgcagttgatctccctagacattcagtggttgcttgtgaaggttgcgaagagatcacagaaaggttggagcgtgtgttcaaccttaggatggtcactgcaggaacagagttacatgagatcatagaagattgcctgcggattgctaggggtgacgcctctgatggaagtcttagggcgtgacgtagacagcgcatagattagtttttgatatcatgtgtattatttttgtatttgataacattattgtaattgttacattattttggcaatacaatttttgtaaat

SEQ ID NO: 124914 - DNA, 387 bp, Glycine max
  Clone ID: PAT_MRT3847_83806C.1
gataatgttatatctatgcacgatatcatacaagaaatggcttgggagattgtgcgccaagaatcaattgaggatcctggaaaccgtagccgattgatcgatcctaatgacgtttatgaagtattaaaatataacaaggggactgaggccataagaagcataagagcaaacttgccagcaattcagaatctgcagttaagccctcacgtgtttaacaagatgagcaaactacagtttgtctattttagaaaaaaatttgatgtatttcctcttcttcctcgtgggcttcaatctttcccagctgagctaagatatctttcttggtcgcattaccctctgatatctttgccaaagaatttttctgccgaaaaccttgttatatttgac

SEQ ID NO: 124915 - DNA, 211 bp, Glycine max
  Clone ID: PAT_MRT3847_83807C.1
gcatctcctatattattttcttagtgttctacctctctatgttgcttgtatggatatctacttgttgtatatggagcatttgtttttatgtacttggtctatatatacatttggtgataattgtctattttatctgcgtctgttctctttgctacatagactgatactttttgatattccccactatgtgcttcacacagtgtatgcccac

SEQ ID NO: 124916 - DNA, 950 bp, Glycine max
  Clone ID: PAT_MRT3847_83808C.1
aggggctctaagggggcatatgagcatttgacccatcaactatcacaggacggcagcctaaagagcagtggaaagctcaattcgcaagtgagtggcggacggacgcacccatacacacagcagctcttgttgatggactgtgattcgcgggaggaacatcaagttcgcggtggttgtcgtcgttcataacaatgcggatgagatcagcgaagatagaatgattgccttgcggaagcgagcggaagtggatgccaaacacgtcgtcgttttgaacccgaacgacacttcggatctcaaacagtctcttcacaggctagcgagtacgttttctgaattggccggcacgtattatagagaagaagggaggaggattaagcagcgggtagagaagaagaatgttagctcggttgagttgattgttcgctactgcttcaaaaattccgaagtgattggactgaagcaatgaaattttatgaggaggcctatcatacactgcgagagattgttggggtgacaacaaggttgccagcagtacaacgcttagttgagataaaatccatatctgaacaattgcatttcaaaatatcaaccatgttactgcacagtgggaaggttacagaagcagtgacgtggtttcgccagcacatgaatgcatataaaaggcttgttggtgcaccagatggaatatttcttcactgggagtggatgagtaggcagttattggtattcggtgaattgttggagacaagttcaaaaataactcaaggcgtttcacctattgtcctaggcaatccatccaagcctctgtctgagtgggaatattattctgcttattactaccaagcgagcactttttactcgtattatactctgtatgttgagaaagggaaatgactaccacttttgttagaactccccccttatagggagggctttcttctggccatatt

SEQ ID NO: 124917 - DNA, 696 bp, Glycine max
  Clone ID: PAT_MRT3847_83809C.1
gcagcacagaggataatcaaatataaactgaaagaaagttagaagctgaaggtacattgccttataccagctagcatcacgaaccatttgctaaactctacattgttagttacaagtgaagccataagaagctaattatcaacttcaaacatctgcacatggaagtagaggcttgtgactgcctcctgaatatttgattggcatcagagctggatcattatatgctttgaccaacttatcataaaattcaagcatgttaggctcattttggtcttgtctatccttcttgatcaagcattccgcaggataagccttgaaaataggaaagaaacgtttctggcaatactcattgaacagaagtgtgagaataggcagaggcagatttaaggcagatgctattggaagcttcttcagcccaaatatcccaattactataatatgcatcagaaccaatgaaaaaattgtgtagttgtgcactgtaggccaaaactctcctccagtctggtactttgccatataaacatttaagagctggttgcggtaaatgatgtatcccaaacaaaagtagaccaagataaatggaagtcttagatgagcaaggatgaagtctctaacaccaagaagaccaaagaaaagaatcctgggaatttcactgtggtattgaattgatggggcctcaaaatcatcatcatcact

SEQ ID NO: 124918 - DNA, 403 bp, Glycine max
  Clone ID: PAT_MRT3847_8380C.1
aggcctcgtgtagtcagctgctctttcagctactggcacacggagcgccagattcttttctgtatatcggcaggcccacaaaaagtgtgagatcaccagccatccagcgcgggagggcaccaagattatatttgaacctggactgctcgccagataaaccttgtgacctaagggccatgaaaatgccagaatgatggacactaactgacaaaggttatctgggaaggtgtgcatggctgaaggaaaatggttaactcactcccctgattgggtgaacaaacgcacctttttgtcaatctggcagagacgaaaaaacaattgttcttcgctttggcatacctgaaagagtaacttgatgacacaattcctaatcatggtcatggccgttgtctgacaaaaattg

SEQ ID NO: 124919 - DNA, 308 bp, Glycine max
  Clone ID: PAT_MRT3847_83810C.1
gcatgcgtaaataagcttggtgacaccatcggttttgatgcttaacacgacaagtgggcgcccaataaaaagaccaaccaaacacacgaatagaaattttcacaaaacgaatcccttacagccacgcctaacttatgtgatttctacagcagctactatgagatgatagcagcacatactggtacccatgaagtgcaagatcaggcaccgtctacatacccatctgaagatgtgataggcgttaatcagacaaccataatcaatatatctgcctatgaaacaaataaatggaagatacgttttcaact

SEQ ID NO: 124920 - DNA, 332 bp, Glycine max
  Clone ID: PAT_MRT3847_83811C.1
gcacaaacctgtgtaaattacctatcattttggatcgcggcgatcccgccaacatactactttcttttaggcaaactggagcggcgataaatatagcgggaggggttgaggagaaattattcgttcacaacacctgctgtgacacctgaatattcctcacgctgctattgatacagcccggtatctagaatacttctctttggtgtatgataatatcaagcagatccactggacttgtatgattgtacctttttataccatccactctaaacgatcggtgtggataaattctgattgatggcccatgttggtgaatgcctggctgatcctca

SEQ ID NO: 124921 - DNA, 603 bp, Glycine max
  Clone ID: PAT_MRT3847_83812C.1
aacttgagtgggagtattagtccatcactcactctttccaatagtcttgagaggctgaaccttagccacaatgttctttctggttccattcccacttcttttgtgaatatgaattcaataaaatttcttgatctttctgagaactcattctcaggaccaatgcctgagagtttttttgagagctgttcttcccttcatcacatttctctagctaggaacatgtttgatggaccagttcctggctcactgtctagatgttcctcattgaatagcattaatctttccaataatcatttctccggtaatgtggactttagtgggatttggtcattgaacaggcttacgactttggatctatctaacaatgccttatcagggtctttacctaatggaatttcatccgtacataacttttaagagatcttattacaaggtaaccagttttcatgtccattatccactgatttttggattctgcctgcatctgaatatgttggatttcagtgataattagttcagtggataactgcctgaatcactagggatgcttagttctttgagctatttcaaggcattaaattatcatttccacagttgattccc

SEQ ID NO: 124922 - DNA, 142 bp, Glycine max
  Clone ID: PAT_MRT3847_83813C.1
gattaaaagatacgtttaattctcgtttcgaccaaacttccagaaggggaatggctttctttttgttccaccaaataacctaccccggtttaccactgccagaagggacacaccatatggtgtaatttttattaaaatattt

SEQ ID NO: 124923 - DNA, 310 bp, Glycine max
  Clone ID: PAT_MRT3847_83814C.1
cccacgcgtgcggtggaatctaggcctatgaatccatagagatcacggttttcaaacatcagggaacgtagcagcagcggtaacagctcgtaggacatgggctcattcggaaggatcgccggccgcaatatcagggcaaattacagatgaaaagcaacgataaactggcggtgataattgtgattccaagccggcaggaaatcatataaatggtggttctaaagtctgatcgataactgcctatattggtatctcatttgaattcattgtctcacgattgtccaaagatcactaccgacatgagagacag

SEQ ID NO: 124924 - DNA, 965 bp, Glycine max
  unsure (1)..(965): unsure at all n locations
  Clone ID: PAT_MRT3847_83815C.1
gtgacagccaccactctctccttttataagaacagcacactctgatcgaggttgttttgtttcatgtttgttcccccatggcgccaattccctaactaacaacccgtttcctcggacaactcgaaccaccaaaatgaagtctgcgcgagtcaaagaagcgattctgttagtgtttatgtttagtctcttaagcattgcttgttcggatctagcttcggacagagcggggttgttgttactccgaagcgcggtggggggacgcacgttgttatggaactcgacccaaacaagcccttgttcgtggaccggcgtgggttgcgccagcgggagagtaattatgttgcgtcttcccgcgatgggtctctccggttcgcttccctccggtttgggcaacctcaccgaactgcagacactttccctccggttcaacgcgctaaccggacgaatccccgaagatttcgcaaacctgaaatctctccgtaacctctacttgcagggaaacttcttctccggcgaggtctccgattcggtgttcgcgttgcagaatctggttaggttgaatttaggtaacaacaatttcagcggtgagatttcgccaaagttcaacagcttaactcgtttggccactctttatttagaacgcaacaatttcactggttcgatccctgaccttgatgctccgccgctcgatcagttcaacgtgtcgtttaattcgctgaccggatccattccgaaccggttttcgcgtctggaccgaaccgcttttctcggaaactcgcagctctgcgggaggccattgcagctntgccccggaactgaggagaagaagaagagtaaactatccgggtggtgccattgcgggtattggtattgggtccgtggttggtgtgttgttgattctgctacttttggtcttttggtgtagaaaagggacaagaaagatgagaatgaaactttgccacctg

SEQ ID NO: 124925 - DNA, 564 bp, Glycine max
  Clone ID: PAT_MRT3847_83816C.1
atttcaacaggtagtagtaattgaccttatcttatccccacccgccacgaccacctgggaatgtcaatgaacgaatggaatgtataaaaccaaccaatagcttcacaatctttcttgcacgccattggtgatcacttccgatagctctcacaatcctatggcggagaacaacaacaaccaccaccttgaaaccgccaccagaaggcttgcctctgtgaccaaccacctcacttccggtgggaacaacagcttccgccgcgtccacggagaagttccatcccacgacgtcgtttggaggatcgtcgcctccgaccacgacaactccggcaaggacttcaccgacattgtctacgagaaggccgtcggggaaggaatagccagataagtattaataggccagagagaaggaatgcgttccgaccccacacggtgaaggagcttatgcgtgctttcactgatgccagggatgatagctctattggggtcgtcattctcactggcaagggaaccgaacattttgtcgtggtggtgaccaggctttgaggactaacgatggctattctg

SEQ ID NO: 124926 - DNA, 852 bp, Glycine max
  Clone ID: PAT_MRT3847_83817C.1
gggaagaagtattagaaactctctttacttctagtacgcatggaaggatatgaatgaaataatctgcgttcgcgggttgcgcgtcttaagctctcatggcaggtttgattcctcatccgatgcatgccttctgctcccaaaaaccccaaacattacttgaatattcattgtcaaaggttgtttttgtgagatagaaagaagagaggaagagcaagttaagcaatcaatcatatcaaggaagcaattatggaaggtttgatcccatatcttattcatgcaatcaagaagcaaaagcctcatcaccacaactacaggagctactctcattctgaaagctcaaaccgcagctaccacatgctattggcgtctgaatccttcacaggatcttctcacagaagaacaaggtctgattttcagccccccacaagtgagttcttagagcagagatatggtgttgatggattcttggtcagccccagagcccaagttactactgctgctcctcctgccactgtcaatgttaatgctgcccaacgctctaacaatatcaccaacatgcgcaatcgcaagtgatatatatcttcaacatcataggggatggtcaacttttcttttaattttttggacccttagatatttattatatgtctcttctaaggtttgattcatttgtttaagatgacggttgatgggtgattaccaattgtaatcttattgtgtatacttctaatctctaggggatcaattgtaatgaatgctagatatggtatgctttcaatgaatgttatataaaatttgtagacaaacaattctcttcccctctgtcacagcccaatattgagtaatcagtac

SEQ ID NO: 124927 - DNA, 1109 bp, Glycine max
  unsure (1)..(1109): unsure at all n locations
  Clone ID: PAT_MRT3847_83818C.1
catgaatctcatacatgcaaatttagaagatcgagtttctctatgtaataataaaagatatatgaaacattaattaatattccgggaagaattacaggtgtaagaaaagatgggcaaatccgccacttctttcacaggccatctaaagcatacacaaccggaacaaggaaaagaagaaaggttcacactgataaagaaggaagcgagacaaggtggcacaaaacaggaaaaacaagaccagttttcgtaggtggtgctgtgaagggtttcaagaaaatccttgtcctctacaccaactatggaagacaacagaagcccgagaagaccaattgggtgatgcatcaataccaccttggtactagcgaagaagagaaagatggagagttggtggtttcaaagattttctaccaaacacaacctcgacaatgtggtaataattccattataaagcaggatctttatgatgaagaaagattgatgtctaaccaaattagtgtccataatgatgatgacaataatataatacctagaagtaataatgcaagtgctctcatggactactacaatccttctttcataaattatgaccaattaggtggtcgtagtaatagggaaagttcagctcaacttattccaaatttggccatgcaaggtgatagctcttctttcattcgattagcaatggatgcaaccaaagccatgctggacagaaaatagctccaattgatgaaagaactttcttggtagaattctatagtagtgacaatgaccatatattgatgttgatgttttttatattaatttcaatatacgtaatagcatgtatttattctatatatgggatgataaggtgaaagaaataataagacatgacttttattattattattataattattattattattattattattaatatatatgtgtgtcgaggattacccatttgacgaccctggttgcaattgagaggagataaccggttgttcccggtactgtggtgttnttatcttagagtttaagtgtaccaggtaaattntgtaaaatctgttcaccatgtgattctnatatgtcaaaattatgcagaagtatgtttgttttaaagttca

SEQ ID NO: 124928 - DNA, 770 bp, Glycine max
  unsure (1)..(770): unsure at all n locations
  Clone ID: PAT_MRT3847_83819C.1
tcgacaccgcgtccggtnnttttagctcgggccacgctgnntgtnncccccagtcgccctcccatcgtgcactagctgtctnaaaagattcaaagtccaagatggcaaccctcaaggaccagctgattgtgaatcttcttaaggaagagcaggctccccagaacaagattacagttgttggggttggcgctgttggcatgggttgtgccattagtatnttaatgaaggacttggcggatgagcttgcccttgntgacgttatggaagacaaacttaagggcgagatgatggatctccagcatggnagccttttccttaaaacaccaaaaattgnctncagcaaagactactgtgtaactgcgaactccaagctggtnattatnaccgngggggcccgtcaggagagggggagagccggctcaacctggtccagcgaaacgtgaacatcttcaagttcatcatttccaacatttgtcaagtacaggtccacactggcaagctgggtggatcgtcttcagatccaggggatatcttgaccttacgtggctttggaaaaatagtgggtttttnccaaaaaccgaagtattgggaagtgggttgcaatctgggattagcggcggtttccgttacctgatgggagagaaggtggngggtttacggccctgagctgtcacgggttgggtcctgggagaacatggcggantccagggtgccctgtgggggggggggggtaatggtggccgggggtttcccttggaagttttttaccc

SEQ ID NO: 124929 - DNA, 341 bp, Glycine max
  Clone ID: PAT_MRT3847_8381C.1
ttttcttaatgttgtcgggaccaatttccatttcattgggaatctaatgtcggctgaacgcttgcgaccctaaatacacatggcgcggggaaattttcacccccatttttttttctgttcttgttgggagaaaggggacaattttaattgggcgggggctatccccttcctctggggatgggaaccacctaaagttatcttttttcaacccctgtgctttttaggggggtccaaatccccccacaaggtgaatgaagggaaaaacgggcgaagggaaagaaattttggaaccctgggaaaaaaaaagggaattggttttaaaaaagcccctgaatgccccc

SEQ ID NO: 124930 - DNA, 220 bp, Glycine max
  Clone ID: PAT_MRT3847_83820C.1
ggattcacttccccacttcaagcatacttgggctcatgagcatgaccctgtaggcagtctcttataagttgctaaagtaatcatccctactgttttgattgagccatcaggaaaggtaaaaacatttacaaaggaagtaattgacgctgagacttctataaatgaaaaacctcttgatcctgtatctctctttccaacttcacatgctgagtgtacagct

SEQ ID NO: 124931 - DNA, 335 bp, Glycine max
  Clone ID: PAT_MRT3847_83821C.1
aactaaaatacttttttgttgttttcggtatttaattagatactgatattatacacccatacacatcggcgcaaagcgagaggctattaccaacatctacaatggtacaagaaaaaaaaaattgtgaccaaccaaagcaaccaaccgggtattttcccattgccatcgagttaatggtgtattgataacgtaccccaaacacaatacacccgccaaatttttaccacgttataactacgcaaccccaaccaatgcccatgtggatcgccctaaagaatgtccttcattaaacagctggttacacctctatttggcactatcttttacctatattc

SEQ ID NO: 124932 - DNA, 388 bp, Glycine max
  Clone ID: PAT_MRT3847_83822C.1
cagattaaaaggtcgagtgaatagaagagaacaaaattttggtaaacatcaagaaggaaaatagttaatgactaaaacttcacctaaaatagcagctcatgataacaattagtaataaaagattaatcactaaaaatacaatgatctactcagcaaaccaactccttctccaatctcaaatcttgatgctttggggatcccttggaaatatcaatctcaattaaattttcatcctcattcatctcattaatttctgcccagagctccgtgagaccttgttgcttgaaaatggattctggcaagaactctaaaaagtagttgtttggaagcttgatttcaatcaagccatcctcctcctcctcatcaacatcataatcaaagaccaagc

SEQ ID NO: 124933 - DNA, 331 bp, Glycine max
  Clone ID: PAT_MRT3847_83823C.1
ggcttatctatgttcctagaacgagagggtcctgctctcgatctcgatgtcggctccgcctactcttgaggcgaagagcggcatcatagacctacctcagatactcaacgtccaccatgggatccaaggaactcctcatggcaatggctctactgatccggctcgtttcactcagggtcctggtagagagccggtacgaatgacacccctgatcaccgtgtctcatgccaaagaagatgatcgcccacagattcaacgacacctgtgagcttagcgactacacaccggaggcttctgatgacgtccatcgtgctgatgacaccccactgac

SEQ ID NO: 124934 - DNA, 169 bp, Glycine max
  Clone ID: PAT_MRT3847_83824C.1
gtcgaccttcggagccgacgcgaatgcgaatgccaacaaatcctacgaggtatcccaaccaccctctgatgcaatatctagtattaggttcagtcccaaggacaatgtcttcgtcactacttcatgggacaaccaagttcggtgttgggagataacaaggaatgggact

SEQ ID NO: 124935 - DNA, 245 bp, Glycine max
  Clone ID: PAT_MRT3847_83825C.1
actaccgggggcgttaacttggaccccgggctgcagattcggaccaattaccatgtgtgggtggcattggggtatgtggacaacttgcagaccaaacttgttgtgctgctgctgttgttgtgcccacaacacaccgggttgatgtaaacgaggttttaacgttatcatatcatctatcatctttctccttgttttttttcctattcagggctttctttcttctcttttacccttcacttcacccc

SEQ ID NO: 124936 - DNA, 104 bp, Glycine max
  Clone ID: PAT_MRT3847_83826C.1
cgcacacagacctaccgtaagagctatggaaagtggaggctttcacggctaccgcaagctccccaacaccaccgctggtaaaccggatagtattacattaaaat

SEQ ID NO: 124937 - DNA, 223 bp, Glycine max
  Clone ID: PAT_MRT3847_83827C.1
gttttacccagtgctcacagattaggagttcaaaatattcttcacgggaaaaaatatttaaacaaacacctcatatgacccacgactaaatttgttaacggctccagttcacctggagacaatacttgcttatggctaacacgtattatgggcaaagggcttttctttgtccttaaccttactggtgttgattcaaacggtggtgcaaaaaaatcaaaacttc

SEQ ID NO: 124938 - DNA, 341 bp, Glycine max
  Clone ID: PAT_MRT3847_83828C.1
acgattcaatgaaaaaaaataaaaaaaaattttttatttatacttaaaaggagaaaaaggaaagattaagaataaaagaaaaaaaaaaaacacttgataaatataaatataagttgtgtaaataaaaacaacttgtgtaatcatacttaaaaatgaaacaatacggcgtggtgatcataagcaatactacccttgagtccatgtcacttaagaccttcttttaaagaaatacatttatttcgtcaacaatcatatacttcacaggactatactgctgagcatagaggagtactgaagggcataagagagtaccaccaagaacatactgtaaggctccagct

SEQ ID NO: 124939 - DNA, 577 bp, Glycine max
  Clone ID: PAT_MRT3847_83829C.1
aaaacatattattttcattttcatctttttttgagtatcaacaaatggcaaccactgtgatgaccactctcccccaattctcagctgcccctgtgaagaacttggttgctgtgcaacccatgagtcgcaaggggaagggtgcattgggagctcgatgtgactacattggttcatccactaatctggtagcttgagtcatttcaaagtttccttgttcctttttgttgtttcatctgactttatttacaaagcataatagatagtagattcaattcttttggacgggtatatatgaaaatcttgtttatacatgcaacaatcttgtgaaattgttgagtgcatatgcataatggtactgaaattcgtgtagtttctagttcagttaccatgtgaaagaagtgattgagagtatgtataagtgttaattggaattatcacatactagatttttttaaaaataaataggaaatcttgtatattaatgtaaagtatgagatactgcgtgtaaaacattttatcaaacttatacaagagagtttctacgcattagctacgaaagaagttaatttttgcttat

SEQ ID NO: 124940 - DNA, 569 bp, Glycine max
  Clone ID: PAT_MRT3847_8382C.1
tttttgggtccagttcgggtttttcaaaagtgggtaccccttaaaatgccatcgaatcttcgttaatgtctgatgtgagaccagcgtgtgcaattccacttccaggcttggagtttctaagattcctactggtacgtgaagtcttccatgattgaacactcaaaagccttgtgttcacacttcgcctcgtactctcaccccagaagccacttcttctgtttcttccaattccctcacaaactttagctagattgcggccactcaggattgcacaagttgaatccattggtgaatcaacaacggaatcagaaacctttttggatttgatacctttctgctcaatggaattgggactagtgagtattttgtatgcgtgaagaaaggagctaaatcactttcataaagtaccaaacttttcagacaatttgcaccataagttgaggaatcataactggggagattcaagtgaaaagggccccaaaaagacgagatttttcagagaacccacttttcaaattggagaattggtagaagaaaaacgaaggtggggcctggaaggtagaaactac

SEQ ID NO: 124941 - DNA, 288 bp, Glycine max
  unsure (1)..(288): unsure at all n locations
  Clone ID: PAT_MRT3847_83830C.1
gtntcgggggaagagatccagcagcaatggtgtacgtcaaggctcagaaatcaaaagcctacttcaagagatatcgagtcaagttcaagagaagaagagagggaaaaaccgattaccgtgccaggattcggttgantaatcaggacaagaacagatataacactccgaaataccgatttgtgggtcgnttagcaacgaggncattgttgcacaantnatatctgcntagcattggccggcgattaagtcttgctacagnatattcacatgagtgccacgatatggntt

SEQ ID NO: 124942 - DNA, 247 bp, Glycine max
  Clone ID: PAT_MRT3847_83831C.1
cttgatcacaatcggatcgatgcggattgagcctacttgtactttcctttgtgttgaaaccttatccatgatagctgaaggaccaacccatgtttaccttcgcttggtgtctatgacggccgaccctgactcttagaactcgactgcctctctggtgactacaaggatactactattccctctatgtgaactatagtttcgagcctattttcatatgagcagcttgcctgaaatcgacacaccaaca

SEQ ID NO: 124943 - DNA, 389 bp, Glycine max
  Clone ID: PAT_MRT3847_83832C.1
cccacacgtccgctcacgcgtacagtcattatctactcctgcacagtctttgaagaggttgccacagcagaatcacttcgttgccctctccttgtccaatctcatgatgtcaatgtcattcatcccgtcttatctgaggtggctgttatgtgcggatggcttggcgttaattgcatatgtgtactactatctcatatgatggtacaggcctactattttgcacttcactccagatatgattagctgttagggtccagacgaactatgggtgctagacttactggtatgcaggttggagatcttgtatcttatgcaggtcatcctttggactcatatgctgaagagctgatacttactcctactaaaggattccctgttccttagtcaat

SEQ ID NO: 124944 - DNA, 852 bp, Glycine max
  unsure (1)..(852): unsure at all n locations
  Clone ID: PAT_MRT3847_83833C.1
gaattcgagcctcgtgtacccggggaatcctctttagagtcgacctgcagngtttcacgactaatctttttaatccaatggaactgatgctaacttaaaaaaagaaaagaaaaattaagaaatgtgggtgttattttctagtattttttgaagcctcttttaatattcattctaatttttattttctagtttacaaaacttcaagaagtgaaaaattataatttatgtagaacaaatcacagacgaggatataaattaaaatagttggctctttgtcttgttactctgttatgcaatgtaaatttacgtgaaacaattgaaatatgccaccaattatcaattaccacagccgttaataacagccatagattttaaaaagaataaaaaattggtaatacgaatggcttcacaagtcacaacataaaactcacttctcaatttgtttggtgaaacaaagccaatatttacatttttacactgaacacattagaatgttcacaacaggatatttggtaccagccaccaccaaagaaaacacaacaaactataagcaaagaagctgttaagtaacattcctcaatttatgcgctataactatgaaatnttatgcgtgtncaaagggtgtcaaagcagaataactatgaaacttatgctctatttgtcttgcaatttcaccatgataccattgccaatttagataaccaacanagttggtagaatgacaaaataggcttgctcagttcattntgacccgcanaattgggatgggacggactagcttgctttggcttgatgagttgaacattctgatcccacccgtcaagaagtgaactgacgagctagttcatcttt

SEQ ID NO: 124945 - DNA, 408 bp, Glycine max
  Clone ID: PAT_MRT3847_83834C.1
gggtgttttcttttttttgttttttgttttttttttttttttttttctttttttttttttgtttcttgctgtttaggctaattttgttggacgcttggttcttgtggggaaaacacactcgcgcccaaaagagaagaggaccacccccccgggggaagcaacgggggggtgtaaaacaacgggggggggaaaaaaaaaggggggcccaaaagaagaaccgcccgtctaaaaagaaagggccacctgttgtagggaggatcccccgttggggaaacaggaaaccggggggggaaaggggccccaaaaaaatggggggccccccaaatttatggggggcggaaaaaaaggcccccggtgaaaaaaacacccccggggggggaaaaaaaaaccccgggccgacaaaaaggg

SEQ ID NO: 124946 - DNA, 331 bp, Glycine max
  Clone ID: PAT_MRT3847_83835C.1
tgggagagcttatagtttaagagcaagagctatggaaagggacaaacgggccttcttagatctcaagggccttaccctcgttctctcctaactctcactttgtcttcttatttgctccttttcttctctcttccctccccaattatttcattccctcatggccaccactctttattcaacgccttgtctttcactggctacttcatcctcctttttctcttcttatcaaccctgtcctctgtcctctaactcttcttactctcaactcattaaccttttacaacgctttttcgccttcatagtctctcttaaatcttataccctcacctta

SEQ ID NO: 124947 - DNA, 326 bp, Glycine max
  Clone ID: PAT_MRT3847_83836C.1
atacccggtaccgagatattctctcgggtacgactccactgcagctccgctccacggctgtccaaacaacgacgtccagggcggtgtgcgattaagacgacaaataagcctagcttgtgggatcatacacagcacttcaggcatggaaatctgctgccactgaggaccgtcttatgatgttatcaagctacattggttccaatgtaagtgcttacaactgagtcttctgtgcctaaaaccctcatgatgatacggttggtgcatcaggagcattcccagttgtcagaccaggcataaatcttacccatgcaaatttgaaaggaact

SEQ ID NO: 124948 - DNA, 273 bp, Glycine max
  Clone ID: PAT_MRT3847_83837C.1
cggctcgagggagatggaagagtggaaatttgacactctgtgtgacctctacgacacactgaccatcactcaggcggtcatcttctgcaacaccaaaagaaaggtggactggctgacggagaaaatgagggaagccaacttcactgtatcctcaatgcatggagacatgccccagacagagcgggagtccatcatgaaggagttccggtacgggcgacagccgagtgcttatgtctacagatgtctgggccagggggttggatgtccctcagg

SEQ ID NO: 124949 - DNA, 386 bp, Glycine max
  Clone ID: PAT_MRT3847_83838C.1
ggattctggaaatataccaatatagtatgccgtactggtacgcacgtgtgacatcgtatgctgcaaaccgctgaagttacttccacttttattaccgtgcgagaaatagcattatcctaagcgaaactacgcggtgctttcgatgcagacccagatgagttgtaagtatggatttcaagtatctgctggttggtatgtgtgtttgggcttggtttggatcaataacttttgcaacttctaatgatgggaggttgatgaggattggtctaaaaaggaggactttagaccttcagtgtcttaaagctgcaagaatcaaagaggctggtcatcacagggatttagggggtgttaatagaaactgttgtgatgaagatatagtatatctt

SEQ ID NO: 124950 - DNA, 609 bp, Glycine max
  unsure (1)..(609): unsure at all n locations
  Clone ID: PAT_MRT3847_83839C.1
ccacgcgtccgctttactcatggcccaaaaaaatgttgtttggtttttctttaagttttgtattatttgatggatgtaatagaaaatgccaacggagatgccaaaagggatgaaagtgaagaaagaagagaatgataatagtactagtgaggtggcatggcaaatgtggcacctaaatgggacacggtgtcctaagggaacggttcccatacgggcggagcacagtgcatgacgtgatgagagcaaagtctttgtatgactttggcaagaacggtacgagttgattcattcccctctctcgccgccacgatgcacccgatattctcagcggcaatggccatgagcatgcgatcgcatatacggggtcatcgcaagagatgtacggggcaaaggcaacaataaacgtatgggatccatcaattcaagtaatcaacgagtttagtctatcacaactttggatcctttcagatcttctagggctgtcttataaatcnaaannatcgaactgatggaggttgtccggancctatnttttttnnngacaacaagacccagattgttcacttattggacgagtgactcgtatcgggcaaccgggtgttacaacct

SEQ ID NO: 124951 - DNA, 678 bp, Glycine max
  Clone ID: PAT_MRT3847_8383C.1
ccaaaaaaaaactttcccttcccaagcccccggtacgtaaacttggcccccttaaaaccggccccccctttttttttttttttttttcccccccttttttttttttttttttttttttttttttttttttttttttttttttttttttttttttttttttttttttattatgcagcagaataatattagtaacatttatctctcttatttttttctattgtccatatctccaaatgtactaacaatttaaattttaataaacggttaaggtgtatcttagataatacagacacgttatttcttttcacatgtgtgtatgctaatttttatccttgccgttgaggcttgttcaccaggatgcgcttagaggcctcttcattgacctcaatttttctgtcctcttttgagccattgttgtgtgctttctctgagaaacggattgttggctcttgcgttcagcttcagccagagtttgtttgagcttttcgttctcttcctttagcagattcaactctgcttctagttccaccgtatatgcctgccttacaagattttgacatcagggaaaagaccttgaataatgtgcatatataagatagaagtaacatagctcatgtaactaacatagcacacaaaatgaacaaaaaatgattagatgaaatatggcgtaccatacta

SEQ ID NO: 124952 - DNA, 920 bp, Glycine max
  Clone ID: PAT_MRT3847_83840C.1
tcggcacgagcaccaactttgatcaattctcatctcttgtgactcttctctgtcactgcacatacctcacttactcggctgttagcaaacatgggtgttcctgaattgatgttcagggtatcttttatggctgtactcatcaaattggcctcggctacaaattacattgttggaggaccaagtggtgggtgggacacaaactcaaaccttcaatcatgggcatcttcccaaatattttcagtgggagacagtcttgttttccagtacccgccaaaccatgatgtggttgaagttacaaaggcagattatgactcttgccagccaactaacccaattcagtcttacaatgatggcgccacaaccatccctctcactttaccggggaaaagatacttcatctgtgggacaataggacattgcagccaaggaatgaaggttgaaatagacactcttgccagtgcaacaaattctgtcacaccagcagcatctcctgaagattctactacttcacctgcagaatctcctgaagtcattatctcctcatccccaagtccattgttccagacacatctagaaagtcctacattctctccagtcattccttccactgaatttcctgcttctacttcacctctagcacaacattcatcagacttctcagcttcatcaaccagtaaaggaaatctacaagcctatgtcgcagtagtgttaagctttctaatcatgcttatgtccttctaaggatgggaaaaatctcactcaaccgttgcttctaagtttattacatgtgaaaatttattttgctgctctctttctcagtttggtgtggttattgcttacaacttcggacttcgaagatatataatttctatgagcatgtattattattcaatgatatttgattttagaccctattactg

SEQ ID NO: 124953 - DNA, 1689 bp, Glycine max
  Clone ID: PAT_MRT3847_83841C.1
catgcgcccccctataaaaccctctctcatctcactattactggtctccacatattctctttcaccacttgaagattctccttttcaaatttcaacctttttcccccaaaactaacaaacccctcttcttctcaatcattgcatggctcttcactgattctataataataatttcagattcgtttttcgttttttgttaccatggagttgatttcaggtctaccagaggacgtagcccgagactgtttgattagggttccctatgatcaattcccggcggttgcttcagtctgcaaaggctggagcgcggagattcactcgccggactttcaccgtcggaggagaaccaccaaacaagcccagaaaatcctcgtcacggttcagtccaagatagactccgataaaacccgaaccggtttgctcgcgaagtccaccaccaacccggtttaccggctcagcgtattcgaaccgaagacgggttcatggtgcgagttacccctgggacccgaactcgctttcgggctccccatgttctgtcagatagcgggtgtcgggttcgaccttgtcgtaatgggcgggtgggacccagattcgtggaaagcgtcgaattcggtttttatatacaacttcctgtcggccaaatggcgccgtggggccgacatgccgggtgggccccgcacgtttttcgcctgcgcgtcggatcagaatcgcacggtttacgtcgcgggcggacacgacgaggagaagaacgcgctgaggtcagcgcttgcgtatgacgtggccatggacgtgtgggtcccgctccccgacatgtcgcgtgagcgagacgagtgcaaggccgtgttccgacgcggcggcgcgctctgcgtcgtcggagggtactgcacggagatgcaggggcgcttcgagcggagcgcggaggttttcgacgttgccaagtggaagtggggcccagtggaggaggagttcttagatgccgccgcgtgtccgcgcacgtgcgtcgacggcgcggatggtgcggaggggagaatgttcatgtgccggggtggtgacgtggtggcgctgcacggggacacgtggcggaatgtggcgaaggtgccgggtgagatacggaacgttgcgtgcgtgggagtgtgggaagggttgatgctggtaattggatcgagtgggtttggggaaccacatatgggctttgtgttggatctgaaaaatcgggcttggactaaacttgccagcccagaggactacactggtcacgtgcaatctggttgccttctccaaatttagtactacttgacttgttttttttttatcaagttaaaatgctgaatattattggtgcatagtacttcagttttgtttcggggagtttgtgtaaatatggttatatgaagcaacatttttgttttctttggttgctttattcacttactactcaaaagctttatcattttaatttatactttaataaattttaaggagttgtagtacaattgcgatacagaggttcggtgcccctacaccgatgtgcagtacaacaaggaaaaatgtaacaaatgaacatgtgcttacacttcattgacgttttgcttaaaacgaaaaaattaattcgccttggatataggaaattgcatctcctagtagacagcactagatgtgcagtacagcaaggaaaagtgtaacaaatga

SEQ ID NO: 124954 - DNA, 725 bp, Glycine max
  Clone ID: PAT_MRT3847_83842C.1
ctggaacaccatgtccatccctataaaaacctctctcatactcatctccacatattctgatccaacagtctttaacactcgaagattctctccttttcaaatttcaaaccttttcccccaaaactaacagacccctcttcttcttctctctctgtaatctcaatcgtgcatgggtcgtcttcactgattcgataataaaaatctcagattcattcttcgttttctgttacgatggagttgatttcaggtctaccagaggacgtagcccgagactgcttaattaggattccctacgagcaattcccagcggttgcttccgtctgcaaaggctggaacacggagattcactcgccggactttcaccggcgtagaagaaccaccaaacaagcccaggaaatcctcgtcacggttcaatccaatatagactccgaaaaaactcgaaccggtttgctcgcgaagtccaccacgaacccggtttaccggctcagcgtattcgaaccgaaaacgggttcatggagcgagttacccttgggacccgaactcgccttcgggttacccatgttctgtcggatagcgggtgtcgggttcgaccttgtcgtaatgggcgggtgggacccagactcgtggaaagcgtcgaattcggtttttatctacaacttcctgtcggccaagtggcggcgtggggccgacatgccgggtgggccccgcacgtttttcgcatgcgc

SEQ ID NO: 124955 - DNA, 203 bp, Glycine max
  Clone ID: PAT_MRT3847_83843C.1
gccactacaaaaagacaacagaggggtacggctgcaaacaaaacgacaaaaagggagggtttttatcatcactacaaaaagttgctgcatcatcatacactcgacacctcacagccgctgtacactcggcccccctagaggttcaaccctactttcgttctgcatcccacccaagtccccttcaaactcttcacgcaatttaa

SEQ ID NO: 124956 - DNA, 151 bp, Glycine max
  unsure (1)..(151): unsure at all n locations
  Clone ID: PAT_MRT3847_83844C.1
gaattggggtngagtggactctcagggtcgctaagaacgtggagaatgtcactgaatatagcaaggaagggtgagagtcgaataccaccagcgactaatataagattttgattctgtactgtgttagggaggggaaacctgtcaaatgaga

SEQ ID NO: 124957 - DNA, 611 bp, Glycine max
  Clone ID: PAT_MRT3847_83845C.1
gccaccacttcaatccccgccaccaaatgtcaaccaaacccaccaaaacctttccttaccctcacacccaacccaaccttcacgcacccactccaataatattaacaacaaccacaaccctttgtttttgttccttacacaccacacaccttcctcatcaatcaatggcgacccccccaaacgacgccgcatcgacaaagaagccccagcccataccatggacccaccaggagaccgtgcacctcatccgcccctaccaggagaagtggtgtgcccttaagcggggcccactccgccacaaccagtgggaggaggccgccctcggtcccgccgcccgccccggctccgccctcgccccccccgcgaggtccgcccccccctcccgccgcgccctcggcgccacaaccagtgggaggaggtcgccgtcgtcgccgccgcacgccgcggccgccccccgccccgccccgccgcggcccccctcccgcgccgccgccctcgagcgcggccccctccccatctccgccctcgcccctctcgacacctttgaagaagaagacgaaaacaacgacgacaccattgacgatcgaaacgactatgatggcgacgggagt

SEQ ID NO: 124958 - DNA, 640 bp, Glycine max
  unsure (1)..(640): unsure at all n locations
  Clone ID: PAT_MRT3847_83846C.1
ggccagttgaaggagatctccttggtcaatgtttattggaatgatgttcacactttgtgaaaatcattgaatattgctcttaataggtggcatacatttgtatttcagaatgaaagaattgtgtaaaggatatcgcaacactcaagaaaaaggtctctttggttcattttctattttcatttttaattacaaaaccacgtcttgtttttaatttgttttctgtttttaaagatttgtataggaaaaaaaaaggagccaagttattttcaacattttgggtacaaatatttaaaacagaaaataaattcaaaataagatgacgattttaatttgtagttataaaagtgaaaacagaaaagagttttttttcttcaaaaacatgccttattgtttgcttacaaagaagaaatattgatatttcatctactgtcgtaataattctacgagactaccacaccccaagaagtgctgattcatttataccaatcaatctagtctcacagtcttcctcagaactcttgcaatgtccaaaattattcttcatgcangggagttgaactaacgcaagacaaccaacaactgaaacgggtaaactgttntaaaaattatatcatttatactttntttttactatcgaatc

SEQ ID NO: 124959 - DNA, 506 bp, Glycine max
  Clone ID: PAT_MRT3847_83847C.1
gggacaaacaatatggaaaattaaaaaattaatattacaaaacaaaaagattaacggggtttaaactacccagtctttgaacaaaggcaacaaaggggggggaaacccaaatcattaggccctactataaaatttaaacaaaacaaccgggagggaaagttaaatttgcaaagttccccaaaaaaaaaaaaacccatagtttaaactaaacaaaccactttttaccaaagacgggaaaaacaaaaaaaagggggccccatgcctgcaaggcaattgccaaaaagcttgcaaaagggctgacctattaaaagccagggcccatttcctttcgcttcagttcaaaagcaaaacgttcattttaaagcttaattttttaattttcaagggtaaatttctccaactcccgaacctttttcttacaaaacctcggccactgaaaactctggttctttagtcccaacatcccgacccgaaattggagcttttgttcttcaaacggaaggggg

SEQ ID NO: 124960 - DNA, 521 bp, Glycine max
  Clone ID: PAT_MRT3847_83848C.1
ttgaaatctgtttctggaacttgcatttcagaacttgtcttttcaaaagtttattttatttttcacaatttgaagattaaggacttcacttggtgcttttccttcttccttaggaaactcttcattagatcccttcaaaatagaatcatcacttgtaaacaacgggttagaacataagactttgtaattatcctttggaagcactttttcaatttccttcaaaaatgtatcatcacaattaaacaatggcttagaataaaaacataagtactcttccttctctttatctttttctatcaattctttcttttccatctcttttttttttcaacacttttctatctttttctttcaactctttttctatctctatttttctctcaatgccttttctctctcctctttttctatctctatttttctctcaaagttttttctctcgtctttttttcttttgattgctcacattctcgcttttctcatccttatttggtcttctaagtcttgctttggaaacaaag

SEQ ID NO: 124961 - DNA, 433 bp, Glycine max
  Clone ID: PAT_MRT3847_83849C.1
aaaaaaaaaaaatttggggggcccccctaaggaattttttttcaaaattttatgaatccctcaccttaagtatcactttttcatccctggagggaaaaacatgaacttttttaagcccctttacaaaattaagtttttttttacagaggagtttaattaatcacttgggaactataggtacaaaaactcttccttttagttcctatacttaaaaaggatttttggggggattaaagatgtttttaagtacagggccccccacatatatcatttttaattccttttaggtcaggggaactaaaagatttcaaactttggttgtttagagactaataaagggtgtttttaagtttaaagactaaaagaaaaagtttggaactttaaaaatcaaataggttattaacccctccaaattaacataggtgactttgct

SEQ ID NO: 124962 - DNA, 337 bp, Glycine max
  Clone ID: PAT_MRT3847_8384C.1
tttttttttttttttttttttttttttttttttttttttttttggtttttggtttttttttttttcccccacttaaaaaagaaattttgatgaaaaaattcccagttttggcaggcagttagatcaagggggcttaaatctttttaaaccataaaaccgggtttaaggggggtatgggggggcagcttcatttattccctattttatggggccagggcatagcggaccgggtatcaaacggggcaaagcgtttgagtcaaaaactgaagggaaaacctttttcccttggaaaccccatacgggttaactggtccaaccccaaaaaattttgcggggg

SEQ ID NO: 124963 - DNA, 594 bp, Glycine max
  unsure (1)..(594): unsure at all n locations
  Clone ID: PAT_MRT3847_83850C.1
ggctcgaggtgaaagaaagaaaaaaacaccatgatcctaatctactacctctcggagcacccggctatcgtgggcttccggtggagccacgcccaatcatggggagccacctggtccttcctcttcacctcaatcgcctcctacctcttcctctcaatcctcctccacctctctctttctctcctcttccgccgccgtcaaatccctcttggcccattccccgccgtccacagcctctccgcgacacgcggtggttctggccgcgctccaaaacccccttacagtggctcctctgcttccccctcggcacgcgcccctcggggcgcgtgttcttctggtcctacgtctactacctctcccacttcctccacatgttccgcactctcctcacaatcgtacgccaccgcaggctatccttttttcatctgcttagccactcaatctccgccttcgcctcctttctctggctcgagttctcgcagtccttccaggtaatgagtataaacatctactagaatatatntgatgatattctatactcanagattaatttgtattctcatggtatgacttattcatcattatcaggttcta

SEQ ID NO: 124964 - DNA, 229 bp, Glycine max
  Clone ID: PAT_MRT3847_83851C.1
ggtgttggggttaaacacaaacgggaatttctttggggggtccccctttaaaaaataacccattgaaccccgggaatttatgaggaaaatattaatatatagggccgcgggggtttaaaatgtctggctttaaaaaaacccgttgcttataactggggcggaaaacggacttctaaaaagagtggaaaaaagagcgaaaaaagttccggccttgggacatgccggaaaa

SEQ ID NO: 124965 - DNA, 1229 bp, Glycine max
  Clone ID: PAT_MRT3847_83852C.1
attacctttctctgagtccaagttccaacgaaatgtgaacagtgaaagaaacaaaaaaaacaccatgatgctgaaggcggcaccgcgtgcagtaatctactacctctcggagcacccggctatcgtggggttccggtggagccacgcccaatcatggggcgccacgtggtccttcctcttctcctcaattgcctcctacctcttcctctcagtcttcctatacttctctctttctctcctcttccgccgccgtcaaatccctctcggcccccttcccgccgtccacagcctctccatgtccctcatctccgccacgatcttcgccggcatcctcctctctgccgccgccgagatcagcgacacgcggtggttctggcggcgctccaaaacccccctacagtggctcctctgcttccccttgggcacgcgcccctcggggcgcgtcttcttctggtcctacgtctactacctctcccgcttcctccacatgctccgcaccctcctcagaatcctacgccaccgcaggctatcattttttcatctgttgagtaactcaatctccgcactcgcctccttcctctggctcgagttctcgcagtcctttcaagtcctcgcaattctcttcgccacgctcgtgtacgcagccgtctacggctaccgcttctggaccgccatcggcctccgcggcgcgtgcttccccttcgtcctcagctgccagatcgtgctcctcgcctgcaatgttgcctgccacgtcgccgtcttcttcctccacttcttcctcaagggcgggtgcaatgggatcggcgcgtgggtcttcaactcaatcctcaacctcgctcttcttatgctctctcttaacttctacgtgagaatgcacgttcacaagaggaggaggaaagttagggatgttactgttactgttgctactgcactgtcttaacgagcgcgtgagtgcaacaaatattgaagtttaattgtggaaatatatattagacacgagttggttgttgcaatttggggtcccaagtgtgttccctttttaatgttcatcatttttagcatggaacaggtgaacaagatattatagtatagtgttgttggaaagcaaatattatagtagtaatatttttgtggtacggattatgattttgtgaatatgttgtagtatatatgaatcatgattagttagttcatttctatactaggatctaacacagttaatagaaaaa

SEQ ID NO: 124966 - DNA, 288 bp, Glycine max
  Clone ID: PAT_MRT3847_83853C.1
cttcttctttggttgttgttggctctctccatcttacttcacagaatggttacaaagtgtgggaagatccttctttcatcaagtggaggaaaagggaccctcatgttaccttgcattgccatgaatctcttgaaggatctcttaaatattgtatcaacgcaataaagtggattttttggcttcccagtcagctgtttggaatgatgatgctgttcaggggtctcttgactgtgctgcattttgggtcaaagatttgccttttgtcaagtccttgtctggatattggaa

SEQ ID NO: 124967 - DNA, 1249 bp, Glycine max
  Clone ID: PAT_MRT3847_83854C.1
aaagtgaagagtgaaagaaagaaaaaaacaccatgatcctaatctactacctctcggagcacccggctatcgtgggcttccggtggagccacgcccaatcatggggagccacctggtccttcctcttcacctcaatcgcctcctacctcttcctctcaatcctcctccacctctctctttctctcctcttccgccgccgtcaaatccctcttggcccattccccgccgtccacagcctctccatgtccctcgtctccgccacgatcttcgccggcatcctcctctcttccgccgccgagatccgcgacacgcggtggttctggccgcgctccaaaacccccttacagtggctcctctgcttccccctcggcacgcgcccctcggggcgcgtgttcttctggtcctacgtctactacctctcccacttcctccacatgttccgcactctcctcacaatcgtacgccaccgcaggctatccttttttcatctgcttagccactcaatctccgccttcgcctcctttctctggctcgagttctcgcagtccttccaggttctagcgatcctcttcgcacgctcgtctacgccgtcgtctacggctaccgcttctggaccgccatcggcctccgtggcgcctgcttcccttcgtcctcagctgccagatcgcgctcctggcatgcaatatcgcctgccacgtcgccgttttcttcctccacttcttcctcaaaggcgggtgcaacggcatcggcgcgggcttttcaactccggacgcgtgggcgcgcttctcatgctctttcttaacttctacgtcagaatgcacgtggttcacaagaggaggaaagttagggatgttgtcgttgctcctgcactgtcttaagaagcgcgtgagtgcaaaaatgttcaagttcaattgtaaaaatataatataagacacgaggtggttgctgcaatttggggtcccaagtgtgttccctttttaatgttcatcatttttagcatggaacaggtgaatagatattatagtataggattgctggaaagcaataattatagactgattctgattttgttgtaatatatgattagttaattagttcatttctatactaaaaattcaacacagtaggtagataactgtgtttgttaagtaggctaataaagatttaattttttgaccatgtgaaaacacaagactttgtgaaaaacaaaacttacttcaataaaatcggattcctatcccattttttt

SEQ ID NO: 124968 - DNA, 684 bp, Glycine max
  Clone ID: PAT_MRT3847_83855C.1
cccacgcgtccggcagataaatcgaaaaggacaaggaattcggaagcaacgtttgtcatcaagcaaagtccaaagcgcgcaaatcctatgcagaagaccatggacttcagtattcgcttcctgttcttgatgctgcaattcctcatagttctgggttgtgctactaaaccaggggtacgattggatattcaagataaacatgtgataatggataatggcatagtccaagttaacttatcaaaccctgaaggaattgtcacgggaattcaatataatggcatcgacaatttgctcgaagttcttaacgacgaatctaacagagggtactgggatattgtatgggatgaaggcggaaaaaaaagaacaaaaaaaggagcaaagggaaagggtagatttgacagaatggaagccacgaattttacggtgatagtggaaagtgaggaacaagtagagctatctttctccagaacatggaatgactctcttgaggggaagcttccaccactcaatattgataaaaggtttataatgcttagtggttcatctggattttacacctatgccatttacgagcatttgaaggaatggccagctttcgatcttgacaatactaggatcgcattcatgcctaggaaagacaagttccactacatggttgtggcgtacaacagaccaagatttatg

SEQ ID NO: 124969 - DNA, 346 bp, Glycine max
  Clone ID: PAT_MRT3847_83856C.1
acatagatgttactgggggcattcttttttaagaataggaaggaaaacatcgacggaacatgtttctttaaaacggaaccgcaaatcctgttaacaagagcatttatggacttttaacccttaatgaccaaccaaatttctgaaaaagaaaaaataatgcctccaccaacgcgcagaataaggcttccttcttgcttccatttaaaaccctggctaataaattcaaccgatgaatcgcctgaccctattttctgcaaccatcctacatgtttaaaaccaatgttgggattaaacgcctgtgggtcctatcaattggaactaccaacttggactatattaacctcaa

SEQ ID NO: 124970 - DNA, 249 bp, Glycine max
  Clone ID: PAT_MRT3847_83857C.1
ccttgctgagtaagttacggatgacgtatacgcacagatcacgttggtgccggaatctaatcttgatgatccgatgaaccctgacccgtgcactgctgttcctccaagtgcaccagttcactcgttcatcaagacttgacagcttcagataccagcacccatggtggcttctctgttctcaggcaacatgccatggaatgccttcctgcgttggacatgtcacaaccaggcccatctctggaattggtt

SEQ ID NO: 124971 - DNA, 390 bp, Glycine max
  Clone ID: PAT_MRT3847_83858C.1
cgttcgaagtctgaagcattcaacctcaatcggcaacgatctaatattacattgcatacaaaatgtctttggttacaagcttctttgttggcctacggcgcagtgcaatggatcctttctccatagatgtgtgggacccctctaaggactgtgcttcctccacttctcttgctgctgaagattgatcgcttgtcagcacacgagcggatacttgggagacacgacacgcactcatgctaaaagctgagaccccacctgtgacaaaaagcggaagccgaatcctgtgattcaagatgaccgaattctacagatctgaggagagaggaccgatgctagaggagaccagagcctcgcgtgagaccgaaggtagcgactaatcggtgactttat

SEQ ID NO: 124972 - DNA, 127 bp, Glycine max
  unsure (1)..(127): unsure at all n locations
  Clone ID: PAT_MRT3847_83859C.1
tttttctcanntagtgtgagcaacaagggagcaaccgacgcgggtacctttatgtagttttgtggcacacccacccttcaatcgtcttcattcaaacgcacggacacgtgggcggacactttagact

SEQ ID NO: 124973 - DNA, 445 bp, Glycine max
  Clone ID: PAT_MRT3847_8385C.1
acgaggccaaatggcagtgccatggagaatggcgtggtatattttatgccaactgccataggcaattttgtgaagggagccctgcaatggggacaccataggctgcaatggtgtgcttatatggtggaaaatttgccttccaccatattctgccatccaccattgataacactgtttaagtgcttataagtaattgcaaattagaagttacccatcaacaatggccctggtagattcgaaccccgaccaacataattaacatgattctcccttaccatttgtaccaaccaatgttggccaactaatattaattctttgttgaacagattctgacacttgtaataccttgtcttaatgttgaatctgaaattatagtatgatattcaagcagcccatatttcaaactccattacaatcattctatgtactatctgttggtgctgta

SEQ ID NO: 124974 - DNA, 556 bp, Glycine max
  Clone ID: PAT_MRT3847_83860C.1
gtgtgaaagatatgagttgtgcttgagttctattcaaattttaagagcttctacctatgtttaaaacaaaaagataagtacaaaacggcagtacacttgttgccgtaccatgcttgtagttgccatgataatatccctataacaacaaaatcccaaaaataaaaagcttcattaggaaaggattcacaaagtaaaacactgatgcaatttccaaatataaatcaacttcaaatcctttattttctatttattggtgaacaaatcaaaagaaacaaaccaaaacaatatttttcatagggatcattaactatggaatgcaaattactataaaagaacataacaaagcaaaaatgatcaaaacataaaatgtcaattcattccattgatcatttaaaaaaatagaagaattacaatcatatgaattaagagaacaaattaaaaattaatagcaacctgaagaacatggagacatagcataaaccaaaacttaagaccaccaaatcaatgcggaaaaaaaaattatcattatttcattattcttactcatatattcctt

SEQ ID NO: 124975 - DNA, 348 bp, Glycine max
  Clone ID: PAT_MRT3847_83861C.1
agaatcaagccatgttattgaattattcttaattaatatttttagtgatcgagactttcttatttaacaatgagaaacactaaaattatatccataatcaacagcagggacgcaaaaaaaaaagaggacggcccgactggggatttcacgtgtaaaacacaatataagcgggcccttaaaaaaagtcctcgggaagcggctctcatttatctgtcccccactattcgcaagacttgaaaagaggggtcttttggttggggggggggacttttttttcagcaggaggacctcgcgggggggcttcctggtcttagggcgaacaaaaagccccctgtgaatgccggggag

SEQ ID NO: 124976 - DNA, 361 bp, Glycine max
  Clone ID: PAT_MRT3847_83862C.1
ccgaataaagctaataaagatgacagttttttttactaaattttaacacaattataaatattagcgcaaaaaaacatgccacatgaaagttatctatatgtaattaagaataacttatttcgaaagataaatattcttggaagttaaaataaaatgttaccgggatttataatataattaaggataaagtctctaaagaaatatgaaaattattccctctataataattatatattaaacataaaatctctatcaaaatatagactattggaagggattagtacattgaattgaataggatgggagagttaatggaaactcccttggattttgctttttattcttacaaataaataaaagg

SEQ ID NO: 124977 - DNA, 278 bp, Glycine max
  Clone ID: PAT_MRT3847_83863C.1
gtaagcccgccccgcacttggagtgttctgcctgacctataccctcgcagagggtgatccctacgagggaacacttgaatagatcccaaccttggaaaacccactgattttgatcaccttccgagagatgaagcatttattgacttgaatttatcaaaaattcttgtttattgaatcaaattaagcgctcaagacatgtctcccttaatgacttatacgaatgtttgccatggcttgaaccttgactttgatttctattctatcgtgcgcatactcta

SEQ ID NO: 124978 - DNA, 464 bp, Glycine max
  Clone ID: PAT_MRT3847_83864C.1
gggaaaaagcaagaaacaataagggggggggggaaccccaaaaaaatccccattatcggaaggccctgggaaaaacaaaaccctccccaaacccaaaataaaaaacccccaaaagcccccaaggcacccttttttttcaggccccccggccggggacaaaagggggggggaagcccccagccttggtggggacggggcccccaaggggaacaaaaggggtccccaagggccccctaccggggacaagggccggaacaaaaaacccaaaccaagaaaacagggcccaccccccggtctgggggcccctccccctaagcccaaaaaaacccctgggggcatcaacaaggccccagggggcaaagccgccccccggggaaatgggggcaaggacccccccggggggccccccaacaaaacgaaaacccctaacagcccccattaggaaaactgggggggcccaaaag

SEQ ID NO: 124979 - DNA, 281 bp, Glycine max
  Clone ID: PAT_MRT3847_83865C.1
gtgttaaataggtggccgggaaaacaggctgtcccccatggcactcgccgacgtgagcagagaatgcctgtttctataaggggaggagctggtgcatacaatgctgtgctcatgaatatgccggaagcatgacttcttattggggcgagatacagacggagagcttgattttgaagttcactataagactatttgctacacacaatgctcagtgattttcgacatagcgtcagaaaaaaacgctgatggcaccattaatagtgaggcgttcacccacaagc

SEQ ID NO: 124980 - DNA, 248 bp, Glycine max
  Clone ID: PAT_MRT3847_83866C.1
agaccttggacgacacgctccctaatcggtggacgcccttctaggtttttttttaatgcaccttaatcagttttattattcttaacctcatctcacacactggggggtcattaatagcatcacccactttttgtttgctaacagcactacagaacatgtccttacccaatgacatagaagactgctaacacaatcccctatctattgaaagcaacttcaacaccaattgggtcatgattgaagatgac

SEQ ID NO: 124981 - DNA, 344 bp, Glycine max
  Clone ID: PAT_MRT3847_83867C.1
gaagagaaaaaaaatataaaggggcagagaatttttccccaaaaagaaaaaaagaaggggggaacccttttcttttttcaatcatttggggggaaaacagtataattttcttccctaaacagaaaatttttttagaaaagaccccaaaataaagtgcatagctttacttattggtcattttcagtttaaacttattgggcacacattacttgggtggggcttttaaaaaaaggttttggttgggttctaaaatacactcaggcagcaaggaacctctggattttctctctaaattaaaaaagaaacctttgtgggggggatttttaaaaaaccccgagccgaat

SEQ ID NO: 124982 - DNA, 421 bp, Glycine max
  Clone ID: PAT_MRT3847_83868C.1
aagaaataaaagggaagaagggaagtgggaaaaacagaatagaaaggattggaagagatgagaaaaacagagagatcaaagaactccttccaaaaactacttacagaaagaggatccctatcacttattatctcaactcgtgctccatgaaatctgaagatctgattcatgcaatgttgagcaagtgttgctattggatatggattcgaaagagcaacaaaatgggcatacttgctcttataagatcattgatgacccaaatagtatctttgccatggcagtaaacaaaaattctgggctctatgttatcttctttttctgaaattaaagttttcaatgtttttgaagaaatcttgggggaaaaaggaatattcttggctatcccagctgctaacttctcttttgggctgggatctactac

SEQ ID NO: 124983 - DNA, 391 bp, Glycine max
  Clone ID: PAT_MRT3847_83869C.1
ccaccctactaattaccgctcgaccagcacactattttcggccgccctcctttttatatttggagggtttaaaaaaattttggggtgttaaaacaccagggggccccacaaaaaaaagagatgccctcatatcacactggtgctaattccgactttgcaaaccaaattacccaatcacagcctgaccttacacatcaggtgggcccattccaacttaaaagccaaggataacattggcccactacgcgacacatgcaccacccaaaaatcataactttacatctttacatacaaaatacaaagactctaaatttttaaaataagaaaagagattaaccgatcatcttaatgaaatgaaacccaaaccccccaacattgggttgatttttgc

SEQ ID NO: 124984 - DNA, 162 bp, Glycine max
  unsure (1)..(162): unsure at all n locations
  Clone ID: PAT_MRT3847_8386C.1
cccacgcgnccgcgaacagagcngncngnnngangggaagncacgaanaccccacgnaaggacganannnangggcagcacacgaccnagnanagngcagnncggnacccgngnncnngacccggnnccnngcnnccacaaaannanaaccganaaaanccc

SEQ ID NO: 124985 - DNA, 324 bp, Glycine max
  Clone ID: PAT_MRT3847_83870C.1
ggttctagtgtatgtgattgttgtgactcgttcttcttcgtcgttatcttcttcttttgttgtttgtgtgtttgttttttctctcacctgaaaatgtcttgctgcggtggtaactgtggttgcggaagcgcctgcaagtgtggcaacaggtgccgaagctgcaagatgtatccacacatgtgctataccgagtctcacaccacacgagaccttggcacatgagtgtgaccacttttagcgcacatctcgagtgtgcagaaatgtgtgttcccgctgagaacgatggctgcaaatgtggagctaactgcacctgcaacccctgca

SEQ ID NO: 124986 - DNA, 402 bp, Glycine max
  Clone ID: PAT_MRT3847_83871C.1
cggccgcttgggggggcgtgttttattttttatgtggccaccaagcgattggcttttaaagtcccttggatatataagtttaacttacccaaggatctggaacggagcatatgacgtggggatcaaatgcgctttaacctattatctttttaaaataacacagatgatactttcggggggggggcctccgccgagcatggattagaccaatgtgtctaaactggaacctctgttttttaatacagctgaacatgaaggagctagatatttatttaaaaaactaagaacataaatcagagcgtttgtctatgggtgcggaaatatacgtgatcccaactggggaggagcaggaaagagagcttcagctagatctgacacatttgataataatactgcagggtg

SEQ ID NO: 124987 - DNA, 1429 bp, Glycine max
  Clone ID: PAT_MRT3847_83872C.1
ctcaaattaatactacatgtatgtatgaatgtcttccaacaaaaaaatcggcaagttggacctggacaccttaattcttttttatgctgctaatgagattttgaggctcaactaaaaaacatcctcagattgaaaaaaagaaaagaacccaccatggtttcggtggctttttgaaaatcgaaaggacaaaataaaaagaacagagattagttagtaagtactacagtacaagactagaaaggggagtgtgagttgtatacgcgtattgagccgactttagaaggaaagcaattcgcttgcgcttcacatattgtgcggcaactgtctcatcacatctcgcgaatccaagccgaaggggaagggggtttgataaaggttgacattgaaatttgaagccatggttcttgactccattctgacatctcctcgtctcaagtctccatctttcaggagacagtttaaaaaggatgaactgggtagttggtccacacttttccagaggcatcgcttcctcttatctgctcttgttctgctaactctcctctgcactgtttatctttactttgctgtcactttaggggctagtggcacctgttctggtttgactggagcgcagaaagcttcatgccatatgggtctcatcacgtctcgcgatctcttcaaaggcgaaggggaaggcttcaggggtttgaaaaaggttgatattgaagccatggttcttgactccattctgacttctcctcgtctcaagtctccatctttcaggaggcagtttacaaaggatgaactgggtagttggtccacactttttcagaggcatcgcttcctcttatctgctcttgttctgctaactctcctctgcactgtttatctttactttgctgtcactttaggggccagtggcacctgttccgggttgactggagcccagaaagcttcatgccatatggagcttgttaaggattctgtggccaagggtaaactgaagattctttgatatttcaaaatattattacaagaaaatttttttctttattttgtgcctgagtataggtgacatgaaatccaaatatagtctctggctacagtatcagtgtgactgtgatttgtatacatactatttatcttggtatttgtgggccaaaatgtagaatacatgtagaaagcaatttgttagatacatcatgttaattttagtgattgcttcattgagataaatttttgggcatcttagttgctaaatgaagtttgagtctctgcttatgtgtaaattatgggcggctccaagccttatatttgttatattcatctgatggtctaatacgacctggggaccttttctattcttttctgaatttatattgtattgtgtattgctgattgggtttaatctaaataattatcgcaatgagtaatactctgcttgatc

SEQ ID NO: 124988 - DNA, 378 bp, Glycine max
  Clone ID: PAT_MRT3847_83873C.1
gttttctcgggtgcagccgcatgatctgttgccgctccttactacggcgatgaatagacaccattcctcccgaccaggaatacatcattgtcgctcaactcttacggtggccgtcttttttatagatacccaactacaccgtcgacgttgtcgacaccggcgccctacgacttctcgtggccgtccgtgcccacatgggcgactccgtccgatcccacatacgatactaccaagccggctcatccgagatgttcgttgccacccctccggcgcagtccgaaaccaccccctttgacacccggtggccataggccgccttctaatgtgccgaccactggtacaccgagaacaaccgcgaggcttactccctctttgact

SEQ ID NO: 124989 - DNA, 210 bp, Glycine max
  Clone ID: PAT_MRT3847_83874C.1
gaactgactagcataaaacatgaggtctaatcactacttcggtggatgagaccttgacatttatcagaatccatgctcttactgaagtctcaagctttaagacggtggaggtcgatccgctgcagaaggttcttttttctgtgaatgagcccaaaccttgcaacgatgcagaggtcagcctcaaaagaagcgattgaagtgactcgtatc

SEQ ID NO: 124990 - DNA, 725 bp, Glycine max
  Clone ID: PAT_MRT3847_83875C.1
gtaggactctgcggctcgagatacactgtgaatggaccatcaacctccaccgtgccccgccgccgcctccgcaacggacaaccctcgtggcggaacgcgccaccccatgtaccgcggcgtccgcaagcgccggtggggcaaatgggtctccgaaatccgggagccacggaagaagaaccgcatatggttggggtcgtttccggtgccggagatggcggcacgagcatacgacgtcgcagcctactgcctcaaaggccggaaggcgcagctcaactttcccgacgacgtcgactccctgccgcttccgtcgtcccgcacggcaagagacattcagaccgccgcggcccaggcggcgcgtatgatgaaagcttccggcaatgatgagaaaagcggcattgcctccgacgacggcgatagcggttgcgatgatttttggggcgagattgagttgccagagctgatggacggcgagtgctgctggggttgtccggccggcgcttcctcctggacttcctccggcgatctcgccgagtggccggaggaggagctttcgccgcagcaaccgtcgtttatggcatgtctataatctactgtatctctgtattaatgctgcatgttcagttgtcgttggtatgtttcttgtattatatatcctattcctaatgttatatcctatgtgccaactgttcctgttgtcataaataatattaatagttattatcagt

SEQ ID NO: 124991 - DNA, 353 bp, Glycine max
  Clone ID: PAT_MRT3847_83876C.1
cgcgcggaataattcccgggacgacagcgataagtcggcggccgcctttgtttttttttggggttttttatcagtgtctttggggggccaaagccggacgcttgcctttagttacaggcgaccagcgggctcgcccgttctgtttacactgccaaagatgccccccaaggtgactaggactgacaacaatacgagggggacaaattgaacacatagaaaatccactcaaagaccgcacccataaagaacaataaactcccggcctttgggtacaaaacaagcccttaaacggaccaaataaaaagtttccccctctaaagacaagaaaccccgcttgagccagttagttaacg

SEQ ID NO: 124992 - DNA, 367 bp, Glycine max
  unsure (1)..(367): unsure at all n locations
  Clone ID: PAT_MRT3847_83877C.1
ggattcatanntcaacaaccttcttntgttnagtgagggggaggggcgtcaacctcagctctcnagcccctctgctcttgcggtgatgtgtcaccactctcaccgagggggtgtggggaaccatccccagcgaggggaccaagtgcgtgtgccaggagatccanacacgcgtgntgntgttaacagagtactatgtgntgngcgaggaggtgccagggcaccaacttcaaactatttccgcgaaggggagatccccttatggggataatcttcaccagagtgagaatgtgacccacgggcaggttgcgtttacaactaccgaggtgctggagactacggngatgcgtttnggggagtaacaaacatc

SEQ ID NO: 124993 - DNA, 289 bp, Glycine max
  Clone ID: PAT_MRT3847_83878C.1
ccacgcgttcgtccacgcgttcggttctgcatgagcttgattcactaactgctagggtcataaggcagcactaagtgtgacagtcactgctgaagaatatggctaggtagtggatgctaagaagagtgctgtggatacccagagggaaatcactgccatttggaagatgtgcgtgttggagaggactaacaacattgacatgatgaatggagtttgatctagttagctgcaagggtgtggtgagttgagctgagcctatccttgacttattactagtaacaaacaccat

SEQ ID NO: 124994 - DNA, 329 bp, Glycine max
  Clone ID: PAT_MRT3847_83879C.1
tatttgccctctctccatcactcttcctcttagcacttcggtacaactaagacctacggtttctactttttataaacacattttaatctctacaatctatacaccctcctcaccaatcacttcataaattcccaaccttttcatctataaccttatcccctttctctttataaaccctgttacaaccacattatacattactcaacctacctcatacactcacaacacctcttacccatttactattaacatcactcattatcctccccacaaactttaacaactcaacaccttctttcccacaatactcacctattcactacacccac

SEQ ID NO: 124995 - DNA, 490 bp, Glycine max
  Clone ID: PAT_MRT3847_8387C.1
ccacgcgtccggtcacacactgcgactcagaagaaacgcactctctctctcttcctctctctctcttcggagctcaatttggccgtcaatggcggcctccaatgctcacaacggcaccaccaccaactccatcaggcacgccttcggcaacgtcctcgcgttcttcatccttctcctcatcggcgttctggccttctcgatccgtctcttctccgtaagcatttctcctcattccgcagatctggttacctgaacctcgttccggttccgagttttcgttttcttaacacgattgcatgcttctaaattcagccgctcggattattgctcaatcttaaccgtttcgttacgttcgtcgtgtatgtttcattcatcaagcatagcttgcaatatcagtgacttagccggaactgtctagatttttcttttttttttttcctgcgacttggccgagctgtgttcgttcattcgcagataagtcaacgatttg

SEQ ID NO: 124996 - DNA, 408 bp, Glycine max
  Clone ID: PAT_MRT3847_83880C.1
cccccaacaaaaacaccaaaaaaaactccccggggaaacggggaaaagttcggggggctctctccagaacccatctttttgcccgggggggggaatttaagggaaaaatttttttttaaaaaaataatcccccccattacaccccgggggggcttcccatagcccttggggatttccccgcggggctattttgggggccaaaactggggaacaaggggggggaaacgcccccccctctggccccccctacctggacacccctgatggggccattaaaatggggttttaaaaaccttttagaaaagcccctattgacatcataaaaaaaccgtcaaaaacatgggggccccccccccggggggagaggcgcccggggggcggaaacccttggggaaaaaacctgaaaaa

SEQ ID NO: 124997 - DNA, 1036 bp, Glycine max
  Clone ID: PAT_MRT3847_83881C.1
aaataagccagtaactaatagcagagacacacaagagataatgtattggaaaggtttggaaatgctgaaaatattcaaaaataatacactgaagacatctttgcttgatgactttatgtactatgaaaaccgtcaaaagatcatgcaggatgagaaagcctagttgctagtcaagagtttcaatagtccaatatttgtaccagtattagaagctccccaaaagttgaattttgttgttgatttactaaaagacaattatgagaagaatttgaagcccaaggatgattctgatggcttcaaacagatttcagtttcaagccctgaccagattgttagtaattctgatgtcactggcatcaagcatgtggatgatgagaaagctgagaaaattgctgtggataaagaagatatttcttctatcttaaagattggttcagtcactattgcccccaaacaagttgaggctaagcactctgtcagcaatggtaataaagaacaaggtgatgctcttacggaaggctcaatgcaggtaaaagttaatgggtttgctttgccttctggtttcttgaaggttggcagtatcccacttgatgcaatggcattgcaaccgggaaaaggtgttctttctgttaaaagtgaatcacatcgttaaatttagctttgtggtaaacatctggtgttagtcttgtggtaaaaaatgagtttattgtttgcccacttgtattttacagttgggaagttgagtttcttcttgatcatttcgtttcatttgctaatgatgctttgcacaaggctgttatatatcgtgggtgtttgagcgggtgttgacttctatagcttttataggataatgtaaccccccttttttttgcttttagcctgttggtggttaacgtgcaaggggtgagtctgttaattcaatatgttgagaaatcggtgaaaacttctggccccatttgttgagttacagcttaaatgagcttttttagatgcccgtaaaaaggagaagaaaagagggggggggggggggggaggg

SEQ ID NO: 124998 - DNA, 2143 bp, Glycine max
  Clone ID: PAT_MRT3847_83882C.1
gtgctttcttcaccaatatagaatgggacctctcttatagtacatctcttcctcttttcttttttccttttccattcttctttttctctctgtactcaaactcacttctccagcttatttatacaatatcggcttacaaagaacatgatatccgtcttcatgtcatcaaaactatgtttcgtgtcgttcccattttccccaaatccattattatgttccaagacattactactctattgcgtgatcccaaaccatttaaatacacaatagatttgttcgttgagcgttacaggggcaaaaacatttgtgttgttgcatcaactgacactagatgtgttatttttggttcgcacagtaatctggttattggatcaaatattgtttcatttgagaaacaaacgtaattgctcagttgcgttaattacaatatatgatattttggactattatatgaaagctattaaagtagtttttgaggttgttgttaaaggttttattgatttatctattgctgaatagattgcaatggggtcaatactgtcatcctatatgttagtgattttggctgcagaactaatattacagaacttaagaagagatctacaattataggaattaatggaaggtaatggtcttattgggaaaagattagtgttgaattttgaatatgaccagattttagtacactttatacttcggatgtgtagccaagtaatgttattgttagtaatttagctcacgactggattcatgtatttaggagtaataatgaagcaagtattgagaattggtactcgaagtgttgggggtatagagataccccttttctatcatgtatgtcaaaataaagtgattctttcaattgttaaactatagaactatgacccacttgtttgatttggatataatgctcctttgaacgatatgattgtaacagcagcttttatcaatggcacttcaaattctgtacttcctatggacatcgttcatgcatcccatcttctccgacacaagcttgcatatccaataaaagaaaaaggtctagcacaagtttctttgacagatgttattccttcagatcctcttgttagtacatgggtgatttttgtttatagctgagagaatttcctcggtgaatatccctaagacaaataattcttatattgtgaacaagatacatcccatttgcctgtcctaggttctgattacgagagatccacaactgttcgcaacattccgttgttgctttgtaaaaaatcggttagagtggataatgtgaaagttatagagtctatttttcctataccaactgaagaggttaccagaagtgggtatttatgatactgtgagataatttgggttgaacgtattgtagatttttagtaagcatgctccatgcagtcccctacaaaacctcctgtgtctgaattttgtcgcttaggttacagaattttatatgtaaatatttgttcccttgtgatgatatgcctgtggtgctaacttgtgtttcttttataagatctcatttatgagtggttttggctccaacatcaaagctattagagcagcttcagatcaaggtgttaaaagatttgtctatatctctactgctgactttggtgtagttaattacttactgcagggctgtaatataggaaagagagctgcggaaacagagcttctgaccagatttccatttggaggagtaattctgaggccaggattaatttatgagactccaattgctgcagttccattggaaatggttctccgagttgctaaacaatcgaaccatatcccacttgttgggcctccgttgacacctcctgatgcggtggcaaaagttgctgttacagctgctactgctactgatcctgtatttcccttaagggaataattaacagtgctttgaaaggacttgatgatactccacaaccgaaatccaaggctgctgctaggtggattgttgttaagtattttaatgaagttagaccattggaagcagagagatttaaggcacttcgcatacagtgggcacaatattatctaaaagttagaaatcaaacatagtgaaagtgcgtgcgtgcatgtagccatagatctaccttaccaatttttttaattgcacaatacatcaagaatt

SEQ ID NO: 124999 - DNA, 348 bp, Glycine max
  Clone ID: PAT_MRT3847_83883C.1
gttggaaacacaatcttctttaaacaaccaggagggttgggaaaagccggggaaaccaacaaaggatcgggacaaacaatacctttaacgctatatattgttgagacatgtaccaatgacccaactaactactcacggtaacagaaccccctttaagattaggcggccctgcttgaacttaacttatagaaagtctatatgatcatgcctacctgagagaagggacatacgtgcacgctttgaacttctaattgacaatgttttattaatgatcatgactacaaaacctgaataacttactctggttcatcctaatgttgaacattgaagacccggactaatattgat

SEQ ID NO: 125000 - DNA, 742 bp, Glycine max
  Clone ID: PAT_MRT3847_83884C.1
cccggctcgacccacgcgtccgctcggcttctcgagccgtacacacgcagcgttttatagtgctcggagaatccccttgattgcaacaccaacccaactcgaagaacaccgtcgccgttcgccgccgtttcctgaagccgagtaaaattttctccgcgctactctccgagttcaacattgctcagaagaaaccaccatgtctccgaaactgctattattggcgaattagggtttgtaaattaggttttaatggcgaacgacactggttccggtcgcgtcgtcacagagaaaggactggctacgaggtcttcgagagagacattagggaagaatgcgcttgcgagcggttccgccacgaacgccactccgaatcgcaagtcggaacggctcgagaagcggacgccgccgtcgctctcggcgagaatcacggtgagattcggtcagaagacgccgagtccgttgcggagatctgagagaacgaagaacgcttctccttctccttcttcggatccttcggcttcgaaatccaagagttcgggttcgaagagcaattgcagtgggaaacagttggcgtttgaggctagcgctgacgaagatgatgatgatgagaaatgtggcgcggaagcttcttcgagctcgggacctattcatttgactgcgggcgagtatcgtgctctctttgttaaacctaagatagattgcaatgagaagacaaatgggatggataggtcaaactgaggag

SEQ ID NO: 125001 - DNA, 1602 bp, Glycine max
  Clone ID: PAT_MRT3847_83885C.1
ctcgagccgttcgttttcttttccctccctcgttagcagttttcgttctccattctctccattccttcgccatgtccgatctcggctccgatcttcctgctgccgccgccgctcttagtgctgaggatcgtgctggtctcgtgaatgcactcaaggacaagctccagctcctcgctgggcaacatgtggacatcctggagacactgccacccaaagtcaggcaacgcgtggaaattctcagagatctgcagagtcaacatgatgaggtggaggctaaatttttagaggagcgatcaaagctggaggctaaataccagaagctctatgaaccgctttacacaaaaaggtatgagattgttaatggtgtggtagaggttgaaggagttacaaatgttgcagtaccagaagaagctaacaaagctgcagaagacaaaggagtacctgagttctggctaactgcaatgaagactaatgaaacactagttgaagagattactgaactggaggaggggtctctaaaatatcttaaagatatcaaaaggtatattaatgatattcattagggcatcattctcgattcttagggctttaagctggattatttcaagaattccgagcttacaaaaacatatcacatgattgaagatgatgaccctatattagagaaagcaatagggacggagattgagtggcatccaggaaagtgtttgacacaaaagattcttaagaagaagccaagtaaaggatcaaagaatgctaaacccatcacaaaaacagaaaaatgtgaaagtttcttcaactttttcaatcctccccaggtccctgaggatgatgatgatattgatgacgatgctgttgaagagctcgagaatttgatggaacatgattatgacattggttctacaatccgggacaaaattattcctcatgccgtgtcatggttcacgggggaggctgcacagagtgattttgaggatatagatgaagatgattatgaagatgaagaaggtgatgatgatgatgatgaggatgaggatgaggatgaggatgaggaggatgaggaggaaaagaaagggaagagcaagagtaagtctaaactgcagagtggtggcagggccatacctggtaaagatcagccgatggagcgtcctcctgaatgcaagcagcagtagtgtttggctgtgtacaaacagacctgggtatatttagtttcagagaagtaatcactgtagagtctgggttatttcagtcataatttgcaatttaattattattattattatgattattattattgtctgctcttttttattgggctgggggttggtggtggtaatttttttttttggcctgtgatatggattttatttctctctgcttttagtttttttctgaaaaagaaaaaagtaaagtgataagtatattcatgacgttgtccatatttattgtttgtgttatagtccgttatatgaaactgtacagatttgctaaaaagctgctgattgggttagttgacctgtgtcctgtgccagtgtgatatggattttatttctatctttctcccggggggaaaaaagggggcatatctactatttacccccc

SEQ ID NO: 125002 - DNA, 402 bp, Glycine max
  Clone ID: PAT_MRT3847_83886C.1
acctagtgtctaacactcttactgtcgcttttttcctctcttgtttccttttctcttgtttaaaaatatccccttacacgcgtggcctaatacgtccggtctgactctctggagaagaggtcgtgtaatactttcttaagccccccccctatctacccagctttttgtttattttatacaggaaaaggacggttttttgggggggctcacgcatgtttatacccttgcgccgctgagcgctgcagcgttttctttctatgttcttcgcttcgtccggaggttcttccaaagagcattcgaaaaaagtacccttgttaccactttacgactgctacggcaaaagtttgggaaaggggtcgacttgcgctcgtcttgttgtaaataacgcctgcgcattaatgc

SEQ ID NO: 125003 - DNA, 404 bp, Glycine max
  Clone ID: PAT_MRT3847_83887C.1
gaccgctccttggcttctacactcatctggttcctgtttcttctctcaatttcgtgcctttaaggctctccggattgctgttccctcatagtaacaagcatgctattgcactggtcactgtgaaggccgttagtactggactgatgcttaggagcagatctactatgcacaaatagtcaacatgctcaaaacagcttacactgcgaaaattcttgcgtggttcatggaagagttctcctacaccgacaaacgcccggagcctacaattgagaagactgaggtgaactgtggggtctgacatgctggcccaaaggcgtaggtcatagacccgggagctatggcactaacgccgatgacatgtcagacacctattgagactatatgccctgctgctgtagtcacct

SEQ ID NO: 125004 - DNA, 548 bp, Glycine max
  unsure (1)..(548): unsure at all n locations
  Clone ID: PAT_MRT3847_83888C.1
agagtatcactctctatctcatggccatcttttgcttttcaaatgcaaagtaacttgtaattttgcagaagaatcgaaggctactgataaccacgtttcagcccttgattgaggaagttctttcaaaacttgtaattcgttcttcttggttgtgaacttgtgatgcatcatgcatcatgcatccatccattccaatggacccctgggcagacattaccacctatgttttgtaggagacactttaattcccacaagaagcatgtgataacaaagtacctgataacaaatgttaaaacaagaacaaattttagactttcaagtacctgatgtttgcatctttgagctcattcatgctactaaactaacctttatgattcgcatctttagacagacagagagttcaaattgttcaacatctcaagaacctagttaaataagagcagcttgtcaaggacagataaaagaaatgaaaaccatcattgtttccaaatttgcatcaccaaagagtttcaggtttcttgtctgaagcttaacatgcattccatcan

SEQ ID NO: 125005 - DNA, 376 bp, Glycine max
  Clone ID: PAT_MRT3847_83889C.1
acgatggattcattcttgttcgtgcacgtgtcaaaaatttacgccggcacctcgcgaggatggggatgagtcaaaacgacgacgtggatgataccgtagacgagaagcacgtttacgtaccggttcgggtttgggtggaccccgagataggatccatttattgcgctgggctgatgcttggaccagtccacggacaacaaagagagcgaatgggtaacacaaaagattgtggacggtgattatctggacaacgcagggttctaacgtcaaaactggtgccaactcagtgtagaggacgcgaacatggagctgtacaatggaccaagactcgtgagggaacccggcgatcttctacgacggttggcatgataacact

SEQ ID NO: 125006 - DNA, 485 bp, Glycine max
  Clone ID: PAT_MRT3847_8388C.1
ccacgtctatcaatttgagctatgtgcgcagatctatgaagcacccaaacacctctgttatgcaacaaaaagccttctccttactcctgctgggccgattttcgctttcgccgccagatcttcactggcatctgacccagaatccagttcatcgtctccaaccgttgcagctcccagtttggactgctcagcgcaaagtcatagcgtcgcaacacgctcgcgagcaccacagtttgctcaagatatgagatgttgcgaccaatgcagcctcttgcgcctgccgagaaagccagaaagcagggttgcaacgccttgcccttttcacccagccagcgcttaggaatgaacttatcgggttgtggaaacatggactcctggcgatgcgcaacgtatgcaaacatagcgacagagacaccacctgggatgtagacaccgaggatgttcgcgccttctgttggcgtttgtcccggcacccctgaggggtc

SEQ ID NO: 125007 - DNA, 468 bp, Glycine max
  Clone ID: PAT_MRT3847_83890C.1
ggctcgagctcgagccgctcgagccgaatcggctcgaggaaggaacacgtcgtcttctttcaccccgacctgggcattggcggggcggagcgcctggtcatcgatgccgcagtcggcctccagaatcgcgggcacaaggtcaccatcttcacatcgcactgcgacccgcaacactgcttcgatgaggcgcgcgatggtaagcctctactacaacacctcggaccacccgccgcctatgcctggccacgcagctgagacctgacgcgcgcacaaaggaaccctcgacgtacgagtgcgcggaaacaccatcgtcccctccaccatcttcggccgcttcgctatactttgtgccatcctgcgccaggtacatttgatactccagatttccctgttcaccgaagaactcccgaaactcgcgccttcctcgttctttgtcgaccagctcagcgctggcattccactcttgcg

SEQ ID NO: 125008 - DNA, 574 bp, Glycine max
  Clone ID: PAT_MRT3847_83891C.1
cggacgcgtgggcggactcgtgggtttttgtacatttcaaagatttaactgcgtagaaaccccccaaacgcgtacctttctgaatcctcactcttctgcttcttcagatcatcgggtaagctccaatattctttaattcccactccacttctctggaatgtaatcttccccccttcaaattctgcttccaattttgtctcaattcccactcccgggtttcatttccctttctagaaaccgaaaccctagacaattttccgtctctgaatttgagtaattgggaccccaaactccttccaaggatagtaatattggagatgaaagcgccaaatgctttgtttggtgcaaaacgtagaaagtttcacggggttttcaatgctttgcgtgctatggttgtgtttttcttcttttacaaccgggaagacatcatccacaacccgattctcaggcaatcctcgtattttccgaatcatgggttgccctaaaatgcgattcctagagatgggacttccgcgattcacccgccaatggttgaaatcagcgccaacacttcaggtgtcgctggtgaccatgg

SEQ ID NO: 125009 - DNA, 349 bp, Glycine max
  Clone ID: PAT_MRT3847_83892C.1
cgcatgcctccgttgtcctatttataatccgcaatggaggtgagccgttgtggggacccgatgaacatcaggcccggccgggcccccgatgccaggccccgctccccagcgcgccggggctcgccgatccccacggcctcaatggcccggggccgctcccccagcccggcccaccggaatgtctccccgtcccgcgtcctgcagcggtacccatcccgtggccgtactccctgcctcagccccgtgcctgtccctctcagcccaccctactcggccgtcatcaccggcaccttcacggagtacaaaggcagccgctttggggagcccatcgagacgtacgttacgcgcg

SEQ ID NO: 125010 - DNA, 527 bp, Glycine max
  Clone ID: PAT_MRT3847_83893C.1
agttaggaaggtttcctgtcatcactgtatgacgtcctccttctttgggggggggggggggaaagaaaaccaaaagagggaggcgtcgtgtgggtatggggggggcgtaggaccgagtaagagcggtgccagtgagtagcgaagtagccgagggtagccggatacggatatggataaaagggatggacttatccctggaagacgaccgggctagaagccgaacactaacgtacactactactgattataagtttgagtaagggttatatagggcccagagcagtgtgaagtaacaggggagagtgctcagggctaacacgagtgcacgtaggtgatataaaccgcgtaataaggtaatagtacgagacccgaatggttgtaaccccggtatggtgcacgaagtaggtaacgttgtataaacgggctgcgaatgaggggttagggccgttatgtttgggcgcaggcgcttaaataaacgcactaaagtgtggagctgcagtggacgattgggtattaaaatattaggg

SEQ ID NO: 125011 - DNA, 169 bp, Glycine max
  unsure (1)..(169): unsure at all n locations
  Clone ID: PAT_MRT3847_83894C.1
ggaantaacgacaacacaaggncatcatcatgngcagctgcttctcctgtggcaagncgactcaagtccacnttncantgaaactcttggagnnnanaagggcctctntggntattcnganagttccatcancttgnattctaggaggcaatttnggttanngttgggg

SEQ ID NO: 125012 - DNA, 127 bp, Glycine max
  Clone ID: PAT_MRT3847_83895C.1
gaaggccactgttctcagaacccccaccttccggccaccgacttcgccgagcgccacatagtagccgaaatcatagcgctgcgccgtcgtaggcttcaaacagagcaccacctgcgggagaaaaccc

SEQ ID NO: 125013 - DNA, 1167 bp, Glycine max
  unsure (1)..(1167): unsure at all n locations
  Clone ID: PAT_MRT3847_83896C.1
ccacgcgtccgggaacctatagtctctaccaccgtcattactattccgatcagttctattctaagctctcatttctacgtcctactttctggtaattactcaaatttccatttcattactgtcttcaatttcgaaatttccatttcattactcgctactctttccatcaattcctctaacctccgttaatcgctctcgttttattttattttagttttttttttaattcactttttaggaaattttgacatggttttgtgagttggttaggctttctctctctgtctctctactgttatgaaattttaacatggtttaaaggtaattaaaattaatcaggtaacgttcttcttcctatgcgtatgtgtcgaatttgcttacataaatgtcaaatagctgcagaagtgataatcatactcccttaaatgcggagcaacttagtacaagacgtagaagagaactgcatagaaaagagaagggtgttttacaaagttctcaatcccaaagcattcaatcagtccagatgcagatactagaacaacacaagatgtcatttttagaagctcacgctgaagataagaaacacattcaggggttggaaaaagagctgctgaactgttctcaagaaatagattatcttcaggatcaactcagtgcaagcaatacagaggtgaactacctggaagagcatattcgcagccttgaattgaaattagaggggatggaagatttacaagaggaggttttcagattaagggaggagctgaaaagatccaattcaaagcattttttcttgatccaggaactagatactaaagaaatagaattagagaagtcagctttgtccatagagaaactagaggaatcattttcatccataacattagagtcccagtttgaagtagagagcatgaagcttgatatgatggccttggaacagagtctttttgaggccaagaaaatccaggatgaaactctagatgaaaataatagaatgagtagatcaattgaggagctccaggttgcattgcaggatgcccagaaaatcatcatctccctaaatgaagaaaataggaaacttanagagaagcttgatattgccaacanaaactctagagtttcttctcaaaggatgaatactggctggaaaacatgacagattgcaac

SEQ ID NO: 125014 - DNA, 1453 bp, Glycine max
  unsure (1)..(1453): unsure at all n locations
  Clone ID: PAT_MRT3847_83897C.1
gattctccaccatctccctaaagagccatcaaactttataaaaagaaaaaacataaaagcatttgaacgccatggttttctcctctattccagtctttgtagatcctcccaattggcagcagcaaccaaataaccatcctcaagcaaataataatggtggtgacaacactcagcttcttccacctttgccaccacatcaatctctcgtggcaagttgtagcagcacactaaaccatccttcaagcacagtaataatggtggtggtaactccaagcttctcccacctttgccaccacagcaacctcatgtgggccaccaacacgattcaatcaggccaggatccatggcagatcgagctaggctagctaagataccacccttgtaggcggtattgaacagtccacgttgcgctaccaaccgttcctgtgggtgcagggtcccgtaggaacaacactctccaagaggagtagtcgctctaagtctccagcatcatcggagaaacaacaaacactttctggttccacaagtgcaatagtcccctctggtggaaccactcatgaacagattggtcatcagttgccacagccacagaaccttcccttcttggcttctcttcagaaccttaatcgttatgctgttggaaacatgggtcttgggttgcgtgagattcacggacagaacgagaacatggggtttcagattggtaattcttctgctggtggaggaatggatcagtggcgcttgcatcagcaggttcctttctttaatggttttgaatcaacttcagctgggttcatacccttttcaaaatgaaggtattaacgaaacaccttctggttttggtggtgacataacaacgaattccagggtttctcagatgccatcggttaaaatggaggaaagtggggctttgaatttgtcaagatcaacactcaataatgtctcagaaaataaccagtactattcatggactgatatgtcaggacttgcttctttttctgctactcatctcttgtaactttgaacatataacgtgtatgtggtcaataaccacatcaccggaattgttatgtccttgatggatcagagaaattctcaaacgatttggatgtgttatactgaacaccctcgacttgacttcattccaagttctcactatcatcagttgacagaaattaacgcagacatggtagaattgatgtcttctcttcttgtaattgcaattccggacattgatttgtgtttatgtttttttttttttgtttttttttcatccagtcgagtattttatgtactatatacatgggcttgctttaattgtataactgtgtgtgcatgtaatgttttgtgtttctgctttcatccagttgagtattttgtgtgctatatacatgggcttgctttaattgtataactgcgtgtgcatgtaatgttttnnnngtccgcgtannga

SEQ ID NO: 125015 - DNA, 939 bp, Glycine max
  Clone ID: PAT_MRT3847_83898C.1
aagtaatccaaagcgaaacagtattcataaaggtttaatcaaagcccaaacagtcataacactaattgaacaaaaacattaaccaaaacttttaaataactaaaattaaaatagaaccacagagaattcacttccaacgaatttaagcatcggccttctggtagacataggccaagccacacttgccgcaatagtggcggtcgaagtgattggccatgaaagtcccggcaccacactcggggttggggcacttcttgcggagcctgtgcacttttccagaatcggcgaccttgtagaactggagaatgccaagcttgaccttcttgtgcttgtgtaagatcttcttgggcttggtgtaggtcttcttcttgcgcttcttggcgccaccagggagacggaggactagctggaggacggccgcaccctcgccgactacaacatccagaaggagtccaccctccacctcgtcctccgtctccgcggtggcgccaagaagcgcaagaagaagacctacaccaagcccaagaagatcaaacacaagcacaagaaggtcaagctcggcattctccagttctacaaggtcgacgattctggaaaagtgcagaggctccgcaaggagtgccccaacgccgagtgtggtgccgggactttcatggccaatcacttcgaccgccactattgcggcaagtgtggcttgacctatgtctaccagaaggccgatgcttaaattcgttggaagtgaattctctgtggttctattttaattttagttatttaaaagttttggttaatgtttttgttcaattagtgttatgactgtttgggctttgattaaacctttatgaatactgtttcgctttggattacttattatttttcgctttaaatatattgttagtttggtttatataatatgtagccgcctatgcatgttttttt

SEQ ID NO: 125016 - DNA, 831 bp, Glycine max
  unsure (1)..(831): unsure at all n locations
  Clone ID: PAT_MRT3847_83899C.1
ttgcatgcctccagttgcaagcttggtggtactactagctgcactaaattgttgttgtggtaatcaaatgcagatgcaatgcagtagaagggggtaaagacaatatattactacaattatatgaaattgagtaggtaatactaagaatagaatattagtagcatgaccgaaaataaaatagccattgtgtcaaataacataacaattgtctcaaatacagggaaaaaaaatactccaacgccatcattagccgttttgacttattgctgtctttaaaaaaaatgttgcccatttctttcgaattgtggtgatgatgccgatgtccaacggtgtgtcattagcaaaccactgcaagtattcataattgtaagttagtactgcaaatataaaaattcagttccaattgtcctgaagtttatgcataccatggaccgatcactctttatgtcgctggctatgatgttccagatccaatgcattatgtaatatccacattcataacagccggtttgaacgtgactctacatatggaaaacatttgaacatcgtatacattacataagttcatgacttaactagacaacactaacacatggtacataactgacttacctttacttcaatccactttggtgcaactgccttagttttaggagacaaggtcttcttcaattntgtcattacactgcttttaaaaaaccacatcaacgcatatacaacaaaatgtcaatcaataatgaccattaaagaaggcttngcaaaaagtatatggtatgagataacctattaattgtagctttgatatgcatatcagggttcctactgttgaaa

SEQ ID NO: 125017 - DNA, 320 bp, Glycine max
  unsure (1)..(320): unsure at all n locations
  Clone ID: PAT_MRT3847_8389C.1
gcacgtgaaagctgccagcacatcccaggngcctnngctgtggcggcttctccttggaaagctccacgcacccttctgccagggatcctgtcctgcagggatgacagacccagcagcctcggcagagggaatgaggctccagcagcttcatcagcaagtggcctcactgtgtgaataacggatcctgtttatttgtggnagaattagattagttttaaggaactgtgttttcttttcctagaagaggggccctttctagctatacntccaccaaagattgctttccttggcagtctaaggnaaagctgggntgcacantg

SEQ ID NO: 125018 - DNA, 714 bp, Glycine max
  unsure (1)..(714): unsure at all n locations
  Clone ID: PAT_MRT3847_838C.1
tgctttttgagttctccnacngcgagggggggggggggctcccaaaaaaaaacactcggggggctggggtgcatcnacacgtgggggggggcgcactccacgtgtcctctctgccgaaccccgggcaaaccgggcacgggttcttccgacactgaaccgggttcggtttcggtttcgggggcgggtgggggttgctcctcttcgtctttgcctccgccaattgggtgcccgagaaagccgttgggtataaatataatcgtagagatttcagaggtggaaagagggtcggattctgtaaccggagatcaagggttcagatggtcattgaagaggttttgcaatgtttaagacttcaatgcctggcttggatacaagagggtttttgagagtttttctcctgaaaatatgatatataaaagctttgaaaaactctcaaaatcacttttacctttctattcaaacaggctctaagtgagtgagtgtgctttgccatatggatcataaggatgataaaattcctgaaatcatcacaagacatagccactcatcgatgctgaaacaaagggacaacattttcgttttccgaaaccatagattgtatgatacaggctaggctgggaaagaaaaacagaacatctgttgcttgcaagagttatcccttttgttatggcgttactttctatagaatctcaatctcaattgtgtttaaccttt

SEQ ID NO: 125019 - DNA, 253 bp, Glycine max
  unsure (1)..(253): unsure at all n locations
  Clone ID: PAT_MRT3847_83900C.1
cggagtagtcggaggaaaaacttgaggaatttcagggaaccgctagagatgccgctatacgttgtcgaaagacatgtgagtccgctcagaggttttagtgcatgctgctgatattttcacccatctaccagttttcggaaagttgactnctgcaattgatggggttacnggtgaaccncngtnancctctccccnaaattccccctnntnnanaatcnnctggncnacncaaaatggagcnnncccnnacacc

SEQ ID NO: 125020 - DNA, 2581 bp, Glycine max
  Clone ID: PAT_MRT3847_83901C.1
tttttgaacaaaaaaattgaagatccatttcattgaacatagaacatgagatatacatagaaatatgcatgactactactacatacatcagattgatacaaatgctgatagtcactattataagcagtgaccaaggtgcaccaaaccccactttgggtcggtatcactactagtttactaccggtaagaaccagaaaacaaattaaaaaaaaaaatacatacaagcaatagccaagatcagtgaaagttatggacacaaagccttcaagactgttggaagaccaagatcctcagatggctgcttccaccttaacttcttaagatgaagtaaaagaactttctcccaaacatattagatatagagctcttccatcaacaaagccgatgatgacagctaatagagcaaatcatcaagacaaaattgtaggctatgatctcaataacccaacatgaaaccttcacgttttaagcacaatcctgcctaaaagcatattgagccatgttacttcttcacaatttggctttaagttcgtacaacatcagcatcagttaggactgctgaagaacaagatttagctctagagcagacctggctaatataccacccttccgtatcagtattggaagagtcatttggatcttttgcagttccataaagcacttgttgcagcattcccgcctttcttcttgatgtagatcgacaccaacagagggaggtgctgaaacagttgcacgtattgttggaccaaaaactgctacaagctttaacagcatatccagtgacagctttacatgtctttctatcttgctatccagcaagcctgtgagcacaggaagtaagcaagaaaataaatctaaggtgaaaatctccatcttttccacaaggacactgataacatctgcttgaacagagtgatctggcagctttctcaaagcattggtagcacctttaatatcattgcgttcccaaaaatgccgcaccacctgtaactttgtcaagcgtgaacgaagattactcaatgttgcatcatgagtttgcatcagaccttcaatgattttctcttcatttgcagagtttgaatcctctttataaatttgaggctcaactttcactgtgttaggagacttatcagtttcagatattgtcttgggaagggggggcaaattgtttcgatcttcattgaagggaattctttcctcgagccgattcggctcgaggggtgtaggagatgctttaatttgatcttcattgtgaactttttctcttgtttcatttattgtgggaaggaatacattagtttgatcttcatcaatttgaatcttttcccttcgctcaaacctctcaaccaatgaccgggtccttcctcgtacaacagcaactccattgacatatttaactggactaatctcttccttgcagggtgaggattcgtcacgttttgtttgttcagaaaatctgcttggagatagagtcttgtcaaacttgtctgtgacattcttgataggatgtttatcttcacaagattccttaacttcattttgaaatcctagattcagttggaagctgggttcttttgtgatgcctgatttaatagcagtatcacaaaaagttctagaattcacatcttctgaaaacctatcaacatcaaatctgccagtggatgctcttcgtacatgagctggtctaagtaacattccaggtttcgtctttgaaaaggagatggtctctttttctgattttgccgataccttaccatcaggagtgtcacgaggtacaatgtttggcgcaatgaaagattttctaattgcttgttcatttgattttacacgagctcctgttgcaggactctgcttcattgttcctaagttgcaaatttccttgaattcctctgggagatctacttttgttgaacttaaagaccctgatctctgtaaagtaactggcttccctccagaagagtcaatatatatattctttatctcctttgactcatcaggagacatgctgcggaacccagaggttggtcctacattaacttctactttctccagtttacttccctgaagaccaagtttttgttctgtgccttcatttttcttgggatccaagccagcaccatatggctcaataagcgatatatctgctacccagactccgacagaatttcggtagaatgagcaccccaaaagtttcccatcgtgaatacaaagatcaccaagtgttgtccatcccatatcaatagtatcatgacatataacaggttcccatgaatacaccttcaaaccatcttcatgtccagtaaatagggcccttccatcaggatgaaaagctattgagcgtaccccagtagcctcaggtctagcagatccaatcagttcaaaggtttctaaatcccagaatttcactgttctatctgcagaacctgtagccagaagaaactcaagcggatggaaatctattgatctaatgtgtccttcatggaacttgaagtcatgcaagagcttcccagctgttagatcccacaccttcacaacattatcaaatccaccagaaacaacccaacggccatctggagtgaat

SEQ ID NO: 125021 - DNA, 329 bp, Glycine max
  Clone ID: PAT_MRT3847_83902C.1
gcgactccaacaaatccctaatctcaacttttacagtatcacccgcaggcgaacacgcgtgcactatgccgaacgcgacggaacatgtgaatcatcaatctgtacgaaccgactgttgtgctacaaacatgttgatgaacgcgcagaataatctggcgaagcagatcaacttcgaggctatgaatgcgagcaagaatgacaccgcacaggatcatacgctaaaagtattagagtgaatgcggactgagtgtgatgcgagctcttgctgtcgacccaatttagcaaaagcagaacttataaactctcgaacgaacctacgtatgtagaga

SEQ ID NO: 125022 - DNA, 573 bp, Glycine max
  unsure (1)..(573): unsure at all n locations
  Clone ID: PAT_MRT3847_83903C.1
aatggggaagctagttacaggtgccannnntcctgccgtactttattttagcggataaaatacgcagatcattgtttatgctgccggaaagtacagaattttcggtgagacaattgacattgttgttggaaaattgttggtatagatttgcaagagcgttgaagataatttaatcaccattcgtgttgaaaagtaagctgtccaattgaaagttatatttcgacgcgaatgaacatcgttgaaatgtcaactaaagttattaccataatttggggagaaaaaaagattattttgagacctaaacatcatcaaaatgtgattcatgagttgattgataaatgtgtcgcnnngggaagtggttgtacagctgatgaaattgatgtgtatatgttacaccaaaggaccgggaattaggaagggctccataacaattaatagcaattgtctctcgaacattagcttaattgtgcaataagccgaaagctgccgtgaatcacaactcgtaaggtaataatcgtacggtaatctcgtgattatcctgtcaacaactaaaagggttacacaattttcacc

SEQ ID NO: 125023 - DNA, 1101 bp, Glycine max
  Clone ID: PAT_MRT3847_83904C.1
ctctcgagccgaatcgtctggatctggtctccatgagcacgccaccgctgtcggtgtcgctctcgcagtgtacgaggttgtttggcgcgtctggtttcacgcgcctctgcaagggtctctctctggtcctcatttctcttcacattctccttcacctcttcccttccgctatcacctgcctcgccctcattcccgccaggactattccctttgcctggaacctcattacagctggttatgttgaacaatctgtctatggggtagtggtcagcacaattggtcttctcttcattgggaagctgcttgagccagtttggggtcccagggaatttctaaagttcatctttatagttaactttctaacttctctctgcattttcatcactgctattgctttgtactgcattacagggcaggagagttacctttatatgccattctctggatttcatggagttatatttggcttcttggttggcatcaagcaaattgtaccagatcaagagcttcctttcctcaagataaaagtgaagtggttgccatctattgctctattgtgttctattgctacgagcttctggtcactagaggcaacatcatatcttccaactgtaatatatggtacatatatgagctggatttacctcagatactggcagaggaaaccagaaacaaaactcaagggtgacccaagtgaggattttgcattctctacttttttccctgagtttttaagaccggttatagaccctattgcatcaatatttcatcgaatgctctgtggaagattagatgcttctaatgatgctcaaggttacactgtaagaggtgaacctttgccaggttctgaccccattgaagcatctaggagacgagaaagaggtgctcgagcactggaagagaggttggctactgcacctagtgcaggggagttagaaacagatgctacagaaattgtttaattccttagcttttgtaaattcagataagttcggccaatatgaaactgtaatgagtaacattttcacaagtggtacagttttttttgaagggcctcaacaagtggtacagtaatgggaaaaaaattattttctttttaaa

SEQ ID NO: 125024 - DNA, 418 bp, Glycine max
  Clone ID: PAT_MRT3847_83905C.1
cgaagctcggaattcggctcgagagagcctagagtggggagtgatgaattgcctgttaaggtggagaaggacgagggtgagtcttttcctgctggatccaaaataaggaagcatcatcacagggaagaggggggtgttgaagaaaatagaagcagcaagcaagccgcaattttctctgaacctacattgcgatcatccatgattgatataatcctgcttcatagtttaggggatggcaagaagcattttatggcccgccgtgaggccttgcaaaccaagaatgagaagatagtggtgtcaaatggtaaatcaaaggcttccaatggtggcaaggggcgtagtaagaaacaaaatgggaaaaaggaggtggtagatttgagaacacttttggttctttgtgctcaagctgttgctgcag

SEQ ID NO: 125025 - DNA, 380 bp, Glycine max
  Clone ID: PAT_MRT3847_83906C.1
ctgagacacctgtaccctaatctaagaatcaacgagcataatgttagggctcattcacaagattgcggagagtccttgatcggcccctgattcagactaacccttaccaggatgtaatagcactgtgacattataaacactgatcacattcatgtggaacacagctctatggacagactggagactatcgagcaagatttgtttgaacatgtgctattggtgactcataaaacgaccagacattgatttcttactatacgctgtttgggccacaaaacatggtcctgttgtatgcaccgcccgcgactggaataaccatgcttgacaaagctattgcctaggcgtgagcatcagcttttattaacgtgagaatatcacac

SEQ ID NO: 125026 - DNA, 376 bp, Glycine max
  Clone ID: PAT_MRT3847_83907C.1
aacgcttataactcttggagttacattccgtactctacaggttcactcaatgatcttagccaatctaattaaattagatcatatatcagtttactttattgactcgcttcactttaaacccaaacataattagttacaactagatcaatgttaactaatttgcttactaaatcaacatctatttatctttaaacatttaaattcatatattttagacttagaatctaaacatttcctctattggatcttttgatcatttattttgacttttattcactgcctttagtgatattcacttgaaattaaaccaatcttaattggattaattcgatttaaaattaattattaatgatataaaaatcaaagcaaacctatt

SEQ ID NO: 125027 - DNA, 189 bp, Glycine max
  Clone ID: PAT_MRT3847_83908C.1
caaaaaaaaaaaaaaaaaaaaaaaaaaaaaaaaaaaaaaagaaaaaaaagagggccgggaaataaaaaaggataggtgaacggggggctgatagggttccccgatctggaggggtgtggcggttggccccatggggggtgcagcggttacctgcgggcaagtggggaacggcctgatcgcccgcatcgg

SEQ ID NO: 125028 - DNA, 456 bp, Glycine max
  Clone ID: PAT_MRT3847_83909C.1
ctgcagcatgcaaaagaagtggttccagatgctctagcttcacttccataggttgcaatgcggctatgcagtgagatgctgatgctgaactcttttttcagtgcctattaggtcattacttttcagtacttgaaaagattttatgcacggagaagtttttggtagtattaatatttgattacattgtaaatttacaacgttatatgtatatacactaactctcttcagcaacatgtgcaaaaaaaaaaaaaaaaaacctacttataagtagagccattgagtatcaaacacttatgtgcaaaaagtggagtaatctaacatcacaatatcattttggcatcctatttaccatgtcctccaagctcataggatagcacatttaagtgtgccagccattccatatattgtctgtcagaatggcattcactgcataagttggatgaaaccgatcccacc

SEQ ID NO: 125029 - DNA, 1436 bp, Glycine max
  Clone ID: PAT_MRT3847_8390C.1
cccacgcgtccgaacacgcgtgggttcatcgagatggaagaagcattgaagaaccaatagtaaaccctccttatcagctatcactttgaaaacccgcattcggccaacactatacaataccataaccttatctatcgcaaccacctcccaaatcactctcatccaacttcatctctctcttcccccagttgccagatctgaatcacaccttcactcttgcgatttaattactgagtagttgaggatggctccttttgcttttgcaacattgccctcttctcacatctgccgcctcccaaagcccacaaacttgaagtttcgagttcgctgctctactgccgcgtcttctccttcttcggtttccactagatcaaaagctgctggctttgatttgaagacatactgggccaacctaatggtgcagatcaatcagaagctggacgaagctatcccggttcagtttcctccgcagatatatgaagctatgaggtattcagtccttgccaaaggtgccaagcgagccccacctgttatgtgcatctctgcctgtgaactctttggtggcagccgccttgccgcctttcccactgcctgtgcccttgaaatggttcatgcagcttcattgatacacgatgatcttccctgcatggatgactccccctcacgccgtggtcagccttcaaaccataccatctatggtgttgacatggcaattcttgcgggcgatgcactctttccccttggatttcgacacattgtttcacaaactccatcagaccttgtgcctgagtcgcacctccttcgtgtgattgccgagatagcccgctctgtaggatccactggaatggctgcagggcagttcctggaccttgaaggaggacccaatgcagttggatttatacaagaaaaaaagtttggtgaaatgggggagtcttctgcagtgtgtggaggattcttggctggagctgaagatgatgagatagagagactgaggaggtatgggagagctgttggggtattgtatgcagttgtggatgatattatagaagagagattgaaagttgagggagatggtgacaggaaaaacaagggtaagagttatgcagaggtttatggagttgaaaaggcaatagaaaaagctgaagagctcagagcaaaggctaaagaagaattggatggatttgagaagcatggggaacgggtctttcctctctacagttttgtggattatgcttttgatagaagtttcagtgttgatgatgccagtggataacgggtggttcttgatatttatatatttatagttctttgattgatcgactgactacttgataatcgatcattgcattgcatagagaacttacacagtttagaaaacggtactgcaattctatacaatcaaatgaatcatcctcagcatttagactttaccgttc

SEQ ID NO: 125030 - DNA, 418 bp, Glycine max
  Clone ID: PAT_MRT3847_83910C.1
ggggtaaatattttttttttttataattttattttttttttattttttttttttttttaataatttaaaatacattattttttggggagacccaagggggacacgagaaataatcggaagaccccgggggggccccccccccccgaaaaggggggggagagagacacccgaaaacacccaagcgaagaccagaacaccggggaaaaaacaaggccaggacagatcccagagagaaaagggaccaagaacaaaatatcccaccacagaggacccagacaaccgagacaccacacactaggggggcaaaagaaaggggcccatcaacaaaagaaacccgccgcacactgcaaagggaacaagggggcaaaccacccgcggcaggaggctttataaaaacgacaccccggggggggaggga

SEQ ID NO: 125031 - DNA, 1021 bp, Glycine max
  Clone ID: PAT_MRT3847_83911C.1
aattcggctcgaggaaaaatatcttcatgagcataaagaggcatgaaggattggattttgaatatccacctagggaccctggaatgcctcattaccaaatgcatgattgggacaacactggaggaagattttctgatgcatctacaaataactcacatggggaagccagattgcataacttgattcctgaggatggcaaaagagatcctcatgatactgtgcacaatgatcatcctgacatggaagcaaatgaaaagaaccaaagccctataagatggaaacagaagcctcttgtagaccagcaacaaaacaagagcatttctgaccttgcaatgaactatgaaaataggaaaacattagatgaacatattatagaatttttggagccagaaatccctatcaactaccctttaggaaaagtatacacaaactcttattcaagtacctctaaccatagaaatgagagagaaacagaaagatacttcaaaaagagagttatcatccactttctaagcaaggaaagaacaacctcacaggaacagcatgggaagttgataatcctacctgattcaatagaagagttgctccatactgcgggagaaaagtttggagacaccaagccaacaaaagtaattagtacagagaatgcggagatagatgatattagtgtcattagagatggggatcatcttttttttctttgcagtgacagtgaaaatttgagttcataatcttatcaaatgccagtaacagtgtggaagatatgaagccatcttgtaaccatagtaatcataataattaatccaaaaaagcacagacagattacataaagtgccaaactgtcaatggagatagtgatatctctttctattttgcagaaatactgaagatttgtgttcatgactttacctaacttaaagtagctgtaatatttagatatgtaatcatgatacgaatgtatattccaaataatgaaaaaatcataccattcaattaccaaaaaaaaaaaagataaaaacaa

SEQ ID NO: 125032 - DNA, 377 bp, Glycine max
  Clone ID: PAT_MRT3847_83912C.1
gccacgcgtacgatgttcgcacagtgcgcgagtatgcgaatggagcaagctgagaccaatggggtgctcaggaccctctgctgtgcgtgtctcggcataccgagcacccgtctggttttgcatacgctctatgtgacttcaccttaaccatctctatacgcgcccttatttctagctcacgcgcccttatttctcccttactgcggccttatcagtctcgtcgtttcttcgacgtcaaaggctacgccagggagctttcgatggtgggcaacaccgtaccgtatttggaatgcaaaggctgcgcttgaccagcagtttctgaacgagaaactatttgattacattgggaagaaataaggcgtgctcttcgtctaccc

SEQ ID NO: 125033 - DNA, 383 bp, Glycine max
  Clone ID: PAT_MRT3847_83913C.1
gattcttataaaacataacaaacaacaaagtgcaaaataaggaaaaaagttcacgatgttgacacattgccatcaattgtgcaagccagtttccatcatgattctagttaacttggctctggcttttgtcaatttacttctgaagaaggttcttaatgaaggaatggactacatgtccattataacatatcgacaggcaatttcatttatcttcatggcacctattgcctgcatctatgaaaggaaacacaaacaaatcaagatgtagaatgtcaatagcagagccaccaatggcaatgaataactttgatccaaatgtgtcctctaatcttcccgggatacaagttctctaaataacaaaaaaagaagtaatatgctgttat

SEQ ID NO: 125034 - DNA, 418 bp, Glycine max
  Clone ID: PAT_MRT3847_83914C.1
attctttcttccaaacatgacaatgcgctatatgagaatcatacattacaatcagcatatctttgttcaggactgataataaccatgaaattatcgtgattgtaacaatcggaatacgagggaatggaatagaccataacattgaacatcccttgccaggtgggtgcaccaaccacctaggcaccaaccatatgaccaatcacggtaaaaagagagagagaccatatcctactacgaaaagcatacctgtacctttccatcacagagggagataacatgcaggagacgctcatggcttccacagaatgcaggggtctgcaatcatgcaagcaaccacgtatgggtccatgatggaagctggccttctgtcctcagaatatccgtgacgtgctcactctgggtgtataccaaccctaac

SEQ ID NO: 125035 - DNA, 278 bp, Glycine max
  unsure (1)..(278): unsure at all n locations
  Clone ID: PAT_MRT3847_83915C.1
atctttanatgatgtgattcaataccgaaatcctaaggataatgttgtcattaaggatggtaggatcaccanagatggtattatttgtacatgttgtgataaggtgctcacattatcagagttcaagtttcatgctgggtttacagtgaatcgcccctgcttgaatattttcatggagtctggtgagccctttacactctgcctccttcaagcttggtcagctgaatacaaagccaggagnagccaaaatcaagccgtacatgctgatgataatgata

SEQ ID NO: 125036 - DNA, 354 bp, Glycine max
  Clone ID: PAT_MRT3847_83916C.1
gaaccccctttttttgacaagggttggggtttaaaaaaagaatgaacccagcttttggtgctccttggggaatttttcaaaggtttggttttttttttttcccgccaataggatacccgttccccttttttttactcccataaaatcgggtttcactgaaagggctcccatacacaattcttcaaatgggggaacaataggggttttttttttcaacttcttttccaaaaagctggttttggggccctttattggcattcccttctcacggggctttttggggacattctttgaggaaaaaccaaaaaccttgggcctttcttttaaaaaaaaacccaaggggggaaaaccaat

SEQ ID NO: 125037 - DNA, 647 bp, Glycine max
  Clone ID: PAT_MRT3847_83917C.1
gcgtccgcccacgcgtccgaatccgggtactatgcaatgcaaacatctctgagcatttcaatcccaagaaggatgcatcatttcctgaaatcaacttggtaaatggggagacaagaggtcttatcggtgggtaccctccatgtaaccgaacaattttggccttctttgcagggcaaatgcatggtagaattaggccagtgcttttccagcattgggagggcaaagacaaggatgtgctagtttatgagaaactcccagacggagttccataccatgagacaatgaagaagagcaagtattgcatttgtccaagtgggtttgaagtggcaagtccaagaattgttgaggcaatctatgcacaatgtgtgcctgtgataatatcacaacaatatgtgcttccttttagtgatgttctgaattgggactctttctcggttcagattttagtgagtgatgtacccaagcttaaggaaattttgttgggtatatcggaggacaaatacatgagattgcaagagggagttaagcaagtgcaaagacattttgtggtgaataatcccccaaagaggtatgatgtattccatatgattattcattccatatggctaaggaggttgaatgtgcgtgtgaaataagtcatcaactct

SEQ ID NO: 125038 - DNA, 711 bp, Glycine max
  Clone ID: PAT_MRT3847_83918C.1
cgagggtaatgcatggaattgcaagcccagcttatccttcaacagcatggagtaaaactcatttctggggaaggtatacgcatatagactttcaggtagtgatggaagcagcaaaggaagaacttaagaattttgttggaaaagatacactctagccgtttagaattgattgagtttaccatacaaatttggatcggggatcacctagtctttaacagaatccgtccaagacctgcattgatccaaggcccagaaaaaaaaagcttaatttatgtgccctatcaagtggttggactccaattggggagttccgtggcatgttattgttgtcgtaaatttggcaccagcacatgtctgtcatcacatgttgagacagaaacgaaaggaaaattgaagctctgcctcatttgtgtcattgatttgcatttgtccaattgtccgttgggatagcatgcgtcctgtggttggaggaatcatggatttacaatcctttgctgtctgatattttgttgttatcactttgtcctagagtctggtctaaaggaaaaagcagatcaactcactcaacttttagttttttctttttccctcctttcttgaatagcacccaatgccaacaacggcttaacggtgttattatttgcttacacttaaatatctttaaatttctgagtatgtgctcgtgtatacatagtaattcacagtaacaca

SEQ ID NO: 125039 - DNA, 586 bp, Glycine max
  unsure (1)..(586): unsure at all n locations
  Clone ID: PAT_MRT3847_83919C.1
tgtagtgttttttttcctgggggttgagagagagaacagaaggaaagagagaaagctcaacgtcagagttagccgtagcccttaaggttcccctattttgtgtttgtggttttggactagctgaggtacacagagaatcctcttcttctcatccacacccctctctcattctctctttctgataatgagtttaaacttttaaacaacagggtctatatttttgttcatatttgtgtggctttccttggattttatatatttatttatttcctaggtaatatatattatcatatatatatatatatatatatatatatatatatatatattattatatatatattattatcaagcatggtttttcaaaccatgaaggagaaaaatacggattgcggctacaccaccatctgcttcaccttccacttctcttcatcataaactccctcttacttgnttctttcttctgctctttcataaaaacaaaagcttgtctctttggtcagttccaaactagtaacaagttttctagtagtcgtcatatagagagacttattacttacttctgagtttattatcaatatctttt

SEQ ID NO: 125040 - DNA, 280 bp, Glycine max
  unsure (1)..(280): unsure at all n locations
  Clone ID: PAT_MRT3847_8391C.1
ggggcccgggggggggggggggggggggggngggggggggtgttggggngggtgtaaaaaattttgtatggtataggggtaataaaaaggtttttagattagatttaatagggcagcatttgcctgcatcaaccccacatggttataatgcctttatattccaagaagccaatacagaggggagtntaaccttaactacccccactttttccccctgnaaaatagccctacaatgacaggttnacccttgnccacagtncacaagtttttnaaacttatg

SEQ ID NO: 125041 - DNA, 159 bp, Glycine max
  Clone ID: PAT_MRT3847_83920C.1
ctcgagtccgattcatctccagtacggctcccatatcacaactattataaacacaccgtttgcactatccatacgcgaactttctctacggacactgtgcgtacattacaacacacccttttaactacactcaatgtcaattgcaagatcctaatctac

SEQ ID NO: 125042 - DNA, 281 bp, Glycine max
  unsure (1)..(281): unsure at all n locations
  Clone ID: PAT_MRT3847_83921C.1
aacacgcctttctaccacaccaaaattaagcatcatttaaaatcataaaatcacacatcaactagccgatttnttaaataaaacattccccactcatattttcacactttattaacaactttcttcccttttaactcatacctcctcctctaataccttcccttttcataaaatcaactccccaactattcacacttaaacttactataccacaccttttcaattttcccaaccctttccttatataaaattttattaacacttctctcatattcctttca

SEQ ID NO: 125043 - DNA, 279 bp, Glycine max
  Clone ID: PAT_MRT3847_83922C.1
ggttttaggggttagaggcactcaccaaattgaagacatgaaaacaagatgctgttttggcgcgacgaatgatcatcaaagagtgaaaaggcatgtgctttgactccactacaacacattatgtgactagcctctgagccagcaccctaacataagttttttaacctgctgggggacaccaatatctttgaatacgcgaaaaacacagcagccaaccccattttaaccttctatgaacatgcaccaccttacccctttctactgcatgcatcggctttt

SEQ ID NO: 125044 - DNA, 584 bp, Glycine max
  Clone ID: PAT_MRT3847_83923C.1
gcttcaacccacatcagaaaacacctcgttttcatccattcaatccctcaacctctcatacaataggtttaccaactcaatccagctttctggtttcaaaaaccttaaaatcctcgacctttcccacaacaacctcgtaacactcccttccgggtttcaaaacctcagcaacctacaacacatcgacctctcaagctgcaatcttcaaagcaacgtaaaacccatttccgctcttcactcacttcactacttggacttatcaaacaacaccttcacgggtaatttcccttatgatttccctccactcaccaccctcaagttcctcaacatctcgttcaacaacttcacctcagcaattagcgtaaacaagttcagtagattcttcggtaaatcagctttcgtccacgctggcagcaacttcacctacaccaacgacagtaataaaaacacaaaacaagaagccatcatcgaacagaaacagaagaagcgaaagtccaaaacgctgattggtgcagcgtcgtctgcggcatcagcaattgtcctaattctcttgggcatatgggcagtccgcattgtgattcaga

SEQ ID NO: 125045 - DNA, 249 bp, Glycine max
  Clone ID: PAT_MRT3847_83924C.1
cttccacacacgcgcgcagatgcagagtgagtgggtaaagcataatcatcaagtgttgttcctccctgcacttgctctcttcttcttcttcttagttactcattccttccttccttcctttcgatttccgcattcattcaatggcacttacaacactctctctgctcccatcctccactcctccctgcttctgcggcatcctccatctctgctcccacaatagcttcctttttatccattctccttctt

SEQ ID NO: 125046 - DNA, 772 bp, Glycine max
  Clone ID: PAT_MRT3847_83925C.1
aggtaacctagacaagatggtggggataacgaactcaacgacagtggacccaattaagaaggaactgctgaggtggctaaaattttggaaacacttaactgaggtaacttgttcaggaagcgtgcatagaagaagacacagaaacggaaacattgtcaactctgaaaaaaagaagaaaggaaaaattggaagcacttcagcattcgaatcaaattgttaaggggagacagagagagagagagagagatcaagaaaaaagaaaaaatgggtttttttataatttgaacaaaaggggtgcaagagagagagtgaaatggagagaagagaaaaaggtgtgtggggaggggataaaaggggtggtggattaatggtggaaaagttaagggaagggactttggtggggaaaaagggagggcctagtactccaccacccacatggagacttgagcaaaatggtggtgacaaggttcaagagtttcttaacttttccacttcaactctttctgctagaaagctctgtgccaacctctgggaagttcttccccaccaacaacagcaacagcaacaaaccccacttgtcaaaatgaacaagcttggcacaacccaccgccgccgtaaccgccgccgccggagccaacaccctagggacactggctctgaagtgacaacaacaacaaccaattggctgatccttccagacacccttctgattctgatcagccagcatcatcagcttgtagcctgagaggcatgttgcagcatcacctgttca

SEQ ID NO: 125047 - DNA, 600 bp, Glycine max
  Clone ID: PAT_MRT3847_83926C.1
ccacgcgtccgtaagaactcaacgacagtggacccaattaagaaggaactgctgaggtggctaaaattttgggaacacttaaactgaggtaacttcgttcaggaaacgggcatagaagaagacacagaaacggaaacattgtcaactctgaaaaaagaagaaaaaaaggaagcacttcaggcttcagcacttgaatcaaattgttaaggggaggcagagagagaaagagagatctgaaaaaaagaaataaaaaatggatttttttgaaatttgaacaaaatgggttcaagagagagagagtgtgtgtgaaatggataggagagaaaaaagtttagagggaggggacaaaaggggttgtggattaatggtggaaaagttgagggaaggggtttcggtggggaaaaagggagggcctagtactccaccacccacatggagacttgagcaaaatggtggtgataaggttcaagagtttcttaacttttccacttcaactctttctgctagaaagctctgtgccaacctctgggaagttctgccccaccaccaacagcaacaacaacacaccccacttgtcaaaatgaacaagcttgggaccac

SEQ ID NO: 125048 - DNA, 418 bp, Glycine max
  Clone ID: PAT_MRT3847_83927C.1
tatgcgaggagatcatgagggacataggccttgccaggctctacaatatggcggattctttcttcttccagagacttttgcaagacaaaccttacataagtgaaacactgttagccatgattattatatctttagtctggtggacatttcatccattcatatggcagaacagaaagatctactcagttctaatactgtgcacggttctatcactcttactagcttctcaagttctgcgaatagatcacattttattatacacaacttccagctccaaactaccattgacaccagggttctaaacttgccacattgccccatacagatactgaccttgaagtgctcttgatctattatccgcgtggcgttgtctatggatatagtgatttgatattatcatcacacatgatctttactc

SEQ ID NO: 125049 - DNA, 193 bp, Glycine max
  Clone ID: PAT_MRT3847_83928C.1
ctttggtcctcagttcccgtgattttgtcttcttttcttagggggcgcggttgcgtttatttatttttatgcagtgcctttatgttgatgacgacgctcttcactatttggagagagggcttgttttgattcaccagatttgtttgtgctctataggactcattttaattttttgttatatatattctttttt

SEQ ID NO: 125050 - DNA, 571 bp, Glycine max
  unsure (1)..(571): unsure at all n locations
  Clone ID: PAT_MRT3847_83929C.1
ctttgttcttgttacctaaagaaaatataaactgcttgattatataattataaattggatgtttattaagtgtggtgccagtctgttaaaccattctacttggtaaccccttagatgagatcagatttgaggcagaacaaatggcatggccgtaaatccccttcacaggacatcacacaaaatatagttgaaaaagtagtgaatatggcttttgttgatgataaaggacataatgtacttaaggacacagtttaaaagatgacttaatcactcatttaattcttatagttacaacttttttatcttttagtctctacttaacatatcattttaatctataaacattctatttttaatctcttttgatgttcattgtaggaactaaaaagattaaaaatgatatgtgtaggaactaaaaaattatgtgtaggactaaaatgagatgtgttgaagtatagagatttaaaggtaaagtttttgtaactataaaaactaaataagtatttanatcttaagatcttgacttagtaactgaatttatcttttatcaacttgaaaaaaaaaagcatcc

SEQ ID NO: 125051 - DNA, 368 bp, Glycine max
  Clone ID: PAT_MRT3847_8392C.1
tttttgggaatattaatcatatgaattaagataataataataataataaaagcatacagccggggcataacaacattcagtatcaatactctccttttctttactttattccaccttgatgcatcttaagagagaaataaatggaataattgtttttaggctgcaaatttagacaaaataggagatattatcacttgaaattgtggtataaggggggggatccctttgttggatgtacatggaaggaggggaagaagttagaggaagaggaagaggaagagaaggaggaggaagaagtggtggtggtggtggtggccgcggtggaacagcaattgaaacagccccagatgaaaggagcattgcaacat

SEQ ID NO: 125052 - DNA, 338 bp, Glycine max
  Clone ID: PAT_MRT3847_83930C.1
ggatctggatttggccaagttcctggaacatggcacgtaagatgcacgatcctgccgcaggaagacaaaatccccgcggtgatcacccgcttcaaggctttccatgaggcgttcatggctgagtaccgcgactgaactgttacagtggctgagtaccatcgtgtagaccgaaacaaaataaagctccactctctctctctctgtctctgtgcgtgtgtgtgaactgatctctgaatggaagaacaatgtactctgttggcgcctttaatggcaattgaggaaaattttgatcaaatttctgttgtgctaggagccaagctgaaaagccacgtttttct

SEQ ID NO: 125053 - DNA, 818 bp, Glycine max
  Clone ID: PAT_MRT3847_83931C.1
ggctcgagcacaagcataccataacctctgcttaaccacgaagaaaccgagacaacaaaacacacttttttttctttttttttcctccgtttctgccctgttctttccacgctgttcttcaccctttcaaccaaaacatgatccaccccatttcatgtttcctcttccaaccctcaaattctccataaagttcaacttttttcgatcctttctcaactgggtcaatcacaacaccaaaagggtgtcacaccattatactctcaaattcttcagctctaatggcgacgtgccctgcgaattccttcaacttcaacaccaccctctgcgcgtgcacccccggtcacgtgctccagcacgtgaggaacacgtgcgtgctctacgaggggaattcaacaatcctcaccgacaccggcgtcgactactacgcgctgagcttccccgagacgctcttcgcgttcgacagaatcaagaagttcacgcagtcgcaggcggtgttcttggaagccacgctcgttatgctggaagtcacgctcgtgatgcttctctcgtggcttctgttctgcgtgtttctgaggtgcacgaagctgggtgatgggaggaatgtttggttcaagatcaggtggtggatcagtaggttggatatttgctttgccacaaggcactggctggatgatcagaaagtggtcactaaacgcaaaacagaacttggtggagctttctccatggcaagttggatactatttattggtttatttgccgtgttgctgtaccagatcatatcaaagagatcaattgaggtgcacaatgtcagagcaaca

SEQ ID NO: 125054 - DNA, 1391 bp, Glycine max
  Clone ID: PAT_MRT3847_83933C.1
ccacgcgtccgcccacgcgtccgcccacgcgtgcgtacggctgcgagaagacgacagaagggtacggctgggagaagacgacagaagggtacggctgcgagaagacgacagaagggtacggctgcgagaagacgacagaagggtacggctgctagaagaccacagaaggggaacggcgtttccaccagcggtgactctctgagatctattccgacgccgtttctcaccaaaaccttccaactcgtcgacgatcacaccatcgaccatgtgatttcgtggaacgattctggatcgtccttcatcgtctggaacaccaccgttttcgacaaggatttgctttctaaatatttcaggcacaacaacttctccagcttcgttcgtcaactcaacacttatgtaatctaattattcttctctatcaattcctttcttttctctttttacatttttctgatttttcttaattttgcttgacttgtagggatttagaaaagttgtacctgaccgctgggagttctcgaacgagtattttcgaagaggcgaaaagcgtcttctctgcgaaatccagcgacggaagatcctctccgcatctcctccgccggcgggagcaactgccaccgtggcggttccgtcgccgctgccgctatctgcgatcccgacggcgaagccgatcgtgtcgccgtcgaactccgcggaggagcaggtgctttcgtcgaactcgtcgccggcgagagcaccggtggagctgttggacgagaacgagcggctgagaaaggagaacattctgttgacgaaggaattggtgaagatgagatcgctctgcaacaatatattcaatctcatgtcgaattacgctaacgctcaagcggacggtagttccgcggcggcggcgaagcggtgctccggcgaggatgcggtggaggagatgaatccgaagctgtttggggtggcgattggtaagaagcgagcgagagaggaggaaggacatggagcgaagtatgatacggctttgagtctgcatcagccgtttcatgcggacgtgaaatctgaagcgttggatttaccaggacgtggcgaaaataaaaaaacgccgtggctaaatcaatgtcatagagcaaatcagagggtgtgtaattgacacacgacgttgtaatagctaggtaacacgttaggttaagttaggggcgtcgtagagaatcagagtctgtaagcacggagacgcgcgtgtcaaatgtacgtcgttaaccgtttgggacttttttcgtagaagtttctcagaagaaaactatattttgttgttcctttcctttaaaaaaatataaagttaagggcatatattggacttggcatgtatatttgccttggaagggaaaaaaataattccttcttcc

SEQ ID NO: 125055 - DNA, 264 bp, Glycine max
  unsure (1)..(264): unsure at all n locations
  Clone ID: PAT_MRT3847_83934C.1
ctggggaacagaatgaactgtctctgttaannctggtncngncntggnaacatccagaactgacaccatattctggatgttgccatgccagcaccanctttaactgggggaacagaatgaactgtctctgttagagattttgcagccgtgaccccacaaatgcagaggagtntnaagacatgcaggcntttnaacacatgacngtccacngagctctncatcagaaggnnancganctcaggtngngaggataaggataccgtt

SEQ ID NO: 125056 - DNA, 270 bp, Glycine max
  Clone ID: PAT_MRT3847_83935C.1
gacaagcaacaaaaaggctctgtctttctcttttggatcttatttctgagatcggagcgatacaaagggagaggggatgcaaataagcaatacactttcccttaatattattgatttatactttcgagagaaattattctcactttactgggatacttacgattaattaaaattattgtcgatccccaaaaccatctttcgactcatattatgtctttgcattcacaagttacaatattactacatcaacatttaatccctttttccttt

SEQ ID NO: 125057 - DNA, 354 bp, Glycine max
  Clone ID: PAT_MRT3847_83936C.1
ggctcgagggaaaatggacacattaagcgtagtgaatgcgacgcactattgtgttgaggtatcagtatataaactagccgataagtaactatgatgggaaaacacaggatcccaaagctgtgccagatgaaaaacggtatgggtatcatgattgaggaccgaaacaccacatggtgatgtacgagcacgatgaagctcgagcggaacttgatgaggacacgaacagactgacggtgaacgaaatataagaagagttgatgtccatcgtacatgcgctcgagaccccagtcactaagcattgctagacagaagggcacaatagcctgaacacgagtatacatgtacgagtgatga

SEQ ID NO: 125058 - DNA, 566 bp, Glycine max
  Clone ID: PAT_MRT3847_83937C.1
cccacgcgtccgtgtccggttctactcgcggaagcgccaaatcccaacgataccccaaaccccactcacccttcttctcccatatcctaatccccaaattccctcattcaactttcccctcaccaccttcttccacttcctgcaagctcagctagggtttcctcttctcttaaccgctccatgtcgaagaggaagttcggattcgaaggtttcggcataaaccgccaatccacctacagcttcgagcgaccccaggcccctcagcgactctacatccctccctccgcgcgtcacggccacgaccactacgaagacaccgacatcgacaacatcgactacgacgacaacaacagcaacaacaacaacaacaaggacgacgacgacgattacgggagcaataataacaacggtggcggcaacgacgaagacgaaatcgaccccttggacgccttcatggaggggattcacgaggagatgcgggcggccccgccggcgaagccgaaggagaaggcggaggacccggtccgcgacgacgaggacgacgatcccatggagagctttctgat

SEQ ID NO: 125059 - DNA, 2781 bp, Glycine max
  unsure (1)..(2781): unsure at all n locations
  Clone ID: PAT_MRT3847_83938C.1
ccacgcgtccgccaacgataccccaaaccccactcacccttcttctcccatatcctaatccccaaattccctcattcaactttcccctcaccaccttcttccacttcctgcacggaaagaccactacaaaaatcagctcagctagggtttcctcttctcttaaccgctccatgtcgaagaggaagttcggattcgaaggtttcggcataaaccgccaatccacctacagcttcgagcgaccccaggcccctcagcgactctacatccctccctccgcgcgtcgacatcgacaacatcgactacgacgacaacaacagcaacaacaacaacaacaaggacgacgacgacgattacgggagcaataataacaacggtggcggcaacgacgacgacgaaatcgaccccttggatgccttcatggaggggattcacgaggagatgcgggcggccccgccgccgaagcgaaggagaaggcggaggaccggtaccgcgacgacgaggacgacgatcccatggagagctttctgatggcgaagaaggatttagggttaactctcgcgtcggacgcgctgcacgctgggtatgattccgatgaggaggtttatgctgccgcgaaagctgtagacgctggtatgattgagtatgattccgatgataaccctattgttattgacaagaagaagattgaacccattcctgctcttgatcactcttccattgattacgagcccttcactaaggatttttatgaggagacaccttcaatatcaggtatgagtgagcaggatgtaagtgaatacaggaagagtttggctattcgtgtatcaggttttgatgttcccaagccaataaaggcatttgaggactgtgggttttcttcacagattaggaatgctattaaaaaacaaggatatgagaagccgacaactatacaatgtcaggctttgccagttgtgctttctggcagggatatcattggtatagcaaaaactggttctggtaaaactgcttcttttgtacttcctatgatcgtgcatatcatggatcagcctgagcttcagaaggaggaggggcccataggggtgatatgtgcacctacccgagaattggcacatcagatttttctggaggccaagaaatttgcaaaagcgtatggggtacgtgtctctgctgtctatggtggaatgtcaaaacttgaacagttcaaagagcttaaggcgggatgtgagatagttgttgctacccctggcagattgatagacatgctgaagatgaaggcattgacgatgatgagagcaacttacctggtgcttgatgaggctgatcggatgtttgatcttgggtttgagccgcaagtaaggtccattgttgggcagattaggccggaccgccaaaccttactcttttctgcaactatgcctcgtaaagttgaaaagttggccagggaaatcctttctgatcctattagagtaactgttggagaggtggggatggcaaatgaagatattactcaagttgttcatgtaattccttccgattctgagaaattgccctggcttctggaaaagctgcctgaaatgattgatcaaggtgataccctagtttttgcttcaaaaaaggctactgtggatgaaattgaatcacaattggctcaaagaggctttaaagttgctgccttgcatggtgataaagatcaagcttctcgtatggatattttacagaagtttaaatctggcctctaccatgtgctaattgcaactgatgttgctgcccgtggtcttgacatcaagtcaattaagtcagtggtaaactttgatattgcaaaagatatggacatgcatgtccatcgcattggaagaacaggccgtgctggtgacaaggatggggttgcatacactcttataactctgaaagaagcacggtttgctggtgaattggtcaatagcttagttgctgctggtcagaatgtgtctgtgggagttgatggatcttgctatgaaggatgggagattcaggtcaaaacgtgatgcaagaaaaggaggtgggaaaaaaggcaaaggtagaggaggaggtggtgggggtggccgaggtgtgcgaggagtggattttggcctgggcattggatataatcctgagtcaaataatgcaccatctaccacagctcccagtcgatctgccgctgtaaattctctgcgaacaggaatgatgtcacaattcaagagtaactttgttgctgcttcatcaaactctcagaatcaaggctttggtaacaatacaagcatgactgctaataagagaacagcactccctggttttgtatccggtggatcaattggtggtgacataaatacttatcagagtactgcttcacccaatcctgctacatcagcggtaatttccaccagtcaaggttatggagtaaatcctggtcagaagagcacgaacagttctaaacctaaagaaaggcggagaccatcaggttgggatagatagttgtcacattgaatgacacccactgccaaatgtatcaatgttcctatatttaggtcaagtcaagagttgattatgtctgtataaataatgcaccagttttcaatcacctatatgattttaacttccaagaagtagaaaggtttgaggtttgtttgattctatttttgtttttgaaagcagtattgcacaactaaaatgcctcttatcctacgaagcacgtttctattaaatggataatcattagtaaaaaaaannnnnttctttctagtgtctctttgtacttctaga

SEQ ID NO: 125060 - DNA, 220 bp, Glycine max
  Clone ID: PAT_MRT3847_83939C.1
cggttcgagcggctcgagcggctcgagcggctcgagggggtagtgtcggcgatgaagtaactagaataaatatagttacaacatctacttccatgttcgtcatgtttcacttccgctttaaggtcgcggctttctactatctctttctagagtaggacttaactctatacactgatcatgggagtgtgtttatgacaagtgtatgatgggtggcctcatc

SEQ ID NO: 125061 - DNA, 780 bp, Glycine max
  unsure (1)..(780): unsure at all n locations
  Clone ID: PAT_MRT3847_8393C.1
catgcttgctgcctgcgcatgatctggataaaagccancactaacaaaaacaaaatgcctggtaaaagataactagaagaaggatacacagctgtgcacatctctctattatgtagcccatcaattcaaaagctgctgtaaatgcattctgaagcagaacagcacgctgtacaatttctgcataagtttgaccttcagattccttgttcacattgtaaactgtgaatactagaatgcagacaattctgacaatgacaagtgcattctcaggagtatctgtaccaaaattcagctcttcatcttgaccggaagacagaagctcacgcagcccagagcttacaacagcaagaacttcagcaaaagtctcaaggctatcaagttatttgagaaacaaaggggaaaagggtcagaaaaacacatgaatcatcagcgcaagtacaaagaaatgttaagaaatacaccttgtgcgtgtaaacaagattccatttagacggacaaagcgggtgcagaagtatttatatgtttcctgtatactggatgctcctgttctaggactggcatcaacgccaataccccttgttgcaagttttgcttccccttttcctcttcctttgccagttgatcgcccagaagattccttgactgcaagagttntagcatcaccagaaagctgagagaaactttgacgattctatcatggattaaaacaatagctagttagaaatattataatgtaaagcctcaaaggatcacagaccataatacagaagggtgaaaaca

SEQ ID NO: 125062 - DNA, 266 bp, Glycine max
  Clone ID: PAT_MRT3847_83940C.1
cgccgggaccggcccggaccttcctggctcgacccacgcgcccgtgtgctcgtggtccatcgttaacgaaatctgcgggagggtcatcacggcggcaaatgcaactgctgcttgtgctaaagaatgtcccaacaccttcctacattcttggtgtgacggcagctcgtagggagggaaatgactctctgtgctggcgccagacctcatgaatcatcattatttggcacctttatatgaattgctggacaactcatgtatgtgatata

SEQ ID NO: 125063 - DNA, 1023 bp, Glycine max
  Clone ID: PAT_MRT3847_83941C.1
agatctcatccactagattgattgcagcataatgtttgctactctgcctcctctgtacgctgggctgcccctgttcctccgcacgatccaacggcgcccccacggtaccgacctcgtctgaccttgacttaccttttcttgacgacatattcctacccaagtactcgtaccaagagaaaataagaaattaaaatagttgagttttctctcaaattaaaatcaaggtatgcacttaactttttttatagaaactatttttcttaatttcttgacaaaaaagtacataaattgattttaacaggtaaaacttcttattttccttttgtccaaaaagattaaactacgttacaatatgtgagccacgtgcaggcacctagaagtcacgtgacttacggttaaggtggaacccagtggaagaaccagacctcctcctcactgagaaaactccattccagatctcagtgaaggctctcactatcaccccatggtggtctggtgaattgagctgaagaaaacagttgagaagctccctgagatcttccttggagtatatctcgttctccagtatcatctgcagcatagagtgcctgaagtccaggtatggatcatcagagtccttctccaccgccacgcctcgcccaaacgccttcgcggtctcggcgaagtcgctgaactgcgccgaggcctcggcgtaacagggcgagaatgtggcggcggtggaggcgttggtagtggtgctgctcgtcgtggtatcgtcccaatgaagcccgtggacttggcccgcgggcttcttgggcctctgcttcgggtggaatatgtgccgtaggagcctgggtcttcggcagctgccgcagcccaggctcacggacacagtgttcagaaccagtttttttctggaactagacatttctgctgctaatgtggtaataataataatgttttgtgtgttgtgagaaagtgtgagaaagtttgtgggaagtgggaatgcaaagagggttttatggggatgaagcagtgcggacg

SEQ ID NO: 125064 - DNA, 407 bp, Glycine max
  Clone ID: PAT_MRT3847_83942C.1
taagtttttaaattttttatttttacacagcccaaacctacaccaagaaacagttatttttttaactccgataccacctacaacctttccaacactaaaatttaatcccccaaaaaaaaacccccctttttatttatgaaaaccatcccttaagaaaaccaaaaagattaaaagatccccggaagataaatccccccatggttcactaaattctgataaccaaatacaaaaaggtgtgcaacccacatataacttttggtctatatatcccaagaaacaaaaagcccctttcaaaactcatcttttccttgttcttgctgaacaagtttatccccgttctttccgataaaatctattaagccttccttggtcctacccccccccaattgtgaaaactttccactttc

SEQ ID NO: 125065 - DNA, 513 bp, Glycine max
  Clone ID: PAT_MRT3847_83943C.1
tgtcgtccgctgtcgcgtgggtacaagttcaagctggtgaaatgttggattagagctcccactctgctatctggtataggactcagtgggtagacttttatatttctctccttgctttaactctattcttctcactgatccgaattggcgatcaaagtgggcatatttgaaaaacactcgagcggaggaacaaatgtttgcttcgttgattctatctggagacaacaggtgtactgacacaacaatctataattgcacagatttggacatcttggtggctcattatacaatagcatctgaatttagaaaatttctaccacattacattaggtggcatccgtatacctcgctgatctacatcctaccatgttttctcactgctgaaattaaatataaccagaatcagagtaaaattcaaatttacggcttatttcacgacacgatatacgaattcttgactaaacacgagaaaaatcttgctttgagcagatcaacagaagatggaagtgatta

SEQ ID NO: 125066 - DNA, 193 bp, Glycine max
  Clone ID: PAT_MRT3847_83944C.1
gactgggggtcatgtgcctgagacaaattgctgttttatgggagactttgttgatccaggttacaatagtcttgcactttttaccatccttttacttctaaacgttagataccccgctaatttccctcttttacccggaaatcatcaacgtagactcctaaccccggcctatggattttccgacgactgccag

SEQ ID NO: 125067 - DNA, 538 bp, Glycine max
  Clone ID: PAT_MRT3847_83945C.1
gaatactttagtatttttaaaaaggaaaaaaatgaagtaaacatggtgtcagtataatcctagtattattttattattgaagttgtgtatcaaatcatatgaagtatactacaccaaatatttctttacatatcctctctgtcactgataaagcgtaacctgtagaaagttttttacatggagcttttgtaaaatgttcttcagtaatttattggacaagaaactctttctacagtagaattcaggaaggatataatgttcccaatttttagatgggaaaatctgagtctatatatttgaagaagggaatttgaagtttgttcaccagttcaacagttcaagtaagaaaactgatatgtcaatttctgatttatgacggagatggataaatttcatgtcttattttaggttcaaataatcaaatatgtctgtgttaaccagagaaatgtaatatttgagatccttactatcttaatattcctgtatagcatgtggtattggatacataatcactgttgctattaacaactttaactct

SEQ ID NO: 125068 - DNA, 570 bp, Glycine max
  Clone ID: PAT_MRT3847_83946C.1
cgcccctgtgcttcttagtacataagttactaaaaaatttcttgacactgatttaccttagattagctatattccctgaattagagatttactaaatcttgtcacatgcataatgaatgtgctttacagctatcttcctaagtacgaatcttatatcagtttcttgttcttgtcttaattgaaaactacccctgaaagtccaacacaacttattctagggctgcattttaagattgacattattgaaattctattttgatacgagtaatacagtcagctctaaaataagatttttattgtcagttttttttacatgattaaagtttgatttgaatgccaattatttgtactttttttttatacaatttactctactgagatgtattttaagaaagaaaaggatgacaaaaagtttgacaagtcattggaggaggttcatacaccctatgtcatggcgctgtaagtggattgaattgcagatgaagcaacttcagtctcaagcacgtaaatatgagaaagaacttgcagcatacaatcactcaaagcaacttgatttggcacactttacat

SEQ ID NO: 125069 - DNA, 558 bp, Glycine max
  Clone ID: PAT_MRT3847_83947C.1
aaaaaaggggggtcgggggtcccttactacataaaaaagatccgattcttttttttttcactctctcaaaaagaagagctttacaatatacatacataaatacacataaaattactaaggaaaaacgagccaccctagccaaacaactatgggcactttcacaggtttttttttctccttcttcctcccaaaagcaccatcacaaggggtctgacgaagaaacattttccttcggcccttgaaacaatgaaacttgattatattatatctaaaaggcacttgtcattctttaaaattttcaaatagttaaggaaatatgtcgctcactgatcggggcagctgaaaagtctcgcattcggaaaaagcattgaaggagtttttgcagggaaaaatagcaccctgaatccaatcatgttgctgcaaaagggaatcatcaccccgtttcaaaaacaccgacgggggggccggagccgccaccgccgccaaacggccctttcctaaatgcttgcgtaaagccgcaggcaaagcaacattcccctgcttgggacccttaaagtt

SEQ ID NO: 125070 - DNA, 602 bp, Glycine max
  unsure (1)..(602): unsure at all n locations
  Clone ID: PAT_MRT3847_83948C.1
gtagtcccataactaatgaaattgttcttgatagctcaaacaatggaacctctcgatgttgtccttgtcctcaaagcaatagcggcaacaaagcttcggaaggttctcatagaacacgaaggtcagctacatcttcaaagataacaatgacatatcatgttgattacaatgaagcaaatgtctcctccaatacaagtacgctggttcagatggattctgatggttgttcaacattgacatgccataaatgtggcaagaaattgaaaaatctcgatgctgtagaagcacatcatatttccgagcattcagtcactgaacttgaagaagattcatctagacagattatagaaacaatatgtggaagtggaacaagctctattaataattccgaaaacatggtggggcagattgattgcattttaaaggttctgaatgtaccaaaaaccttagcttgctntgaggaatacagagcaaaggtgaaggataacgctgagaagctacagaagaagcatccacgttgtgtggctgatggaaatgagcttttaaggttccatggcacaactatgtcatgttctcttggcacaaacagttctagccctgtg

SEQ ID NO: 125071 - DNA, 145 bp, Glycine max
  Clone ID: PAT_MRT3847_83949C.1
ctggctaggtacgcctatttcattcatgcgatccaacgagcatcggtcccatgaaacagaacggaaatgggacacttcaggtcttcaaggcctgcctctcaagttcgttcaagccgatcaaagcgcaaggaattggtggagaaag

SEQ ID NO: 125072 - DNA, 281 bp, Glycine max
  Clone ID: PAT_MRT3847_8394C.1
tactggctgtgagaagacgatcagaagggtgacggcttgcgaggaagactactttacggtgactgaaaatacaattaatgaagatgagtttgaagaacagcatggtggtgctaaaggtgtgtttgaagcttcttttgcttgagttggttacaggtgcacgcatggactgagctgtttcaaaagtgatcactcatcaaattatgatgatgatgactattcataaccctgccgtgatcgctccatgtgcacacgctccatgcctgctcaaatgcagctgtgaa

SEQ ID NO: 125073 - DNA, 322 bp, Glycine max
  Clone ID: PAT_MRT3847_83950C.1
cttcaatcaggaatatccaccttacattgatgtgtctaatcttccagagataaaattgatgcatagctcgaaatccataaaatatgtgatggacacatgatcttgtatgcactataactgtggctttaccagggactgaattaaattcctaatgacatacgttaacctttctatcgtaattgatcgtggcactctgaagcaatatgtcaaccctgtggtaataccatttcatgtcccacccagtgatcgctgcactgtcccacacttgctataatgagatagaatatcttgtggagaccgtaatggatgccatggaggtcca

SEQ ID NO: 125074 - DNA, 381 bp, Glycine max
  unsure (1)..(381): unsure at all n locations
  Clone ID: PAT_MRT3847_83951C.1
caagtccgccgctgatgttctagctccgacgccaaggagaacgcagatcctaaccccgagcccatggtgagcgaagttcatcgcccgcctggaagttaggcacgcacggcacgggccccaaaacctagggttctgaacgtgctggatttggattcgctgcangtggaggtggagatagagtatgtactggagaaggccgagctggacgaccctctcctcgatgacttcaagaccatcttcgaaaagttcacctttaaggacgctgccgcagcagcggccgaggtatttggattaacgaagcgtttcttcaacccgtctgtcgatgagcgagcctaaagccctgtttgtctacttcgaggattatataagtaagcttatgga

SEQ ID NO: 125075 - DNA, 327 bp, Glycine max
  Clone ID: PAT_MRT3847_83952C.1
aaaaaaaaaaactccccaaatttttgaaagaaatcatcccccaccccccatatttctcaacaaagaaacaaataaaaaagctttaaaaaccccccgaaaggacaccaacatttctaaactggctcccttggctggaattttttggaacgggcgtttccttaaacttaataaaaacaccccttgaaaaagggcccccaaataaatagaagccccctcatatgaatcatgaaaacccttgtttaaaggggacacacaaaaacttttatcccaaaaactggtataacaaataatgtgcttaactgtgccccaaatggaacggaattttat

SEQ ID NO: 125076 - DNA, 391 bp, Glycine max
  Clone ID: PAT_MRT3847_83953C.1
tttctcaaaatttccccaggatcatcaatggcacacggggaaccgcttcgactcctcatacagccgcccatactaccttatcttacaaatccatctctaccacgccaaaacatatcccacgccacccacgatctctacaaatcggggcaccctttcatagccctcacgctcaaaatcatcccccaaaccctacatgagcaatcccctaccgccaccgtcatacacaccctccgattcccgcttcaaaaaaaccggacagccctccctctatcacctccagaaacaccttaccccactccctctcacgccaacgagcctaccgctcctcaccaaccacatccaaaatacccaccaagcctccccacacagactctcaccgacaaccacttcc

SEQ ID NO: 125077 - DNA, 340 bp, Glycine max
  Clone ID: PAT_MRT3847_83954C.1
gagcctaagcattaataacaaaatttacttatggagggcaatttagttcattcttttaccttggccaaactattcttttgtttcccataacccgagatgtggtccaaaacctggtttagagtgaaaaaaaattgtaaaaaccattttaatttgtcacctagcttttgttcattacccctttccaatcccatttttccatctattttgcatatttcaaggtcatttgtacgccttttggaaaacttttcagagatatatgggtataaactactaaagttttggtgacaaattcatttcgttcaaaggagaacacaccatcatatgggtcaagggtcgtttt

SEQ ID NO: 125078 - DNA, 167 bp, Glycine max
  unsure (1)..(167): unsure at all n locations
  Clone ID: PAT_MRT3847_83955C.1
ccagcttcgacacaaaactggcttgtgaanagnnacaaganacatccgngggaagnnaagtaggattcaatctccattnnagacatcngtaggaatgncgacnngtcatcaagtcatngnnatcctcatggctaaacngtaaagnacggaacaatctcngcccagng

SEQ ID NO: 125079 - DNA, 291 bp, Glycine max
  Clone ID: PAT_MRT3847_83956C.1
gagagaaagttatagctatcagcattatagactgttcctctctcattgcataaacacatcaccagcgtagttggagagtatcaagagagagaccgagcgcattactgtacactgctgtctctcataatctcaatattgcctttgttgaatccaaaacaacgactcgtcactttactttcatgtatccgcctttactaagcctttctacttactgctgttgttggtgttgatgattatgctaattcactcactgactcactcactgactcagtcgcatccacaacctttgat

SEQ ID NO: 125080 - DNA, 1947 bp, Glycine max
  Clone ID: PAT_MRT3847_83957C.1
ccccaaactcactataaactccgctaaacgacccgactccccccacacgccgtctcgtcacaccgccgtatagttcagaccgaaccgcactctttatctctttctccgccgcaaactatccttctccggcggcgccaccgtacaaccctcgatttaagcaaaggagcaacagaaggaggtgcttggttgcaaatggcggccaccgcaagcaacaacgacgtcgccgccgccgccgacggccccgtgatgagcctaatcaacaagcgcctccgcgccctccgcaagaagctgaaccgcatcctcgccatggaagaggccgtcacccagggcaagcctctgaacaaggagcaggaagaggttctccgctccaaaccctccgtccttgctctcatcgacgagctcgagaagctccgccagcctctcgccaccgccctctccgaagagctccaaaacaacggcacctcctctcaaaactctcgcgagaccgagaccgagaccgaaaacgaaaccctagctgagagctccggttcggttgagccgaacacgaactcgaccacgaacgacgtcgttgtggaggacctgcttaatttgctctactttggttcgctctttgacgtgaagagtgactttgcgtccacgatgcttaccaggacgcacgaacgcggctgctgcttgacctacgactacgtcaccgacgacgccaccgatctgctcggcgagaaggacttggattcgatctccgccctgcgcgggctgctcgtttcgcggcccgcggattcaagcttctcccacaagaacgcgctacagcgctgcctggaacacgccaggctgtggcttaccaagtcggagcagcccattgaacctgatactgatgttacttatgctgcattgagggagaagttgaacaagattatgtcttcggagtactttactacgacacctgagatgaaggctccggttgaagttgctgcggcagctgctgggggaaattacgtttccttccatgtgccggtgcatgggtctgtggttccggttgaagtggagcaacccgtttttcagtctcaggagaaggatgaaggaactgcaaattcaaggacatggatctgaagaagatccctctgatcctgagggagagcttctgaaggatgaagtagaagcagaaaatgcaggtgaagtggtgtcagctcaacatgaacagacgaaccaacaagcagatgtagagtataatgagcgagatgtagaggcaaaggaccagcagtcataccccaggaggggttatcagaaccatagaggtggtcgtggtggaggtggtcgcaggggttactcaaatggtcgtggaggtcgaagtggtggcagaggaggctaccaaaacgggcgcaatcaatactacgatcagcctggaaattattatccaaggaacaactattataacaacagaggaaggggcggcagaggtggtggctattacaacaaccatggtgcaggcggtcaagttaatcatgtcgcaggtgatgtgggggtgcaatcatgataagttatgagttgtttatagtggttattactgtcactagttggtggtgaaccattttttatcctcctggcatgaaaacatgttttgaacaattttgtttgacacttgaatgttcaaacgtctagactcctccactattttgtagtccagtggctagtgtggacctttgtccgaaatctcacatgaagaaactaaactgtatgcgaatatctaatgttctggagactggaatgttgctcttgttttctctttctgcaatagccgccaaccagttggcgcttttgtcaccccttgtttaggaaggtagatactttcgtaaggcacaaattgcaaaagcagtgtctcgttggaaaaaatattacagttgcattctctgattggtttttatttctcctcgagccataacttttcactgc

SEQ ID NO: 125081 - DNA, 324 bp, Glycine max
  Clone ID: PAT_MRT3847_83958C.1
cgatcagattctcaagtcaatggtttttttgatttagggttgcttcaaagaacacaaagtgggcttctttggaaccctagtttttttggttctcccaggtattgctgcatcgatttcctcttttagaattatttccactgataattgatccctttttgcacacttttaaaattttattatatcagtgtcaattttttaattaatggttaatattttaaatccccatattctgatttcctttttcctttcattttatctttactttttacttacttccattcattcatggaacctaaacaaaaaccctaggatgtgttaattttc

SEQ ID NO: 125082 - DNA, 823 bp, Glycine max
  Clone ID: PAT_MRT3847_83959C.1
gcaattttgtagcgtgtgcagagaaatggccattcctcttgtaatcctacttatttgcaagctattatcactcttctctcaaatctgctacgcaacgacggacaccatcaccaagggtcagccactccctgatgatggcaacaccttgctttccaaggacggaacctttgagttgggtttcttcaaccccgggagttcaaataaccgctatgtcggaatttggtacaaaaacattgtggtcaaaacagtggtttggatcgccaaccgtgacaacccaatcagaaacaactcaagcaagttggtcataagccaagacggaaacctcgttcttcttagccagaacgagtctcttatttggacaacaaatgcatcatcatcagaagtttcgagttcgagtccaattgtgcagctcttggatactggaaacttggtaattaaagatggtaatgacaaagagagtgtttttctgtggcaaagctttgactatccttgtgacacactattgccaggaatgaagtttgggtgggacttgagaactgggcttaaccggcgtcttacttcttggaaaagctgggatgatccatcttcaggggactttacttggggggtggaaataggaagcaatcctgacattgtgatgtggaagggtaacgttgagtactttaggacggtgccttatactgggaacatgttcagtggagtatatgggcccaggaataacccactttatgattacaagttcgtcaataacaaagacgaagtgtattaccaatacaccctcaagaatagttcggtgattactatgattgttatgaaccaaaca

SEQ ID NO: 125083 - DNA, 2345 bp, Glycine max
  Clone ID: PAT_MRT3847_8395C.1
aacagcctaagatgtctcgagctttagtctcaaaaaagaggctctctcaactaagggaacgagaaacaagcaatagtgtggaactaaagtcagttactgttgatgttggccacacaccaagggaaaatcaaagcacagggaaaatggtcttgccctttgagccactgtcaatagcatttaaggatgttcagtattttgttgacattcctccggagatgaaaaaacatggttccgatgagaaaaggctacaattgctttgtgatatcacaggagcctttaggccaggaattctcactgcactgatgggggtcagtggagcaggaaagacaactctgatggatgttctttcaggaagaaaaactggaggtatcattgaaggagatataagaatcggaggctaccccaaagtgcaaaagacatttgaaagagtttcaggttactgtgagcagaatgacatacattctccatatataaccgttgaagaatctgtcacatactcagcttggttgcggttgccaacagaaattgattctgtcacgaaagggaaatttgttgaagaagtccttgaaacaattgaacttgatggtataaaggattgtttagttggcatccctcgccagagtggcttgtctaccgaacaacgtaaaagactaaccattgcagtggagctggtttccaatccatcaataatattcatggatgaacctacatctggtttggatgctcgagcagctgcagttgttatgcgtgcagtgaagaatgttgttgccactggcaggacgacggtttgcactatacaccaaccaagcatcgacatatttgagacttttgatgagttgattctaatgaaatctggaggacggattatttatagtggaatgctaggccatcattcaagtagactgattgaatattttcagaatatacctggggtgccaaagatcaaggacaattataatcctgcaacctggatgttggaagctacctctgcatctgtagaagcagaacttaaaatagattttgcacaaatatataaagagtcccacctttgccgggatacccttgaattggtgagagagttgagtgaaccactgccaggttcaaaagatttgcacttttcaactcgcttcccacaaaatagtttgggacagttcatggcatgcctttggaagcaacacttgtcttattggagaagtcctgagtacaacttaacacgtttcattttcatgattgtttgtgcaatcatatttggagcagtattctggtagaaagggaaaaaaataaacaatcagcaggatttgttcaacgtacttggatcaatgtatattgctgtaatattcttgggtctaaattactgttcaacaattctaccatatgtggctactgagcgtgctgtcttgtatcgagaaaaattcgctggaatgtactcttccacagcttattcatttgcacaggtggtcattgaaataccatatatcttggtgcaatcaattttatatgtggctatcacatatccaatgataggtttgccattggcagtttcagaagtggtttggtacttctacaccacattctgtacatttttatactttgtatatcttggaatgatggtaatgtcgatgagctcaaatctcgatatagcttctgtattgtcgactgcagtctacaccatattcaatctcttttctggatttctcatgccaggaccgaaaattcctaaatggtgggtttggtgctactggatttgtcctactgcttggtccttgaatggcctcctaacttcacaatatggagacatagagaaggaggtactcgtatttggggaacgaaaatcagttggttcctttttaagagattactatggcttccggcatgacagattaagccttgtggctgtggtgctcattgtgtacccaattgtctacgcttctctgtttgcctatttcataaagaaaatgaattaccaaaagagataagatagacacagacaaagacacagtttggttcttctgcagtatgctggcttcaatgttcatgtatagaaatatagaaatatgtggctacatagattagcaagatctctctctctctctctctacagaaaaataacagtggttctgtgaccagactcatttcataagaaaaaaaatatattttaaattttttaaaagaaacataagaagagccacaaaaaacaaatcaaacagaaaaggctcaaggtcgcagaagcagcatctacaggacaggggccagaagattcgtcacttcaatgaaggagacgtactcatgattcctcctggtgttccttactggacctattacactggcgatgaaccagtagttgc

SEQ ID NO: 125084 - DNA, 298 bp, Glycine max
  Clone ID: PAT_MRT3847_83960C.1
ttttgttcaaaacaaccctgccaggctgattcttctattaaacaaacattcattgaataaatttgatgcttagacctttagcgtgggctcatcgatgctcttctgcctatattatctatgaacccgattgtcctccgacagtataacaacagggtatcactttgatagttcgacttgggcagctgccattaaaaaagaccagatttaagcggatgccgatccttccagcggcgcaagaagaaaaacccctacgggaacgtaatgagagccccaaacaaaagggtgggagctcaacatc

SEQ ID NO: 125085 - DNA, 250 bp, Glycine max
  Clone ID: PAT_MRT3847_83961C.1
agtcatacctctcatgtctaccgagtacctgtatctgatcgaggagatactggccgtgctctacgatggcggacccggtccagtctccttcggggacgcggcggtggctgtttggcccaagaccttgccgaccgacggggactgcagaggctgtgttcacggcgaggaccatctgcacgtcaagctcccggccaggctcatctcggacatcataatggataggcacgacgtgaagtggatcgatacagga

SEQ ID NO: 125086 - DNA, 781 bp, Glycine max
  Clone ID: PAT_MRT3847_83962C.1
tgatttctccgctgacgactcttgcagcctctgggattcatcgccttcttcttgctgtgggaatgatgggtacggagacagtttggaattcccaaagcaactggaacactgtttggggttcaatccgcgactgcatcaccttccaatccgatgatgatgatgattctgaatccacccccactcctttccttcttcactccccttctccagattccccaccttgcgagatcaaaattacttttgcggagaaacacgagctcagacaaatctacgttcgaagcacggctcgcgtctacgagatttactatgcgcccaattcccgcaccaacaacgactatctctctacagtccgttgcggctttgctgttagagacgatcaggttcttcgtttcccttctattcaaaatctgagcgacgataacattaataagtctgaagatgattgggttgaagtcaaagttcctgattctccttcgcaaaccaagccctaccccaattccgccaaaacctctgtgtcccaggatctttatgaggctacagcagagattaatgatgcaaatccttgcatttctgttactcgtcgtctgctctcgcttcagagcaaaggccgtgtttatgttgatgagatttatgtgtttgctgatcctgttgagtcagctgattcagaaagccatattgaaaactcatccagcagttccctcatggctatgtttctaccttcatgcaattatctaagacacagagctcagcaatctaaatgctcttagaaaggaaaccaaca

SEQ ID NO: 125087 - DNA, 429 bp, Glycine max
  Clone ID: PAT_MRT3847_83963C.1
ggatattccattttcccctttctgcttacgcttcacttcccagatctcgtaagtcggatcggtgaatctaccacaccatgcaccgaaccactgcataaccgcaccagatccatcccaacctcgacatggtctttggcaagaacaacaaccaccaccttcgaatctcctcctccctccaagatctctcctactatcgccatgacctcgaacatggccatggccccactcccgacaacaacatcaacaacaccaacttcacctcctccagtttctccaaaaccaaaccggttcaactgcccaatccggttcgccgcaaacacctcttcctcttcctcttcctgatcctcatcctctaccttttcctgctacttctctgtttgctctacactctatactgctaaccactgcctcccccaaatcctacgtcgg

SEQ ID NO: 125088 - DNA, 381 bp, Glycine max
  Clone ID: PAT_MRT3847_83964C.1
accggactcggtggcatcaacagagaactgagtgagaatctcttctccatttctacgggaaaatagatctccccggaaaagatttgtaagtcaatcgcctttctttttattcaccaatcggaccaatcccctaacaggactctgtatatttagagggactagggtatttacttcaacgatactattgacccgtaccatgatggaagaagagtctggtaaaacatgcccttccatgggagtgaaaaaaaaccgttctactttaatatgacgttttgtcttaaaacctataactcctggatgctcaaaaaaggcctcttttgcaaaaaaggaatttatgcctacagccctatatttagtgattcccgagctttgcgaacggca

SEQ ID NO: 125089 - DNA, 141 bp, Glycine max
  Clone ID: PAT_MRT3847_83965C.1
gagtacagaataggcagttctcaccatttcccgctcgggaagttccaggtactacgaactttgccatggtttcgtcagcttactcttaatcctctttggtttactttaagtggtgtgtgtttgaacttacggtgcacattg

SEQ ID NO: 125090 - DNA, 264 bp, Glycine max
  Clone ID: PAT_MRT3847_83966C.1
gctgattgtggtcaagattgcgatgcctgtgaatgcaactgccaataagagtgatggtgcctcatagctacaagtgttcttaacatacagcagcattccagagcattgtgatgcatgtaagtggacaaaatcagaaccacattcctgggaattgatcttcacaatagagtttgttgatctaattatggctttgaaatgttgggttctgagtggtcaaaataaactttatggcatttgagatttcttattgacaattccaaacag

SEQ ID NO: 125091 - DNA, 2365 bp, Glycine max
  unsure (1)..(2365): unsure at all n locations
  Clone ID: PAT_MRT3847_83967C.1
gcgggaacatgagctcggagggctgctcgaggtttctctctcttagttcaaatttcgaattcggaagcagcaaaactaaagcccaaaaacccataccaagatgctcctccgaagccactgttgctacctcggcataatcgccgggctagcagtgttcctcgcaacgacgtcgttcgccgacgcgcaatcctgcaacggcatcctcgtctcatacgcctacaccggcggcctgcggttgccgcccaacgtctccgactcggctaagcagccgtaccggttcgagtcgacggtgacggttctcaacaacggcctcgacgagctcaagtcgtggaaggtcttcgttgggttcgaccacgacgagttgttggtctccgcctccaatgctgtgctcgccgacggcaccaccctccccgccgccgtcggaaacggcaccgtcttcgccggtttccccatgactgatctcaagaccgccgtcgaaaccgccggcgacttgacccagatgcaggctcagatcgaactcgtcggcaccgtgttcggggtggcgccgcccagtgttccgatgccgaaatccatcaacctcgccaatgatggtttcctctgtcgcaaatccaccgctcaagggaagaatgcgagtagtgtgtgttgcacgagagatcccaagttcaaaactaacattactacggatgaagagtttctgccacgtcagagtggtgatcttaccattatgtatgatgtgatcagaacttatgattcaaattactgggctgaggttaccgttgcaaaccataacccacttgggaggcttgataactggaggttgagctgggactggatgaatgatgagtttatatattcaatgaaaggggcttatccttcggttgtggatgcttctgattgtctctttggtaagcaaggaactttctatagggatcttgactttgcccttgtgttgaattgtgagagaaggccaaccataattgatctccctcccaccaagttcaatgattccgaccttgggaagattcccttttgttgccggaatggtactattttgcctccgtccatggatcctagcatgtctgcttcgagattccaaatgcaggtcttcaagatgccgccggcgcttaaccgatcccagctttcgccaccgcagaactggaagataagtggcacactcaaccctgactatgaatgtggccctccagtaagagtgagtcctaccgaaaatcctgacccgtccggcttaccttcaaacaaaactgtgatggccagttggcaggttgtgtgcaacataacaacagccaagagaacatcaagtaaatgctgtgtctcgttttcatcttattacaatgattcagttattccatgcaaaacatgtgcttgtggatgccccaagaacacagagagaacatgtagtactagtgctccagctatgtggcttccaccagaggcacttcttgttccctttgtgaaccgaactgccaaggctgttgcttgggcaagtctgaaacatctccgggtgccaaacccattgccgtgtagcgataactgtggtgtgagcatcaattggcatttgtacacagactacactaaaggatggagtgcaagggtgacactttttaactggggtgacactaattttgcagactggtttgccgcagtacaaatggacaaagcagcttcgggttttgagaaaatgtattcattcaatgcaactcttctagatggtgtaaacaatacaataatcatgcaaggtttgccaggattgaactacctatcaacgtagctcgtggagatgggtttcccactaaggtatttttcaatggcgaagaatgctctcttccttcagtgtatccaagcagtagtggtttcaggaatggtttttcattggctacttccttgcttctaacactgttgatgatcctcttgatgcggtaatagtggctactgagtcccgagacacgatttgattcatatattgacctcaccacagaaactcagtggacttaatcgtgctgttgtaacattcatgcgtgtgtctgtctggtttggatgctgtggcattcattgttcaatttatacgtgattcttttgagcttgttatagtacagaagattgtagatttatgttagatgatagaaatatattcctttttatgttaaaagtttatttttttttttctttgttagtattatgttagaatatataaagatagatcggctcgagttactatgctggaattcaattgtttgtgttttatctgaattcttcccttggcggtggttatcacttaccataggaagtcaaatcattatctgaccatttgcaagtgccactcagctgntaaattaattttagccagccc

SEQ ID NO: 125092 - DNA, 768 bp, Glycine max
  Clone ID: PAT_MRT3847_83968C.1
cttttgagcttgttatagtacagaagaatcacgtataattgaacaatgaatgccacagcatccaaaccagacagactacactaaaggatggagtgcaagggtgacactttttaactggggtgacactaattttgcagactggtttgccgcagtacaaatggacaaagcagcttcgggttttgagaaaatgtattcattcaatgcaactcttctagatggtgtaaacaatacaataatcatgcaaggtttgccaggattgaactaccttgtagcagaagcagatggagctgaccctttgagagatcctagggtgcctggtaaacaacaatcagttatctcatttacaaagaaaactactcctggaatcaacgtagctcgtggagatgggtttcccactaaggtatttttcaatggcgaagaatgttctcttccttcagtgtatccaagcagtagtggtttcaggaatggtttttcattggctacttccttgcttctaacactgttgatgatcctcttgatgcggtaatagtggctactgagtcccgagacacgatttgattcatatattgacctcaccacagaaactcagtggacttaatcgtgctgttgtaacattcatgcgtgtgtctgtctggtttggatgctgtggcattcattgttcaattatacgtgattcttttgagcttgttatagtacagaagattgtagatttatgttagatgatagaaatatattcctttttatgttaaaagtttatttttttttttc

SEQ ID NO: 125093 - DNA, 496 bp, Glycine max
  Clone ID: PAT_MRT3847_83969C.1
tcagtgatctcgttcacaaagaaaactactcctggaatcaatgtagctcatggagatgggtttcccactaaggtatttttcaatggggaagaatgctctcttccttcagtgtatccaagcagtagtggtttcagggatggtttttcattggctactcccttgcttctaacactgttgatgatcctcttgtagcggtaatagtggctatgtttgatttttggctctggcctgctgtgtcccgagacaccatttgattcatatattgacctcaccacagaaactcagtggacttagtcgtgctgttgtaacattcttgcctgtgtctgggttggatgttgtggcagtcattgttcaatttatatgtgattctttcgagcgtgttatagtacagaagattgtagttttgtgttagatgatagaaatatattcctttttctgttaaaagtttatgttttttctttttttaaagtaatcgggcctcgtagataaggaagat

SEQ ID NO: 125094 - DNA, 1235 bp, Glycine max
  Clone ID: PAT_MRT3847_8396C.1
ctctgactctacgcgcatcttcttcgtagcatttccccacactttttcctcgccggagaggctcgccggacggcgctcggcgctcgtcgccgccgatcgattcggcaacgtagcattttcatggtaacgtcggaaactgaaaacagcgcgttttgagatttggctttttgcgtgcgtcgaagaaagagagagagagaaacaaaaatgaataggattgggaacggaggaggaggaggaggaggattgagcaacgtggagatggagtacataagaagacaccacaggcacgagcctggtgagaatcagtgtggctctgcgctcgttaagcatataagagcaccggttcctcaggtatggtccttggtgaggaggtttgatcagccacagaagtacaagccatttataagtagatgtgttgtaaggggaaaccttgagattgggagtctgagagaagttgatgttaaatcagggcttcctgccactacaagtacagaaagattggagctccttgatgacaatgagcatattctcagcatcaggattattggtggtgaccatagacttaggaactactcctctatcatgtccctccacccagaaattattgatggaaggccaggtacactggtaattgaatcttttgtggtggatgtacctgagggcaacaccaaagatgaaacctgctatttcgttgaagccttaattaagtgcaatctcaaatcacttgccgatgtctcagaagggcttgctgtgcaggattgcactgaaccaattgatcggatctaggaggttatattcagaagttgctgagaacttggctgccatggatgaagcttcaggggctttcctatcttggaggcttaggagacggactggcaattatgctgcttccattattagtatagagttgcagcgtttttcattccacttgctctattgattatccttgtgatatatatgctgtttactctctttagcagttaaagaacaatatttgagtcaggtgactgaatccaatgctgtaactacaggtgaaggaccaggtgcctcttggagatgttcatggtttttgttttgtggtatgttcttttttgtatataggtggtggtggtgaaacttggtctgtaaaattattttgattggtcagctgtagtttctaattgcagtaaaaatttaatcttctagcggggatcacttaattcttatcacggagttctagttgctttgggtctttc

SEQ ID NO: 125095 - DNA, 421 bp, Glycine max
  unsure (1)..(421): unsure at all n locations
  Clone ID: PAT_MRT3847_83970C.1
cgaaggccgtaaagctgagtattnnnattttgcgggcttaaataagtagtcggaacatactagcctgatcaacaaacataattttgatatctggcattcttgaaaagagattatacaataaaaagacaatcaaaatcaataggtttttccaaacacttattttgcattgcatagcaaacatcgatcaatactacatagtacatatcgtaaaccttcagctattcatgaagctttcaccccggattgaaattttgaagctaatacgccataaactactagcctttgaaccacatatggcacttggccatgttcacttccaccattagaagtatatagtctgtgagtctgatcaagaatctttggtaagcaattctccatggtttccaaagtagtattggccctaataagccccaaaagcctg

SEQ ID NO: 125096 - DNA, 313 bp, Glycine max
  Clone ID: PAT_MRT3847_83971C.1
ttaggttcttgcatgatcgtgctggtgaaggtgatggtgaactgcagagcattctgtcacgttctgttcaagatttgttggctgtcactgaacagatttatgccatcactgaccgcacaaaactcgtggatgccattaagtgcttaaaggctgctatgttaaatgctgttcctattgttagagcctctgatgttgatcaagatgatcacaagcagcacataaatgcaagtctagctcattaattctcgatcccttaattgttattccttcctaattttggtgtcacataccttacgtacggttttgcagggca

SEQ ID NO: 125097 - DNA, 160 bp, Glycine max
  unsure (1)..(160): unsure at all n locations
  Clone ID: PAT_MRT3847_83972C.1
agaggccnagccagaaagggcagagcngaggggaaggganaacgaccacangggaggaggcgacccngngccgcggcggagaagggcggncnggcagacaagaagagccacancnccacgggcgggggngccagcnnagagcnncnggaggggaagcaac

SEQ ID NO: 125098 - DNA, 315 bp, Glycine max
  Clone ID: PAT_MRT3847_83973C.1
acccacaaaacaagggggaatttttaaccttatgccctacatcgggttgatatagaaaaagaaagcgccaaagggcttgatccttacaactgcaaggaaatattctcacattgcataacaggaagcttgagacttccacacaaacaaaaaccaattttgcacatggactcaatcgatgtcgactcaatgtgcatcaggtaactttttcaccctattctccactttagtttaacacccacaacaccaagttttatgcacataaaaccacaacaatcatgccagcaggctttcaaccacatggtgtgtattcatttg

SEQ ID NO: 125099 - DNA, 728 bp, Glycine max
  Clone ID: PAT_MRT3847_83974C.1
gaaaaaacatgctgttctcaaaccatggctgcttacaacattttagccaccataaatatatggatttttttattatgttcaagtttcaattccaaccatgatagtaatattagtacctctgttttgcagaggatgagatggttcgctcaacaaggtgaggtgattgatactataagggcaaaacgcaatgactgttgaaaagagaattgttttggttgggattagaattgatggctatagcagacagctcctcaactgggcacttgccaaagttgctgagcctggggattgtgttatagcagttcatgttgttaaaagttcggattatgtttccaaaaacaagactctgatagatggctatttagaagtttatgaaggcctatgtggtgtgaagaaggtaggtctcaccggtcaaatcttcacaggaagctccattaaaaacattcttgttagagaagctaaaaagcatgctgccctggctctagtggtagggggtcgagctgccacagctaaatattgtgctaaacgtctacaacccaccaccaatgttctagccattcaagactcaagaattgtcttcagaagttgcaccaataaacaactaccaggtggtcttatactggatccaagaccaagtttaacaatcataaaagaaaacttgcgtgacagagcaatccactctttaatttgtgacttcatcgtggagattgaggaattaacgcgcaaaa

SEQ ID NO: 125100 - DNA, 398 bp, Glycine max
  Clone ID: PAT_MRT3847_83975C.1
gctagataatttttgggggactaaaaagaaaacatttattgacagaaaaaataaacatgtgtataaacaatgaaatacaaattgcccaaaggaataatcctggttactttacataggtaaaggggatggcccctctaaaaaaaaactgttgggaaggggtacaaaaccaactttattgtctttagacatactaaacctaagataaacccatatttgcacaaaaaataccttgaaaaaaatgtggctccaaattgtgtgagaatatatgtacacatgtgcacctacatcaatgaaaggcatctagcaaaacaaagtttgaagaatttttaataaaaaaaaaatttgatcatacgttaccagtaggtcagatggttaaacagaaccctactttaaaatta

SEQ ID NO: 125101 - DNA, 532 bp, Glycine max
  unsure (1)..(532): unsure at all n locations
  Clone ID: PAT_MRT3847_83976C.1
ggcacgaggttgaggccaggcaagccccactcaaccaccacacctctcctcgttcacgctacccctttctgntcttcttctacctttcaagntttaaaagtatnaaganggnaganacnttcctanttaccnnaaantccgggaaccanggacaccctgacaagntttgngaccaaaantncgatgctgcctngacgcttgnctnnagcaggacccagacagnaaagttgcctgcgaaacatgcaccaaaacccacttggncatgggcttttgagaaaacacgaccaagggcaacgttgactaccagaagaaagtgcgtggcaacctgcnggaacatcggcttcntttnaaangaatgtggactggatgcccgccaaatggcaagggcctnnttnaanattgnncnncnaaanccctganntttgntcangggggncnncggggcncctntctaaaaaaacctgcnnaaaanagnggntgggngaccagnggacnatttttggtttnccccnccnggaaaancncccctttt

SEQ ID NO: 125102 - DNA, 319 bp, Glycine max
  unsure (1)..(319): unsure at all n locations
  Clone ID: PAT_MRT3847_83977C.1
gtcgcangcacgcgtacgtaagctcgggaattcggctcgagntcgaaccgatgtnncaancanantcnctcananggacctttgctttnctcctgccntntgccnctccngtatcnttncccttggnncatggnccatgggatgttnncngaaatatgngagtctcttcaantgantnanagcaagngcntcccatcntggnagacctttncngtcancagganacngnantngnttcngngcatggaatggttatcagtgtttncnggagactgtntctcnagtaggccaagtngccnnttgncancctnngggngtn

SEQ ID NO: 125103 - DNA, 246 bp, Glycine max
  unsure (1)..(246): unsure at all n locations
  Clone ID: PAT_MRT3847_83978C.1
accggaccggaacccccgggacgacccacgcgaccggccttcccgtcccaggcaacgacggaaacagganggggcaaacttaaacgacaaccaccggagcaccccaacaaacgngnncccgcnccaaaggaccgcgccggcacccacccaanaagaaaaccagcngcccaanacggcgcagacaccaccaacagcgaggaaaccaccgaccacaagaagccaaagggcgagcgccgaacaaacgaa

SEQ ID NO: 125104 - DNA, 325 bp, Glycine max
  Clone ID: PAT_MRT3847_83979C.1
tgttcgacctttcgttcgcccacgcgtccgcccacgcgtgcgggttgccggaccttaaaaccggaaacaaaagcgatcgtgacttgagtgcaggagtcggccagtcacttcctactacttggagtacaatttcttaagggaaagagaatcactctctgtgctggccacagactttttgagtaaggttgttttccactgttagattatttgctgaacactctagtataggatataggactggaaagttataccttagactttaactgttgctttctcagtggaaaaggttaacttcacgaacacgctggtggaatgtgggaaaact

SEQ ID NO: 125105 - DNA, 614 bp, Glycine max
  Clone ID: PAT_MRT3847_8397C.1
ctggtttggttgggtttttttttttttttttttttttttttttttttttttttttttttttttttctatttccattcgaatccattttttttattttttaatattatttccaaaggaaataaaaagattttaaaagatcctaattttaaaaatttgaaagggaaattataaagtttttaaaggataaaataatttttttctacctgtccctggggtaaaaagagttccatctgttcttgaaaagcttccttcaaaaggacttctgcttccccagggaatgtcttggtgaaaaatatgatttctttgaattgaggtttattcgggtttaagtaagcccgtaactcaacaagaaatttccttacctgcccaatttctaatgaatcaaaataaccattcgtccccgtttaaatgggttttatctgttcttccacggtaagaggagctgattgggattgtttaagcaactcgcgcaatcggggacctcttgctaattgattttgaggagctttatcggggtccgaagcgaattgggcaaaagcttctaattctgcgaattgggctaatccccattttaatttacccgctacttggttcagggctttaatttgggcccc

SEQ ID NO: 125106 - DNA, 273 bp, Glycine max
  Clone ID: PAT_MRT3847_83980C.1
acaaatttttaaggttgaaattttttatttcccatatttgcctccgcaacggccaagccctaattcttgctgggcttaacaaaaatgttaacagggggtctaacatacacaactcatttaaacactaatgatttattggagtctttgccaccccctaacaataaccttattctgggaacaaaaatttgcagatgatggtggaaacttcaacccctctccaaaaaacaagtttcctttaaactaatacacaagggcttgttaccttcttttatt

SEQ ID NO: 125107 - DNA, 373 bp, Glycine max
  Clone ID: PAT_MRT3847_83981C.1
gcctaacattaaactaagcaacgctcggttctattttctctttcaccatatccattgtcccttaagtctagggcagagtttctacaatgccttagacacacaatttcgccaaaaaaaaaaaaaaccaaacccaaacgaaccgtgcgataatggcgttccaggatttcgacatgatcaccgaacggcggaggaacgaggagaggctttaagatgaagaagaagatcctcatcggtctcatctccgccgtcctcctcgcgtgcgtcataagcgccgcgacattcgtggttgtccaaagaacaggccctaataataatccaaagcacgccacgccattgccacagaactccgccgccacgtcacacgtggaccaaa

SEQ ID NO: 125108 - DNA, 213 bp, Glycine max
  Clone ID: PAT_MRT3847_83982C.1
aaaaaaaaagaaggctgacaatggaaatattttatctcctttgctctatcgtctccacttccctcacctctcttcttctctcccttgtccttccctttcacacgctactgcagcggtggaattcctcacgcgccgcttcttccttctccgatgacgaagctgaacccatatctctctacgaaggcacagtttggcaccaacgtcgcaacccag

SEQ ID NO: 125109 - DNA, 134 bp, Glycine max
  Clone ID: PAT_MRT3847_83983C.1
ccccaaaccctaatatcactctccttctatactccattttactaaatcatactaccttcaactcaaattccatttatacaccaccatctccgactactaccacctatacaaccacctaaaatcccttcatctcc

SEQ ID NO: 125110 - DNA, 163 bp, Glycine max
  Clone ID: PAT_MRT3847_83984C.1
aaatgcacaaaaacaacactttttaaaataaatagcagaggaagtcacctcaatcttggggtcaaattttttacatctgaaccacgatacaacccaaaagacttaaacagtaaaaagtctatttacaggccactcaaatccctcactggagagacttggcctt

SEQ ID NO: 125111 - DNA, 122 bp, Glycine max
  Clone ID: PAT_MRT3847_83985C.1
gtcaaagctgctttatctatagaagaggctccactggctgtgctcctaattatagtgggttgaaccccccagacatggagtgagggttagactggcagcgattgccgcagaagccagggagg

SEQ ID NO: 125112 - DNA, 340 bp, Glycine max
  Clone ID: PAT_MRT3847_83986C.1
aagggccaaggaggaacatgtttatgaacttgattctggaacatgcggggaccggccccacctaagaactcgaatccacgtcgggaacattatgtttttgggggtttttctaaacctgcttagaaaattttccacccaaagggaaccctttttaaaaaaaatggtaatgacccttattccctgggggtggttcccatgcctgcaaaaaaaaaatcccaattttttttactccaaatttatgcttcacctgggcaaaaacaaatgggccttcattttttattcccaaaggatccccctggatgactgccaaaacagccccaattgcaggagcaagggcagt

SEQ ID NO: 125113 - DNA, 250 bp, Glycine max
  Clone ID: PAT_MRT3847_83987C.1
agtacaaacactcaaaaatcaaaatcttcattgaacgaaaaactgaatataaactagtgtcaggccgataaaacaatctatatgagatggaaaattatcattgattccaactacaaacaagtcttcctagaaaactaaacaaaaaatatagcagatagcattatacttaaggaaaatttgagctggttggcgctccaaaaccaccagattcacgagcaaagccagaccttctatcagcacccccaaaaga

SEQ ID NO: 125114 - DNA, 670 bp, Glycine max
  Clone ID: PAT_MRT3847_83988C.1
tacggctgcgagaagacgacagaaaggggaggagaggcggagacgaagaagtgaagagaagagaagagaagggatttggatctgaaaagagaagatggggggaggaatggaagcaaacaagaacaagttcatagaggattggggcactgccagagagaatctggagttcaatttccgttggactcgccgcaaccttgctcttgttggcatcttcggcatcgctattcccgtcctcgtctacaagggcatcgtccgtgaattccatatgcaagatgaagataatggtcggccgtacaggaagttcatgtgagagagtatggagagtcttttgtaataattcgtcaagttagaccttgatattatgaggctacaaaccatgttttttttttttccttaattcgcaaaggcttgcttgcttttaagtactctagacctatcaaacctctccatgtttgcctgtcttcattcaaatttctgttatgctgtcaacttgttaccaccgtggttcaattaataatatttgtgcaaaaacatgttagtattatgtaaaattctgaacataacaatacctgatatgagcggtgcatcaaatactttgtgtaaaagtatatggttgattttgtgaaataaattgactggaatgtgctaaaaaaaaaaaaaaaaaaaaaaa

SEQ ID NO: 125115 - DNA, 137 bp, Glycine max
  unsure (1)..(137): unsure at all n locations
  Clone ID: PAT_MRT3847_83989C.1
gcnagcaacatnannagctgaagcaaaaggtcaatcccntgacgttantggtggantgtcagatttnattacgantttggaancaacttatcgntcccccaatccgcngtgcgncagatcgagggcgtggcctgtnt

SEQ ID NO: 125116 - DNA, 253 bp, Glycine max
  Clone ID: PAT_MRT3847_8398C.1
gacaaggaaaatacattgttcatttctcaaacttggagaagtattttcaacctatcttctgacacataaacttacctaattttttcgatcaattacacttccttacaaacttcggaaacatatattcacttttattttattaaaacatgaacatcctattcatgatataaaatcattataccgacacttatatctttcaaaaaaataaactattactcatctatttagagactcaccctcacattttttcttt

SEQ ID NO: 125117 - DNA, 804 bp, Glycine max
  Clone ID: PAT_MRT3847_83990C.1
tcagtgatcagcttgcaaaacattgtttcaagggaggctgatcctttagattctcaggtgctttctgtggccatgatcaatgcagggtctgctcatgacataatccctgattcagctacatttggaggtacctatagagcattcagtaaaaagagcttctatggactgaggaaaaggatagaagaggttattaaagggcaggcagaagtacataggtgctctggagaggttgagttctgtggcaatgaacatcccacaatccctccaaccacaaatgatgtgagaatataccaactagcacggcaagtgtctagcaagattgttggagaagataacatagaattagcacccctcttcacagggagtgaagattttgcattttacttggaaaaggtacccgggtcatttgttcttgtgggcacacgaaacgagaagagtggatccatacatcctgctcatagtccttactttttcattgacgaagatgtgcttcccattggggctgcattgcatgcagcatttgctctttcataccattcatattcaacaaattcataccctttgtaatacacatccaccacttgtaattcaacaaattctttggcctaagaagctgtcagggaagatatttttttagatgcatattgaatttgcttgaccaaggtgctatcacaaatactctccccctcgtgcacccccccatagtattgttggtttcattggatcattcgatatcaaatctttattggggaccatctgtagatgttgaatcttgtactgtcatatagtgcagagtttaattgc

SEQ ID NO: 125118 - DNA, 704 bp, Glycine max
  Clone ID: PAT_MRT3847_83991C.1
gtgaggtcggaattcggcggctccctctttgctagttttgattagatctacaacaagaaattaaagaaatggctttcagggcagcgagaaatgtaggattgaggttgggaggaggaaggcgatcaattgctactgccagcgctaaaaagcatgatgattgggcgactctgaaggcagagttagcaccggtgtacatggtgtgcggaatggtggcaatggctgtggcaattggatcacacactgcgtttcaacaactggcgcgttctccaactgttcatataaacaagaagagaagagagagcatgccagaggtctctgatcctgatcgcaccttcaactccgccaccaaattcatcgatggttccttcttaaggaaactctctcacattcaagacaacaaccccacactccacgacccttcccaccctaatcctttcaccactcctcgaaccgctcacaccttgaagactgtgggcgttcacccctccagccgttgatccttctttcattttcactatttctaaatatgacaactttctccacctatatattttttctaattttccatttctatgctaagaaatattgtaaataagccaattaatgttttatatttatttatttattggcccattagtcttaggatagctgagactcacgcggcgccacttcaataattagatctctgcatgatcttctactca

SEQ ID NO: 125119 - DNA, 2883 bp, Glycine max
  Clone ID: PAT_MRT3847_83992C.1
ttttttttttttttttttaacactaagcagctaattccttattattatactattattgtatatatggcagcacatgacatgataatcaaaaagcaaattttctaaataaaatatgccctctaacccgcatggttttcaacaaaaacaacagaaccatgtggggatgtatctcgtttacaaggtcaaaagaatagcccaaaaaagtccaagctttatattcatcattccttcaccacctcaagtctcccaaccttctatgatatgatttacaattttacaaatcaatacctgatcccattcaaagttcacatacattgggatcagtgagtgcacaataagatttgactcgatatgggcaataagaaacattctagctaccctgggctcttttagatgatcttgatggaataacattaacctcactcgactgagggcgctttggttcttcctgtctctgtgcctcctttgataatggggaggaatttttgcgtgactgtgcctgggttttcaaatgcacacgatgctggtgctgcatttgctgaaattgttgtagccttgcagcaaaatttatcccattgtgtgagttcccaccatccatagctatgtcaccgtcctcactgatttgagatccaccagacatgtgatggagaaattgatagggatttcctgaggatgtcttcttcaattgctcaccattgaaggaatacgatggcacagccttcaaacgagttttgagaatcttgaaggcagcactttgctgaggaagcaacatcagaagaccatataatgctttgaataaccatgtatatcttccaggttcaagaagctgcaatcttagataagcaaagatcggagtttccagcaagcgaatcaatttatccagctggattaagaatttgacattaatatcctcctcaaccagagattgaatcacagcactcgcatgtcggtaagtctgagctaataagcacagacttataattgccattggagaatggcaccacgaggcatacaaagaaacatataaatccttcccggcaggatttaccagtgattgcttcaaaagatctcgaatctcagatagttccaacgatgtaagtaagatcaaattcaaagcctgaaccattattgatgcaaaatccaagtccgattccccttccagtattgtagaaagttcacggtagactctctcagcattcaaaagcacacaaagtcgacgaattatcaaaggaccacgcttctccaaaagggaattgtctacccggaaattgtgcaccaggaagacaacaagttgccgaaagtgctgagagtcttttgcaatgcatgcatgaacatcaagaactacaagaacaacctcatcagatggatctgaaagtgccttgagcagagtgtcaaatatgtcattcagaaattgcaaaacctcagtacgataattgtttaaaagggtggatatccagtgcaaagcttcgattcgagtagcctccagttcactagataattgcctcctggcaatggagaggattgctcctacatcaaacgcttcagctggatctgctttgagggcacgtagctcttcattggtttcacgagcaacaactctaattttctcttctttatctgctatacaaggcaaaatggctccaagaatgtcagcataatatggaacaagctggtctccaccaagcttgacaaactcatttatccatgtgatagctgttagcctagtaaattcatccggagaacctgccctctgtaccaggatttgagtcatgcgaccataatctacagacttcaagagtaccatggggagtttttaatctctttaagaaactctgaaagagctgtatcagcttgttgacgtatctcatgactcgaatcactcaacatattaaacaagccatcaagaaaatcaggaagaaagccaagcatgtcaatatccgggacactgtccaatacagtaatccatcctaccagaaactgatggacatatggattcaatacattcatgcggtccctcaacaatggtataaattcttcaatcctgaactgatcactttcagtcacaatattcttaacaagttgatctaagagatgagcagcactttgtacattggcatctgagtctgcagaaagcttgcataaggcatcaaagatctggttgaagaatataataaaatctcctctcacaacctttgctatgttgtataatgcttcacaagcataataacgaactctgctatcttgatcggcaaaagaatttaatacaggtggtacaatttgctcaagatgctgagcagcttcagtagtcaacccaacagtagcagcagctaagcttatcaaccctcccttgcgatgatttgcttgtggcgaataagtaaattccgtagtcaacaaagtgatcacagcagttatcctatcatgatccccagcaccagcaagctgcttcactatcccctcaacctcaagtgcagcattcttgcgcttctcgtagagcttgtcggcaaggttgcgaagcacggcggccggaatcaccgagagagcgtcggccatggcaatcaaaaattcgaagaacgaattgggaatcaaattcgtttgcggatcttttcctgctccaaacgcaacattgtcgtttctttcattcacttaggaaacggaaatcacgaagtgaaaattggaaaattggaaatggcgaggttttctttgagtttcattcgcgtggaaaatgagattgagtgggaaaaattggaaatcggatctgagaaaaacgaaaattgaaattggaactgaaatttctgaaacctagaatttcacttttcctttcttgaagagtttggtaatattttcttgaagagtttcggacgcgtgggcggacgcgtgggtcga

SEQ ID NO: 125120 - DNA, 277 bp, Glycine max
  unsure (1)..(277): unsure at all n locations
  Clone ID: PAT_MRT3847_83993C.1
tggtgggcttcaaagatgtagaaagagttgcagactcaggtcaattaaccaacctcaaatgagagataaaacgaggaaacttgaggttgtcactcagaagatcccaccattattcaactcgatccatgctctccttggaaacaagtgagattttttttggctttgagatttttcttttgttagaatggttaataatacgaaactaggtttacttatccattcgtgaattatttgagatgaacttctaattaaatgctcaatatttatttgtgtcngt

SEQ ID NO: 125121 - DNA, 746 bp, Glycine max
  Clone ID: PAT_MRT3847_83994C.1
caaacactaagcagctaattccttattattatattattatatatatggcagcacatgacatgataaacaaaaagcaaattttctaaataaaatatgccctctaacccacatggtttacaacaaaaacaacagaaccacgtgggcatgtatctcgtttacaagctcaaaagaatagcccagcaacgcccaagctttatgcatattcatgattccttcaccaccccaaccttctatgatatgatttacaattttacaaatcaatatcccatcccataaattgggttcagtaataagatttgactcaatatgggcaataaacaacattctagctacccagcgctcttttagatgatcttgatgtagcaacaacattaacctcactcaactgaggtcgctttagtacttcctgtctctgtgcctcctgggttttcaaatgcacacgatgctggtgctgcatttgctgaaattgttgtagccttgcagcaaaatttatcccattgtgtgagttcccaccatccatagctatgtcaccgtcctcactgatttgagatccaccagacatgtgatggagaaattgatagggatttcctgaggatgtcttcttcaattgctcaccattgaaggaatacgatggcacagccttctagcgagttttgagtatcttgaaggcagcgctttgctgaggaagcaacatcagtagaccatataatggtttgaatagccatgtatattttccaggttcaaga

SEQ ID NO: 125122 - DNA, 3059 bp, Glycine max
  Clone ID: PAT_MRT3847_83995C.1
aaaaaaaaaaaaaataacatacccccgggggaatcacgttgtacaaagtcaaaagaatagcctaggaaaagcccaaacttattttgattcaaaaacccaatttttgccatcccaacttttataacagggggaataaaacgagctactatgatttacaattttacaaatcataccgaccctttcaaagttgacatactttaacttaaaccccatgggcagaagcaatattaaaattataattgtagctgccctggacctctctttgatgatgatcttgaaggaggaacattaacttcaatagactgaggttttcttggttcttcctctctttggggctcctgcatgtaatgctgtaataacatcataaaactgaacaaagcagaatagctcaaatgatgacaaaaataatacataaaagaaaatatactatgttgagcgattaaaaatcaggcaccatctccctcttcctctccatttccaatattctttatattctatggatttttacacaacaatttatgtgaaacataaaaacaaaaaatacaaaatcaacatgcagaatgaagaggtcagcaacctttgacaatgaagtggacatattgcgcaactttgcctgtgttttggtaagcacccgatgctgatgctgcatttgctgaaactgttgtagcctagcagcaaaatttattccattgcgtgagctaccaccatctttggctacgtcaccatcctcaatggttcgaaatccatccggcacgttacgaaattggtatgaatcccctgaaggcattcttttcaactgctctccattgaatgaatacaatggcacagcttttaaacgagtttttagtatcttaaaggcggcactttgctgaggaagcaacatcagaagaccatacaatgccttgaatagccaaatatatcttccaggttcaagaagctgcaatcgaagataagcaaagattggagtttccatcaagcgaatcaatttatccagttggaccaaaaatttgacattaatatcctcctcctccagtgattgaatcacagcactggcatgttggtaagtctgagctaaaaagcaaagacttataattgccataggagaatgacaccaagaggcatacagagaaacatataaatccttcccagcaggatttaccagtgattgcttcaaaagatctcgaatctcagatagttctgatgatgtaagtaagatcaaattcagagcctgaaccataattgatgcaaaatccaagtcagattccgcttctagtattgtagaaagttcacggtagactctctcagcattcaaaagcacacaaagtcgacgaattatcaaagcaccacgcttctccaaaagggaattgtctacccggaaattgtgcactaggaagacaacaagttgccgaaagtgctgaggatcttttgcaatgcatgcatgaacatcaagaactagaagcacaacctcatcagatggatctgaaagtgccttgagcagagtgtcaaatatgtcattcagaaattccaaaacctcactacgataattgtttaaaagggtggatatccagtgcaaagcttcaattcgagtagcctccaattcactagataattgcctcctggcaatggagaggattgctcctacatcaaatgcttcagctggatcggccttgattgcacgtaactcttcattggtttcacgagcaaccactctaattttctcttctttatcagatatgcaaggcaaaacagctccaagaatgtcagcataatatggaacaagcagatctccaccaagtttgacaaactcatttatccatgtgatagctgttaacctagtaaattcatctggagaacctgccctttgtaccagtatttcagccattcgaccataatctacagatggtgaattcttaatctcttgaagaaactcagaaagagctgaatcagcttgttgacgtatttcatgacttgaatcgctcaacatattaaacaaaccatcaagaaaatcaggaagaaaaccaagcatgtcaatatccgggacactgtccaatacagtaatccatcctaccaaaaactgatggacatatggattcaatacattcatgcgctccctcaacaatggtataaattcttcaatacttgtggtgtttacacctcttgcctatcgaagctctgttcaaaaattacattcagagatctctttacctagtacctgaactgatcactttcagtcacaatatccttcacaagcctatctaagaggtgagcagcactttgtacattggcatctgagtcagcagaaagcttgcataaggcatcaaagatctggttgaagaaaataataaaatcccctctcacaacctttgctatgttataaagtgcttcgcaagcataataacgaactttgctatcttggtcagagaacgaatttaacacagggggcacaatttgctcaagatgctgagctgcttcagaagtcaacccaacagttgcagctgctaatcctatcaatcctcccttccgatgattggcctgtggtgaataagtaaattccgtagtcaacaaattgatcacagccgttattttatcatgatccccagcagcagctagctgcttcactatcccctcaatatcaagagcagcatttttgcgcttctcgtagagcttgtcagcaaggttgcgaagcacggctgccggaatcaaagagagagcgtcggccatggcaacacccaacaagctgggaactatttgattgtcgaaaagaaattaactttacgaatcaaattcgttttcggatcttttcctgctcgaaacgaaacattttggtgttttcttcttccaggttttccccccactctcatattttctttttggggatctcaaacaaaatccgaaattcaattttcttttttcgggataacgagtgacgtggaaagcgacttcgattggaaaatttggaattcggatcgatcagatccgaataaaattcgcggattgaaaccagcaagcgaagttgaaattcaacccgaattgaagcctgattttatcggaaacgaaag

SEQ ID NO: 125123 - DNA, 363 bp, Glycine max
  Clone ID: PAT_MRT3847_83996C.1
ccaacttgaatgaaccacggcaagggctatactctatagatttccgcgtggagaaaacacacttgagagctgttccttcttctgctgatatagtacatatagcatagcacgcacataatagatcgtgttcagtgaccactttcacactgacttatcttataggagagtccactcaaaactctctactgtgccacagatgagtgaccccatcatgcttatacctaccctgctaatggccacgcgctttagctaggtcctcctgtgatggcaccaccctaatattatactgatcgcccatcacgcacaagacagactggatttcttgagggatgacttgcagctctgtgttgttgctgcctcata

SEQ ID NO: 125124 - DNA, 471 bp, Glycine max
  Clone ID: PAT_MRT3847_83997C.1
cttggtcgtccttcttttttttccttatgatacctacatctaatcaattgcttatcttgggactaggaaagatggcgttcattacgatcaacgtgataatagtgcatgggataacttacataagctttatcctaatctcattgcttgcaattcctaccgatggtacaaataccaggcgaagattaaccacgattctggtgaccacatttcgcgatctagcaccctagtaggaaatcgaccccacctatgatccttattataggcccatgtctacgaatttatgagtaatggagccgcaatataggcccccttttgggtaatgcatgtataatggacggtcaatgcttttggctatatcgtgataactaaccttaccccttggactagaaatacttaaggaactgcatctaaattcattgtaacataaagtaccaacttgggatctaatgaatccggtccgattcaactatc

SEQ ID NO: 125125 - DNA, 544 bp, Glycine max
  Clone ID: PAT_MRT3847_83998C.1
ccaaattgtgcgagcagggtcgcctttactcaaactcatgtgactatgccattatctaatgggcctcacttaatcatcctaatgcgccgaagctgcgtcaagtgttagccccctttgagctaattgttgaactccccggtcacatacacttatatcagaactacctgtgcatattgggatcgctgaacccaatcagtggatccttcacaagttgaagattctaactctggcacattattatatgtttcctgcgacagtgactctttttatgcgtgtatttttatgggaggatgctctatcaaaaataatgtatcctatgtcctctctgcacacaaaacctaatcggcacatccatttacttcttacgaagaaccatatacccacatttttttcacctcatatgaccctatggacatgaacacctgatacttcattgtactctacatgttagggaatggttactgactttatttagggagcatctatgtttaaacttggatgaagatataatgcatgattaatcttgacctttatataatccact

SEQ ID NO: 125126 - DNA, 1717 bp, Glycine max
  Clone ID: PAT_MRT3847_83999C.1
ggctcgagatcgataaaagcaaagggcatctgtccatagaatagaattgcaagtattctaccaagaagtaagaagcacacccatccaccgttcaacgccttctactaatacttctcctttctctttcccaaacacaaatcactcttctcttctaattcttatcacaccactcccctctttataatcatgcaacgctctcactctttccctctctagagacctcgccctgccatgtcatcacaaaccgcgcccacggaggcgccggagccttatacgccgcttctccgctcccgcaccgatgccggccgaggtcccgcccccacgctggcgctccttctcggccgcgccggccgccgtggcccatccatgctggtacgtgagacggcagcgcgtgagctcgaggagcgccgcgctgactggggctactccaagccggtggtggcgctcgacatgtcgtggaacatggccttcgtggtcgtctcggcggctatgctcgcatgcaccacctccgagcacccgaccacgccgatccgcgtgtggatcgttgggtacgcgctgcagtgcctcgtgcacgtgttgctcgtgtggctcgagtaccggcgccggagccggagggactctcgcagcggcagccagagggcgcgggacgtggagagcgacgccggcagcggcgacgatgacgactacagtgacgacggagatgggagctctggcaacacgtctcgctccagattcgcaaaacgatgtgagtcgttaaataccggggtttcattcctttggtggatagtgggcttttattgggttgtctctggtggcgatatacttctgcaagatgccccacgattgtactggttggctgttgtctttctggcatttgatgtcttttttgccatcttttgtgttgtcttggcatgcttgattggcattgctctctgttgttgtttgccctgcatcattgctattctctatgctgttgcaggacaggaaggtgcgtcagaagcagatcttagcatgcttccgaaatacaaatttcgaatattaagtgatgtggataaacctagtggtggagctggatcaatggttcccatagaaaccagcagtgcttacttggaaaatgaacgaacacttctactcgaggatgcggaatgttgtatatgcctctgttcatacgaggatggagcagagctgcatgctcttccctgcaaccatcatttccattcgtcgtgcattgtgaaatggctgaagatgaatgcaacttgtcctctctgcaagtacaatattctcaagggaaacgaacaagtgtgacagaaaacgaagaacctaccaagtcccaactgggtgtttcaacaactgttgtgtaatatgtatatataatttcaagacaagaaagagtttacttccctactcgctgggttttgatggttgtttcgtttagctgtttctgtagagaaaagatatatagagcatttattgacgaataagttagcaactgtagtctacttagaattatttcgtcctttgttagattcagagatgtccaatttgtaggttgttcatttcttttctgacggaaactggattgtttcatttgctactggttgagtaatcgtaggctttattaagttgattgtgttacattaatccatctatgtatcttgtttatttatggactatggtatgaactttcttattttaagatgtgagttttttgattacg

SEQ ID NO: 125127 - DNA, 265 bp, Glycine max
  unsure (1)..(265): unsure at all n locations
  Clone ID: PAT_MRT3847_8399C.1
gttncagctnngccgctagntagctagcaagcacncagagagatgnaggcnaagngaggcgatgccctcatgtgcttgggnacgngttttcactncnnggtctgcgcnctaacccnatcngctgctcanggaagcaccnngtccccaccntcncgagaacnttgcnactcgnggacaacgancttctngcgcacggagaagactttcaaggttttcatggagaatacgggaggagctatccacagaggangagtntatncgccgt

SEQ ID NO: 125128 - DNA, 419 bp, Glycine max
  Clone ID: PAT_MRT3847_839C.1
gtcttgattttccttcttttttttttttttttacaattcttctattcagtttgtaaaaaacaaaaagaagcacgacaaattgttggtatttccttgtcaagattatcagagaggagacaaatggatgggactgatcctccatatagaagattggaaaaaaaaaaacgaagttgttttactagtatttgttacctgtcgggttcttgttaaagatcctgtgtattttcttaaaaatgtttcacatcaaagttctctttagacttaaatgtacgttgccagtcccgcccaccaaattacacaattattctatacttttaattactattcaacctttcttataggggtattagtgtaatatatacagattattgtaatatttttaaacattcatgattgttagtgtgacaaacataagagac

SEQ ID NO: 125129 - DNA, 451 bp, Glycine max
  Clone ID: PAT_MRT3847_83C.1
cttgggggggggcggggggggggggggggggggggggggggggggcggggggcggggggggggaagcggaataagcgagtgtggccattatgagcccgaccatcacttgaaggaattaagccccacagtgagcaggtcctttaccacacttaataggatgggcataaaggtaccttgactagcaactttggaaactagtgcaaaaataggggcccaaaaataagcaccccccgcgtggtgtcctcaaaaagcccccagaaagcaagcgaaactccattagggattgtacccaaaaataaagggagtttccaaaaatggaacctaacacaggccccaaaaaaccccctcctaaaggtttaggggtttaaaaaaagggaccccgaaaaaggatagaggaattgggctgcagggcccaggtaaccccaacaaatttaggggtttaattaaccca

SEQ ID NO: 125130 - DNA, 406 bp, Glycine max
  Clone ID: PAT_MRT3847_84000C.1
aggagcacacctagggacttattcattatcttttatgggataaagggatatatatatacatgtaaaggtccaaacggcccagcattggtaacccataaaggggcaaacactcctaataaaaagcagcatggctggaaaaactcaggttatttgattatggccataatgcatgcactgaaggaaacgcctattcagtacttatctttgggagctcttgatgcatagtactatgggaaccagaatggcaacaccttggcacatttttgttagtcagaaggaccatggattccaaaaagtacacgaacggggtaactgtggcccaatccttaatcatacaactagcacctgtgaacaaacaagttgcgggaacaacccacgtgaactgattcggacaactcaccaagga

SEQ ID NO: 125131 - DNA, 484 bp, Glycine max
  Clone ID: PAT_MRT3847_84001C.1
aattcggctcgagttaatactaattttaaggagtaattcagtgtattacttagttggttgtcattaatacttttttttcttcaggtgctttacgatggagacatgtccatgtttatatcaagaaatgtcaggtgccatattaaaacctgacctacaatacaaactagtagactggcagtagtattttttcatggggtcgcgagttctttcttttagataacaatctcatttattttatttttcaggttaaagttaagatcaaaagcaagcacgttggaggagccttctccaaaaagaacaaatgtaggcgttttaaacgttaaaaactcttagcaacccatgcacctatccttttgcagttatctatttcaattataagaacaatgtgatggaatatcatctaattatttggtcaattatgaaaaattattgattattttgataattacctctaaagtgctagttgagatgttatttaatttcc

SEQ ID NO: 125132 - DNA, 1104 bp, Glycine max
  unsure (1)..(1104): unsure at all n locations
  Clone ID: PAT_MRT3847_84002C.1
ctcgacccagcgtccggaaatgtaacgaggtttcctaaaaatgtcttcgtaagatgtcaccaacccaacaaaggtgaatataggtcatgctctattgctataaagtgtaattataaatactaagctaatctaagtagatataagatactcattattctcaggcaccctccaatcaagatacacttgtgaaacaatttgcctatattcttgtgccatcccatcttccatttaatcaaaaaaaccatgtcaaatagcactacacttatatctgcagtggcatctcttgcagcctcagctatgctaatccgaagcattaccaacgatttcattcctcttgaaatcctagacttcttttactccaaaatttattatctttctcgtcaattttcctcccaacttaccattatcattgaagaatttcaaggggtgtctagaaatcaagtgtatgaggctgcagaagtctatctaggcactaaagccactctctcagctctaagagttaaagcaagcaaatccgaggatgacaaaaagcttgcattcagtgtagatagagatgaagacattagtgatgattatgaaggagttcaggtgaagtggaaacttagctgtgagattcttgagccttatggcagtagacattctaatgataggaatgccaattttaagtcagaagtgagatcctatgagctaagctttcacaagaaacacaaggagaagatattcaattcatatttgccatatgtgttggagagagccaaggatatcaagcaggagaacatggaagtgaagctccacacaattgaatatgattgctattggaatggaaatagtgtcaaatttagccaccccatgactttcaaaactctggcaattgatgcagagctcaagagggaagtggtgagtgatttggacaagtttgtgaaagggaaagagttctataaaagaactgggaaagcttggaaacgtggttacctcttgtatggccctccangcactggcaagtctagtcttattgcagccatggccaattatctcaactatgatatctatgatttggatctcaccattgtcactaataacaatgacttaaagaatttgctccta

SEQ ID NO: 125133 - DNA, 148 bp, Glycine max
  unsure (1)..(148): unsure at all n locations
  Clone ID: PAT_MRT3847_84003C.1
cccacgcgttcggtggaaactttggacagtgtactnattaacactatgaaatactaccagagtggaatgacacatgaagctccatgcagagaatcacagcttaaacggctgcacaatcttctagtggtaaaagatgaacaaattatta

SEQ ID NO: 125134 - DNA, 447 bp, Glycine max
  Clone ID: PAT_MRT3847_84004C.1
attgaaaggtgtgaagtaagggcgatgcgttcattgcggcacaatggtcaaagcataaaggggactatggaggctctgcagaagaatgtgatggatatgaccacgcatacctgagttcacggtatcgtacgatccagcttaaactgctcacgctgtgcactatattcagcatgtagctgagcatagaccatattgattcaactgatcaatgctaccaaggttattggtgggaatgcaaaagtattaaaggatacacaccaataggaaagataacattacgcaaccatatgagctaatgaagaatcatactatagctaatactatagcagacagaaaactgccaatgacgcgtacatgttatattaagatctggacgcttgacgtactgtacataaagtctgtaatgctcgacgacattctaaaccatgtaaccattcacttcatatg

SEQ ID NO: 125135 - DNA, 356 bp, Glycine max
  Clone ID: PAT_MRT3847_84005C.1
cacgcgtccgattttttgcaagatttgctacgcaggtacctgcattatgagcgactttcttctccgttggtgaggtacatatcggggtattcacttagacccttatgcgaaagaaccctggggacagttgcatgtacgtgcagcgggtttattgtactcagtatgaatagatccaatgttatgagtactcttcagatgacatctcgagcaccactactggaaggccgactgaggaagggcataggtcattacggatcgacctgtagcacagcgctccttatacctgcaaagagtagttgctgcctttgctagtgactaacgtctccatcataaggacactacctggtacctaagct

SEQ ID NO: 125136 - DNA, 283 bp, Glycine max
  Clone ID: PAT_MRT3847_84006C.1
cccacgcgtccgcgggaagggttatacttataagaaagacatggtgtgtgtgcgtggttggcgtttgctttgttttgaaacagaagaagagtagcttctactttaatcttgggagatcagggaggtcatcgccgacatttctgcgctcaagattaacataactacctggcgcacccaggaacagggcattgtggtgtgtaccgaacggacatggacagaatcgattccgtgaggtagccacacactgcaactgcacatctgcgtacttggcctgaaactccca

SEQ ID NO: 125137 - DNA, 276 bp, Glycine max
  Clone ID: PAT_MRT3847_84007C.1
tgcgatttcaagcttgtttgttttttttgtatgtggtgaatatagaaaaatatattcccctgttcgcggggtctctgcttttatatccaggggtgtttgtaaagaaagaggtagttgataatgagaggtgctaatggatgcgatgccagagctgcaaacaacactttgaagactatcaacgctgctacaactgccatcgctttcatcgagaatctacttaatcaacctcattctcacttccagaacaaaagctagagaagtctcttgaacatgtat

SEQ ID NO: 125138 - DNA, 193 bp, Glycine max
  unsure (1)..(193): unsure at all n locations
  Clone ID: PAT_MRT3847_84008C.1
tttcgcangcacgcgnacggaagcacggaaggngccgccgacnagggagcacgncgacccggnaaggaaggcctgaccgggaccagcangcgtaccagcagtcccgagngngaggcgnaggngagcnngncggaagcaggggcagagcngnnnccngngggaaagggggagccgcgcacaaggccacacaaca

SEQ ID NO: 125139 - DNA, 1103 bp, Glycine max
  Clone ID: PAT_MRT3847_84009C.1
gcctcctggaatttatcaacaaatggaagtatctcgaaatgcaatctccttcctgaatccacctagatcttgccttctgttgtaacaacgactcatgagtttggactgcctccctggccccctgctgcggctgctcccggtgtatccgctcgtgatcgtcccaccgcctatccgcgggttcccctcctagtctgtctagttcttcctctttcttctcgttctagagttactccctggcccgcttgtccggctgttccacgttcttctcttctgggttggcgcttctcgaaatcagcagcaagttcagaactttggacatccttttttattggttatccatgagggtgagacattaactgaagtcaaatccacgatacagaaaaagttgcaagttccaaatgaggagttttcaaagtggaagtttgcatttttgtcatttggtcgtcctgagtaccttcaagattcagatattgtttcagctcggtttcagaggagggatatctacggtgcatgggagcaatatctcggactggaacacactgacaatgcttcaaaaaggtcgaatgctgccaatcagaatcgtcacgagaaggcagtaaaaatctatgattagagaaacgtttcatcttgaccagtcattttaatggcaccatatgccagctgcacttgaagcgttctgaaggagagaatggagaagctaccaatcttctaaagggtagtctgttgaaaaccataattttcttagctgagatggtggggggtggtgtatagccttcaatagtgattaaaactcgtcttttgagcaaacaaatctttggttgttaggaggttgaatttgaaattcccttgtcatttggtacataacattttggggttgggttttgtatagaaggtataggaatgtaggtatagttaaactcttttctatggcccatttcaccatagtgggatctttatttgcttcagttggtgaagctccgcgaggatggggaaatgtgtaatgtttctacaggagctaacatgtaaatttcccttgtgcctttcttaaccttggttttgtttaccgtacttattggtgttaaaggaaaacattattttttcct

SEQ ID NO: 125140 - DNA, 266 bp, Glycine max
  Clone ID: PAT_MRT3847_8400C.1
atctacaacccggccaaaatccctgtcttttcaagagagagcctcaagcagaatgctgatgttgacacagaggaattacctgcaaccccactgttactggctagagcactcatatacatatctgtatttcattcaagggaagaccttatcaaagccttgctcgttattagcaaagtgggagatcttgctggcataaaatatttccctgctgaaccaacaaaccagcaacaagggggtaaatctgcgaagtttgattgagtgagaac

SEQ ID NO: 125141 - DNA, 378 bp, Glycine max
  Clone ID: PAT_MRT3847_84010C.1
cggacgcgtgggcgcccccgccgccatgcttcggcgtctcgccggcgtcgcccagcggaccttgtcgtgctcctcttccccgcacgccccgccgctggctgcgtcgggctacaccccgcgccgcgagtacggcctggtgcccatggtgatcgagcatacctcccgcggggagcgcgcctacgacatcttctcgcgcttgctcaaggagcgcatcgtatgcatccatggccccatcactgacgatacggcgtccctcgtcgtcgcccagctgctcttcctcgaatccgagaaccccgccaagcccgtccacctctacatcaactccccggggggcgtcgtcactgcgggcctcgccatctacgataccatgcagtacat

SEQ ID NO: 125142 - DNA, 550 bp, Glycine max
  Clone ID: PAT_MRT3847_84012C.1
ggcgaaaacgacctctttgctgctctttacactgctcctcttcagaacccgagttctcatcccggtgaagaaatcgaacgaggatttgaaggacgtgacccacaagggtaactttgatggtgagattagtggaaaaaaagaaggtcgtattgaaatgggactctatgggaaggctgttccaaaaactgcaaaaaacttccgatgactttgcacagggaaaaagggaactgatacaagcgtaaagactctccattacgaatgtagatccttccatagaattattcctagctttatgcttcagggacgtgatcctccacaaggacatggaatgcgtggagaatctatttacggagacaaacttgctgatgataacttcaagttaaaacatactggaccacgacttctatgactggcaaatgctagccctagtaccaatgggtcacgatgtttcattacaactgtgacaactaactgcgtggacggaaggcgatgcgatgttggtaaaagtctctctggaatgcatggtggttacgagattgaagctgaagga

SEQ ID NO: 125143 - DNA, 345 bp, Glycine max
  Clone ID: PAT_MRT3847_84013C.1
ctagggggaacaattggaacaaactctacattaatgggggacatttactaaaaaggggagcccctgctttgttaaaggggaggggggtacatgaaactagggggctaaattgaaaataagccatgctttgcgtaccccgaattacatcacacagggccaaagttacaacgtctttcactcattcaagggttaattctccacgggggggggggcttatatggggggaggggggttaagggtctccacttggccacaaaaccctaaaatttcctcgcttccgccccaatggcatcagggccccaaggggaaagggaacaaggtataaaagggccggggggccatgcc

SEQ ID NO: 125144 - DNA, 787 bp, Glycine max
  Clone ID: PAT_MRT3847_84014C.1
cccacgcgtccgctcatcaactcatgattacatggtggtagcgatagtaaaatcgagactacccacgcgagtccattggttttctcttagaaccaattcctggagcttgtattgatcagtatccttttaaatccggtcgcagcttgctcttgaatggagctattcattggttggttcaaccctatgatagactctgtgttataattgcatttgatgtgatggaaaaagtgtttttttaaaggcactattctcttccactgcaacacgcacaatcatgttcttcttcttgtgaatatttaaccaaaaagggtgttctgttctgtgcttcaacagttttactgttttgaacatgtgattgtttctggagagacttctagattgttctgtatatatagcaaggaaggtttttgtgttttttggtttttgtgccattttggatatggctatagttgaatccgtggggaagattcctttgcaagacccacctgaggaggagttttgtgctgctgacctgacttggaccaagtttggtaatgctgagcaccatgatgaggttgccctcattccctatgacagagttgatgcttttataattggtgaatgtactaatgtggagtgcccgactcggtttcatatcgagagaagaaggaaacggactattggaagcttgaaggagtacaaggacgatgagtatctgggagtacaggctgtactggtggctcgtttggccctgaaaattatggggagggagagagagtatattaacctagtcgaaagtatcgacttt

SEQ ID NO: 125145 - DNA, 563 bp, Glycine max
  Clone ID: PAT_MRT3847_84015C.1
cgttgagaaatgttgtggagaagaccattacaatggggaagctggaatactcagttaatgctgttcgaacagctttaaggaaattagagagtggatgcagcattcaggatgtaaaagctttttgtgaccctgatgatctgaagcagttatttaagtggaagattgttgataaacttcattggtatgtccagaacagtgatacgattgtggacttctgctgtggtgctaatgattttagcatccttatgaagaaaaagcttgaggagaatgggaagaaatgctcatacagaaactatgatttacttccaacaaagaatgattttagttttgaaaggagggattggatgactgtccaaccaaccgagttgccaacagggtcacagttgatcatggggctcaatccgccctttgggcataaagcagcattggctaacaagtttgtagataaggctcttgagtttaaaccaaagctcgtaattcttatagtaccaccggagacagagaggcttgataaaaaacaatcaccatatgatcttatatgggaggacgagaattttctatca

SEQ ID NO: 125146 - DNA, 307 bp, Glycine max
  Clone ID: PAT_MRT3847_84016C.1
gagggaccaaactcagaacatgccacatgacacagagaagataggtcacagacactgtcagggatcactcacacgattgaggagacacttcatgtgggatgccataagacagaggaggattacaacggtgagcagcaccatggtggcgaatacaaaggggagcatcatggtgaacacactactgtatacacatgtgagcatcatgttggtgagcacaagccggatcaccattgacgacaaaatcacatacaggggttcctatacactatcaagggcattatccacagtcatcgacggtggcaccacc

SEQ ID NO: 125147 - DNA, 579 bp, Glycine max
  Clone ID: PAT_MRT3847_84017C.1
ccgactgcctctcaaacctgctaactgtatagagtcggaaggtgggttctttgagcttctgaacctctacatcatgccattcccgtgtgcccgtgttgcctttttttgcttcacctttaaccgcaatgcctttcgtagactttcctacaccaacggtcccccggaattctacttacctccaggtaatggtatttttggcatgatattcccgggttggtccctacaccttttcaagagccccaagaatctcagcaaccaggaccaagccctgaggccccaagacccgtccccaaaaggtaccttcgcttcaaaagggtgatttgatcgcaatgccttcttggtgttgcattggtggaatgtacaacaatgaagacccctccttgttgttgcccgtttcttattttgacaccaacgcttggagaacacgcttcacccgatgccttagaaattctttcttgctgggaaccaaaacaagaatttctaaaatatcagcagcagcagcaaggaaggttcccaaaagccagaaaaggaaagcaacaagaaaaaaaaaaacgaaagaaagcaacattatttgagtgg

SEQ ID NO: 125148 - DNA, 295 bp, Glycine max
  Clone ID: PAT_MRT3847_84018C.1
gggagaggtttccaccaaacaacgtgctacttatgcttgctggagctgagttgttgtggatggggtgagaaacataaactgcactctgacaaaataacataaacctaatatgatacagacaataaaaacctatcaacaaggcaataatcacccatatcatcacctgcgctgcacctttatgaactcacatcacccaacacatgcaccaccacaagttggaaaaccacataaaaaaactaccacaacctcaacaatactaaaaaaacctccaatattttaatttcacacaataaac

SEQ ID NO: 125149 - DNA, 151 bp, Glycine max
  Clone ID: PAT_MRT3847_84019C.1
tctgatcatcaaaagcagtttgaattgttttaatgcagaacaaccagctgcactgcgctcaagcccaagcgcgactcgacccagatggtgtcgatagatgagctggtgcagtttcaggtatatgcgctgtccctgtccaacacctgctgca

SEQ ID NO: 125150 - DNA, 167 bp, Glycine max
  Clone ID: PAT_MRT3847_8401C.1
aatccaaatatattggggggttttaaatgcaccagtggacataataataattttcttaaaactctgaaccttccttacacactaaagcttagctgccatacccacctttcccaaattaacctgtttacctaacacctcacaattgattcccccaaatcatctaacac

SEQ ID NO: 125151 - DNA, 237 bp, Glycine max
  Clone ID: PAT_MRT3847_84020C.1
acgacagaacgggaacacatacgactcatatattgcatctgctaactctctctctctgcgctctccactgaatcgagtctgaaataggagaagaggtaggaactccaatcgctgcacgtgtggctgcaacgtaccgatccagaaggctatttagcagtggttcttggataatacttatccaggaggacttagctgcatagaatgctttatttattaatgctgagcattataatttgg

SEQ ID NO: 125152 - DNA, 156 bp, Glycine max
  Clone ID: PAT_MRT3847_84021C.1
ataaattcgaacacggggggtgaccctggaatttacgaccggaaactttaggagaacaaaattttattatatggggatatcaaacagcactgcataatgaagggcatagctgatttccgtaggaaatggaaatccaataaaaattccacacaaaat

SEQ ID NO: 125153 - DNA, 448 bp, Glycine max
  Clone ID: PAT_MRT3847_84022C.1
ggctcgaggatgatgcatacgagtcaccattgattgtcatcaatcttgatgacattgaaagattatagaagtatgtgcgcattggtcatcaagtttcaaacgtgatttctcaaactctgctggtgctgctcaaacggcttggtacaaaggggaagtttactcgtggatcatgtcacagcacgtgaactaaattgctcgaaatcaatagtatggtgcgataccttgtctgatacttaccatagtcctaccttgatcacaacggttgcatataccgaactagaacaggcgattgtgaatactgatgaagatctcgaatctgcttcacatgcgtagcatgatgtgcctatcacgaaactatccatgttgaccgagacggcatctcatggcgagcatagtatatctgcagactccatctaccatggcctatagaacattagtatagttcact

SEQ ID NO: 125154 - DNA, 502 bp, Glycine max
  Clone ID: PAT_MRT3847_84023C.1
cgaagatcgaatgtcacctactttacataaagacttattagatagacatgtgaactatatagcatgtggggaagactactcttctgccatatgcctacatatgtggctatctcctgcttgagcatgatcagaagctatgctggcagactggcatttcgcggttcactagaaggaggcacaactgtacataatccgaggtctagtgcactgtcatccacgcaaccctaggaaagcaggaacagatgccccgacgcctaatccaggcctgccatatgcggtatcgagatgacatgtatggcaaagtgagcagagttgcagatgcgggcatcagaaggcgtaagaatactatgcctcgcatgtcagctgaaaacaacgacacagtacagaaacctgatcataagattgaccagaacaggaactccggatagtatgaattaattaagcaacttgatagcatagcacatgcacacgggaagaaagctgctacatccgatgaagtccg

SEQ ID NO: 125155 - DNA, 1351 bp, Glycine max
  Clone ID: PAT_MRT3847_84024C.1
ccacgcgtccgaatgcatctctacaatgcatggcttccgccgccggtggcgtctcagacctccggcgagcgcgactccttcgcccgcctcatcgccgccgtcaactcctccttccgctccgacgatcccgattccgtctactctactctcaaattcatctccgtcctcgaccttttcataaaggcaaaaagtgatttagctttggaggatgttcgcaaccttatccataagggccttgagatatttcatgtgtcccgtaataagctttatgctcaggttagatggggaaatttcttagtcagactactcaacaaatataggaaaaagatttcactgactactgaatggaggccactgtatgatacactggttagcacacattttactagaagtacaggaccagaaggttggagaataagacagcgacattttgaaactataacttcccttgttcagtcctgccggagattcttcccatcaggttctgcctttgagatatggtctgagtttaaatttttattgcaaaacccatggcataattcatcctttgaaggttctggctttgcaagactgtttctccccacaaatctggataatcaggccttttttacacaggattggataacagagtgtatagagttgtgggaatctataccaaattgccaattctggaacaatcaatgggcagatgttattgctcgtgttgtaaaaaattaccacaatgttgactgggagtgcttcttgcctttgctttttgctagatacttgaatatgtttgaggtacctgttgcaaatggaagtggatcatatcccttttcgctggatgtcccaagaaacactaggtttttgttctccaataaaacttccactcctgcaaaggctattgccaaatcaatagtatatttactaaaacgtggtagttcatcacaaaagcactttgagaaattgatcaacattttggaacaatattatcatccctcaaatgggggtcggtggacctatgcattggagcggtttttgtttcatttggtgtttcaatttcaaaagcgtctacagaatgaacagttgggcataaataatagcagacccaccgaacagcatcttggggaattagagagggttttctttgttaactcagtgctaaagttaattgaccgtggtcaatacagcaagaatgaacatctctctgagacagttgctgcagcaacttctatactgtcctatgtagaaccctcattggttctgccatttgtggcatctcggtttcgaatggcccttgagacgatgactgccactcaccagttgaaaattgccgttatgtcagtggcatttgtcgggcgttcactatgtt

SEQ ID NO: 125156 - DNA, 312 bp, Glycine max
  unsure (1)..(312): unsure at all n locations
  Clone ID: PAT_MRT3847_84025C.1
cttacaaggttttactttactgcttcaccttctgtttctagaaattcattgcgagagacatggacttttgttactctatgtgaagccaaacaaacccttggggcctgtgggaaaggcttatctgaatactcaaacctccgcagctcatcatgcttgcttcccttttctagaaaggaancaaaggatttccattgggccgttgccttccatacctatgcagatgaaaccattggaagatacaggattgttgttacaaatgctagactgaaggttgccataaacggatatggattgggtggaaggaactttttg

SEQ ID NO: 125157 - DNA, 1007 bp, Glycine max
  Clone ID: PAT_MRT3847_84026C.1
actggttgcaccgtaggtaggttctgttctgacgtttaactcacttcttcttcttcttcttttgatctcttcgttcgcatcttgcggatgaaacgtagataacgtcgcgtttggttgttaagttgttccgtttcagccatggctgaaggaaaatcagttgttccgtttcagccatggtggagaacaatctcttcgaggatatctttagggtcgaaaaattaaaccccgatgacaaaaaattattcgataaagtcactcgcattgaagcaagaagtgaaaagtttgacatgtttatgcacctggacattaattctgaggtatatccattaaaggtgggtcagaagtttgctcttgtgcttgtttcatcgcttaatcctgatggaacaccagacactggctattatacccagatcagtcgacaatcactggccaacaattttgaatatgtcatgtatgggaagctctacaggataacagagggttcggggcgtgaaaaagcggagatgaatatttcatttggtgggcttctgatgatgctgaagggagatacctctcattgcaacaagtttgagcttgatcagaggttgtatcttctgataaggaaagtctgaaaattgtatgtaaaaaataaatatgaagatgtgaagccttgttgcagcaaaaagacagcagctatttctatcttcatgtttgagtacttaagctgtcgattttcttactaatgcgggtcttcagtaggacctgaagtttcaaaaccaaatatttggtgatttgatcaaagactctggttttctcaaaaaattttctttaccctcccttatatttattttccactccctctctatttactcatctctctctctctctcctacacctatttcgcatccctccatggggtgtgaaattattattgcttgattatactcattcccctggtgtgtatctttactattgtttggataatgtattctttacattacttataagaaaagctcatatatcaaaaa

SEQ ID NO: 125158 - DNA, 298 bp, Glycine max
  Clone ID: PAT_MRT3847_84027C.1
aattcggctcgagctcgagccgattagagataccgcttttgttttatcggtttgcggcaaaatttttacgaataaccgatacacggggagatgtctttgcagagatgttaccaatagcagctgcagggggctatgccatcgtaggaatgtagctattggcgacacatgggtggtatgacagcactggatttgaagtattggagcaggatgggtggaaacctggggctgctcatggaatgaatgatcaacgagggttgggacctgatgagactaatataaaggatgtcaaaccaggttc

SEQ ID NO: 125159 - DNA, 2738 bp, Glycine max
  Clone ID: PAT_MRT3847_84028C.1
gttatgaaacacgacaagagaaaagtgagaacactaacaacaactgctaacagtttgtttgtatgacttaaactttcaaatgcttgggcacccagctcatttaaggtgcttcaacagcatcatctgcatcaatatcatcgtccttaattgtggagacacaacatcatggattctcctttgttgtcacaagaccatgttttgcccaacaaacacacatggaagatgagcctttgtgctatcgtggctatcacaattgttggactagtagtcagaggcaacactagctatggaatactgtccggagcagaaaaatataatgatggaatcgcaactaatcagggagataatctataacaagctaagggagaatgtagttcgttagaagatcttgactgctcattatggcgatcacattgagctttcaaaagaaagtaggcttttcctagaagagagaggtcatcaactgagaggttctgaagcactagctgtgactcagcttattgtgcaacctctaaaaacgcctattaactttcatacgaaagttcgtgaaattttgaaatgagagaaactgctcctttagctgcttcacagaatatgtatcataacaatcccaaaggtaagaccttagttccattgtcaatgggagtgcctggtgaattagctggccttcatgcagcctggttgaagcatggacgattgccatggaaaaccttattccaaccagctatagaacttgctggaaagggttttgttgttactcctactcttggagagtacatggctgctgatgcaaataagatattggatgatcctgggttaagaaaactatatgcacccaatggaactttgttgaaagctggggatgtgtgtagaaatgttgaacttggtagcaccttggaggtagtggctgagcaagggccacaagctttctacaatggaaccattggtgaaaatttagtcaaggatgtcagagatgctggtgggattttaacaatggaggatttacacaattacaagttggaagtaacagatgcaacgactgtgaatgtgatgggatacaccatatatggaatgccacctccttcatctggaacacttgctctttctctggttctgaacatcttgggcagttatggaggttctaatgctgcaaggggaaatcttggtctacatcgactaatagaagctctgaaacacatgtgggctgttcgaatgaacttgggtgaccccaactttgtaaacattgatgatactatatccaaaatgctttccccatcttttgcaaaagatattcagcacatgatacttgataacactactttccctccagagtactatatgaacaggtggagtcaacttagcgatcacgggacaagccatatgtgcattgtcgatgctgatagaaatgctgtatcactaacaacaactgttaactatcattttggagccgggtttcgttctacttctactggtatcttggtcaacaatgagatggatgacttctctactcccactgatatatccccggataaactacctcccgctccagcaaattttattgaaccaaacaaaagaccattgtcttccatgactcctcttattgtcacaaaggatgatcagttggttggggtacttggagggagcggtggaatgaacattattgcagctgtagttcaagtctttcttaatcatttcatcttgggaatgaaacccttggatgcagttgtgagcccaaggatctatcacaaggttatagctaaccttttttcagataattccttgatgtgtgatgctccaaaccacaatctaattttgatttgtatctcacgcagctaataccaaatgtagttcgttatgagaacttgactgctcataatggcgatcacattgagctttcaaaagaaagtaggcttttcctagaagagagaggtcatcaactgagaggttctgaagcactagctgtgactcagcttattgtgcaaactctcaaaacgcctatgaacttcaataggaaagttggtgaaaacaccaaatcacttacaaagcatggcactctaacagcagtaagtgaccctagaaagggtggatgtccagctgctgtttaattatattgatcaattcaggttcaaaattgttaaaaaacagaggcatttcaaaacaattttcaattttttagccatgttgtatcaacaccatccaggacaaaaaaaaaaaaaaaaaaagaaagaaaacgatttggtcatcattcttcaaacaattaaaaacccgatgaaactttgttttctgataccgcagttacgcacttagaatacaaggtgaactgttttttgcgagaataataagccattggttagttattgtgggataaaatagtttgaacgaggcatgaagcttatgaattaagtaaaggttcatatagtgagagaattggtgcccttggggcattgtgagatggaaacactcctatagtgtgtgttctaatttgtaatagagaggttcttccccactctttgagaatgatacaagttcctataaaagaaacaatcaaatttagagtattaaatgccaaagaaagagtattacaagagtattaaaagtttattccaaacatagatatcatgtcctgactgcataccattttcatgctcagtgcttactcgaagtagtggcagacttgcaggaaggccagagtttttttgtaaaactgttcaatatagtattgatatcactccggatca

SEQ ID NO: 125160 - DNA, 324 bp, Glycine max
  unsure (1)..(324): unsure at all n locations
  Clone ID: PAT_MRT3847_84029C.1
gttgaatactttggaggncaaagaacacnngaggcgncgcttgctangnnngacaaggccaccgacagaaccncncnaagcaccccnggggaaacgaacaggcncnangggaaagaggggaacccngnnganaccccaggaccgccaccnnncgnngaagaagnaacaaagcgngcagcngggaaaaaggcaggnccacgnccncgcccacanccnccaccnccagcnaggccaaaancanacaacanagaagggnggnggggnnngggagcngagagagaaaaggagccngacaggacagnnanagaaccgaggaccaacgcc

SEQ ID NO: 125161 - DNA, 224 bp, Glycine max
  Clone ID: PAT_MRT3847_8402C.1
gaggagagggaacttggagaaaggtgcgaacgtttgctgcttctttgagggcatttttgtgccttgctaaaactttgggtgcacgggcatgacaggcggtaggaagatacgaccttcaaggactcatgcgcttcagtagcagttcctcgttcatattcagagtcatctctgggctggaggtgtccatattctggaggactagagccacttccctgtgtcaaaat

SEQ ID NO: 125162 - DNA, 301 bp, Glycine max
  Clone ID: PAT_MRT3847_84030C.1
gggttctttattaaacattcgacatggaattgtcactgctccactatcgtttgctctggacgagttccctcatatgcatgcaattgttgatgacggctttcaccaccctccaaatggtgatctcgctctggagtatttatgaaaaagccaaggtatacagaggacacggcacctagctgtgcagcatgctaacacttcagcagcaccaatcgattccttaccgcacatacactatgaatatgtaagacattcaacgagagccctgatagatcttactcacagagtcattacacgaccaaag

SEQ ID NO: 125163 - DNA, 152 bp, Glycine max
  Clone ID: PAT_MRT3847_84031C.1
attaagagatcatgtattgctactgtaactactatgttatagcctgctgtttactaatgcatcattctagttagtgcgacgcttgtaagagtaactgacaccgtttcttcacgtgtgactattaattttgtcgtctcagcttttaccctacc

SEQ ID NO: 125164 - DNA, 504 bp, Glycine max
  Clone ID: PAT_MRT3847_84032C.1
cccacgcgtccgattctatgtatgtagattgattgctaagtacagaccaattatgcctgtcatatccgttgtcattcctcaactgaagacaaatcaactccgatggacattcaccggtgcttttgaggctaggcaatctcttattgtgaggggtctttttcctatgctggcagatccacgacacccggtaagaattgttcaacatggattgatataatgatgtaaccaaagaacaacacaaaaattcattataaaaaaatcacagaacagataacgtaggtaaggtgtattaggcaaatcaaataaacataattttactagcataatgctaatccaaccagaaataagatattccaaggcccaagacaattacattttaagccctaattaacattaaaatccctatttcccggattgaaacctgccataaaatcaattaaatgtctttactagtttcaagagtgatttaaggtttgtgattttgtggcttgaatgcaggctgag

SEQ ID NO: 125165 - DNA, 750 bp, Glycine max
  unsure (1)..(750): unsure at all n locations
  Clone ID: PAT_MRT3847_84033C.1
agggtgtcatcactgtcaaacacaagaaaagagaatttcaattttcgacatacctattctattatatagaaatagacatatatgaagaaattaataatttaaacatgcacaagaattgatgcttgcttgatgggaccaaactaagtaaaggcacgcgcagcacaactcaaagcaatggagtgagttgcttatgagcatattgagaaaaaaaggcagaggcagaagcagaagcaaaaccccactttttcatggccaaaatcattggcaagagcagaagaagaagaacaacgacgactcaacaactatgccacagaatggttcaccatgtcaacgtccactgcaacctgttccatagggtgtcctttcttggccggttcatttgggacaggatgcttctctgctctcttggaaggccttcttacctcaggctgcccctccgtgacccgacgacacaagccaccgttcacggcggcgcctccatgcatggataccctttgaccaccaccacccgcctccccctgtgactctgactctgatttgagcaacctcaacatcatgttgcttggtgattgccatattgcgaaaaactatntctgtgatcatagtatgtacgggatgagcaagaaaagaggagcttgcagatgaaaggacttactttgatggacaaaactntatttgatcaaggagctacgattacgtttagtatatgcgatgatgcaagtgacacactgatccatatatcaaattcca

SEQ ID NO: 125166 - DNA, 328 bp, Glycine max
  Clone ID: PAT_MRT3847_84034C.1
ttttaaattaattttatggaagcgtatttatttaacacaacccctcgcagaatgcgcggatttcccaaccggaaacctcctaataatgaccacttacaaaaagtggcttctgaaaacaaaactccggatacacccactatttcaaaaacatcctcttataataccatccagaacataactcttccctgccacataaaaagcgttaactacaccatgtgcatgcatccagccatccaatgtattcctaagagtcagcaaccaaataaactgatccataactttaatatattcaaaaggctccaccatgcgataaggtaacatcatccct

SEQ ID NO: 125167 - DNA, 281 bp, Glycine max
  Clone ID: PAT_MRT3847_84035C.1
ggggaaaagaggttgggaaatcaagtatttaaaaaccttggcctcaacaaaaaaacctcattacctcacaaaacacccccctggatttggaccgaaaaaaacctcatcaccaattcaagcccccgcaggaaccacaaccccctgaagaaaaaggggcgggaaaccttgggggtcaatgaaaccaaccccggcctcccctggggcccaaaggaaaccagcaaaagccggttggacaaggctggcttcaagaaaagcctggaccgccctttcaaaataaccgg

SEQ ID NO: 125168 - DNA, 464 bp, Glycine max
  Clone ID: PAT_MRT3847_84036C.1
ggctcgagataagggacgaagtggtcctggttcggggaagcaagacggatttggaagcagagacagagcatgaggctgcagttgcggtggcctcactctccgtgtctgtcgccaccattgtccccttcgtccaaccgaagaatatcccatcaaccacccttcaaccaaccaagctgaaagtcccaacccaagcctgatccgtcacacacctttctttatccaccaccactgctcctccttccaaaacctccttcaaatccaccgtcgcgagcaacgcgctccacgcgcctatgtacctcggtccccagcgccccggggacccttccaacgccgccggcctacggcgcgccgtcgatgtatggttgcgaaacgacctgcgtctgctcgacaatgagtgcctgagcgacgccagcaacgactccgtctgcgtcctgcccgtctactgcttcgacccctgcgactac

SEQ ID NO: 125169 - DNA, 385 bp, Glycine max
  Clone ID: PAT_MRT3847_84037C.1
aaggcctgccagacctacctaattatggtatcaatgaacgggaggaagaccaaataatctttaacacttcaacctaccaagtgcaaactaaccgtcatatatgttaaacagaaatgtgctctttgtagattcagatacgggaggctgacatctctcaactctatttttgccgtagagcttgctgaaaaattctatgggaggattcgcatcttcatgaactttttatttggtaataatagtattaccatgaataataaatgttgctctccttatccttttaatatagctttgtaaaacatcaattgggggataaatggtagtgatcaactttgcttgtggaatcacaaatcctgcacatactaaatttgcacctacggtgtgttaa

SEQ ID NO: 125170 - DNA, 352 bp, Glycine max
  Clone ID: PAT_MRT3847_84038C.1
cccttaacaacacatccatcactgggcgcacgtgagagactttcttgttgcgaacctccttattcttcttctgccccaacaaatgaaaacacacacacaacttccaaacccaccataacagaccctgcaatcactccttccaaatgagggcttattacgaagctatgtatctttttggtacgttacttgttcctaatatctgaccactaccctatctagcccgaactccgaagctcgatcctcatgaacgactgaatgagcctagcggtgctcttcatgacggacaagatgatccccgaagcgtcccgctacgtccagaagctgaacctgtttgggtatgacatcaacaaga

SEQ ID NO: 125171 - DNA, 407 bp, Glycine max
  Clone ID: PAT_MRT3847_84039C.1
ggctcgagcaagatcaaggtacggtgtcgatagtgccggcaacaaagtcgaaggcgacacggagcgaatggagactgtaaagaagaacatcgattcccggggcttcgctgccaaggcggttgtcgtgcgcatcatgacgtaacgcacggaacttgcccacacctgcctgctcaacgagactatcaccctgctatcatcacagttcaagcctgatgtcgccatgatcaagaagaagatcgaatccctgatcgagcgctagtatctagagctcatcaaggaggctgctgttccaagttacagatacttggcttgatctgtcagatctaattgtcatgagctgcgacgggcaccttttatggactttagtttacactactcggagttcggcagttgatatatggatgggt

SEQ ID NO: 125172 - DNA, 844 bp, Glycine max
  Clone ID: PAT_MRT3847_8403C.1
aattcgccacccggcgcgctcagtgggggtggcggcggcggcgacgatgaagctggtgcccctcgttgcccgctcttttctcaggcgcgctgcctgcttgatggctatccacttgcgccgcgcgcttctggctccgccacgcgtccggccgcttgatgattccgtggacgagtacggctgcgagaagacgacagaaggggggcatcaaattattgtcagatatgctgaatgcatgggattgccattgttcaggaggcgaatacaaggatcctcaaggcatcaggagcttggttacaaagaaactcaaggtgatgaagttgaagacctgtgcattttgttacgtgaagttaaaaggcagataccctcagttagtgcagtttcttctggagccattgcatctgactatcagagattgcgggtggaaagtgtttgttcaaggttaggccttgtttctctggcatacttatggaaacaagatcagtcattgcttctccaggaaatgattacaaatggaattgtagctgtaactgtgaaggtagctgccatgggtttggatcctgcaaagcacttgggtaaagaattagccttcttaaatgcttatttacataaattgaaagaattgtatggaatcaatgtttgtggtgaaggaggggaatatgaaacattaactcttgattgcccgctcttttctaatgctcgcattgtgcttgatgaatatcaagttgtgatgcactcttcagattccatagctcctgtcggaatcctttcatccctggcatttcttttggaaaataggcagatgttcagtatttaaaatcacagacaaaatcatgagagttttaca

SEQ ID NO: 125173 - DNA, 215 bp, Glycine max
  Clone ID: PAT_MRT3847_84040C.1
gtagatatgataaggtgctcaagcttcagtggacaccaaccaaccactgaacaaaaccgaagcttgacatcatcgacgaacttgattacgcatgccttccttccatcatcccttgcccttaaaccacgtagccgtcttgtaatgccttgtcagaaactcagaagacccttgcactcatttccgtcaatggattcgagtacaacaaactccacaga

SEQ ID NO: 125174 - DNA, 1147 bp, Glycine max
  Clone ID: PAT_MRT3847_84041C.1
ccacgcgtccgattttttatttttttttatctctctgctccttaaaatctcttcctttgatcagactcggaacgtgtcatgtggttttcagagtggaaacaagtgagtcgctgatcttaacaaagagcttctacaatgagtttgactggaactgtgaatgatgcaactgctacaaattctccgtgttgttgttctgaggcttcaggatcgggatcttgttgtggatgttcatctaacaacagctccactcatatttgcttcaagtgtgacttcaattgtgatcctttactcactcttgaaaatgaagactccaagtggatctcagattcaaatccttatggatgttcatctgcgaaaccttcatctcctcttagcaccaatggaatacattgtgacagatcaaaagataatattatttcagtggagcatcttctagaaatagaagacatgcaagagtttaatgttgatgaaccacttttttggccatttgaagcgaaattgaactggaattattctgaggaatcctggagtccattttgtatctcacctaggaaaagggttgtctttggttctagatcaatgacatcaaggataaaggaaagtaaacataaagcccctggaattgaatgcagtgtaacatctgaaccttcaaggataaccatgtcatctaaaggttcagcagagatagtaaattcagagttgaatgatgagaaagttgtactgaaaaccagagaagatggcaccaaactaatatttgttgccaatcttaatgaggatcatgagccaaactatgcccttcaattagctagaggagatttttctttggatcaagagcctgagattccaattgagacattggtggggctcaaggaatttgatggacatgaagggcttgattcagaatttaatggtgatgttttcatgctggaggattctctcttaataactcatgcaagtgaatgtgtagtttccaaaaaggatgaatagcaaactggacactgataaatatccgaacagggtttacatgagtcatgacttctttataagcccccttataacgttgaaatttttggagaaataattaaatgttatcaaagagtttagttcaaaaaaaaaaaaaaaaaaactcgagactagttctctctcc

SEQ ID NO: 125175 - DNA, 287 bp, Glycine max
  Clone ID: PAT_MRT3847_84042C.1
cggatttccggtccgaccacacccgtccgaactggcaagctgtttaaccttatccaactaaaccctgcaatttatggggtggggaaagggggaaagccagaattcaaccttcttaatgtgggcttaacccgaccaccatttcctaccacagtaaccctaatccgttattggaacttttttcctccttttttttttcccctaaaccatgctaattcccgccacttaactactccttttcccccttaataagaaacagaaaccccaatttccgaattttcgcgggggcc

SEQ ID NO: 125176 - DNA, 696 bp, Glycine max
  unsure (1)..(696): unsure at all n locations
  Clone ID: PAT_MRT3847_84043C.1
acgagattatatgaagtcagtgtgggcatactagcatatatgctcacaatacacatgactcttccactgactttgaactctcacaatgtagttatgggaatctttagctgatcgcctaccaaatttagatgcattgcatgattcttgttgatataatttattttcataagaacaactacagctatttaatattttgttctctttcaatagctacttgactaatatcttctaattgtaggattttaacataagttcaaaagacttgaataatttctttggtggacctgctttccttgcttgggctcgcatgggaaatttacatgggtaggtaaaagcagtatgtaaaccctgttgttggtttttaatctgtatagaaaaagcctaggaaatgatcttgcaaattaagttgtttgtgtttcatattcatttttcattcatatttcatattgtataaactataaagagtgtgtccatgctgaacatttaatacattgacaaaataatatgaaaatcataatgcttagaggaaaacaaaagaagagagttatagtttggtacagtttcaaaattatttaaagtttgcagaccttgtttctgttttaaaactcaaagggctggtgggacactattaagaaatgcattcttctaatgttacaaatatccaatacccaagtcannngaaatgaaattgtatat

SEQ ID NO: 125177 - DNA, 488 bp, Glycine max
  Clone ID: PAT_MRT3847_84044C.1
aagcagctggggcaagaaaaatcctgcctactttagccctcgcatatttaaaaaaatccaaagcatttacctgggagggaaaaaaaaaacatttacgtttgcaagggggggataaaaaagctaaaacatccaagtttataggaaccctaaatttttgggaagggggctcaagcaatatgggtaattgggatgccctagttcaaaaagggtcaacttaatactggaaaacataagggggaggaaaagggggatggtattgggagaaaaaacccgggggggaaggttggtactcactattttgggggagagaggggtcatgtttataaagagggggggatggggttttttttttcaccttatgggggggaagagggggaactaggctcaatggggggggagctaactacattaggttgggggtgatatactctgacttcaaccaattcctctttttttacctcaaatgacctgaagatggggggcaagta

SEQ ID NO: 125178 - DNA, 291 bp, Glycine max
  Clone ID: PAT_MRT3847_84045C.1
tatcttccacgcgttcggccacgcgtccgggatgctcgactattgagaaggaaagccttctctcgtattgactggctgcaaaaagctgatgtgcctaccatagcacagattgaagagttccattcgatgcagaggatgatgaatgctcctgattcaaatgataattcagaactactgtcgagcattgattagttgtgtttacaaggagcatgttaagtttttccaaacaagattgtttatgatgataggcttgtgctggcttacacacaagaattcttggatggaaatctt

SEQ ID NO: 125179 - DNA, 247 bp, Glycine max
  Clone ID: PAT_MRT3847_84046C.1
atttctttctctcttttttttttcttttctgtttttttaaacctcaggaatctgttaagatagaactgaactgagcttcccagcgatttgtattttctgcggaaaatttcgtaatatttcgcaatatttgtctcccgcgttctctctatctgtgtttaaactgttttcggcagttactgattttattttatttgttgagtttgtgctggattcataatcgatctgatcatcatcaacactgaacagt

SEQ ID NO: 125180 - DNA, 587 bp, Glycine max
  unsure (1)..(587): unsure at all n locations
  Clone ID: PAT_MRT3847_84047C.1
ttcatcatctatctatctatctccctttccttctctcccaaagctaaacactaaatcaaaaaccatcctttagctccatcgcttttcgttgtccttatcccggctttcttgtcttcaatcgctttcaaagatcatttgaattgaagcaaaatggggagtcatatgagcaagaggatccctgaaacttcttcttctattggcctcagcaccgaattgcactacaaaactgagttgagttcctatgaagctgcttgcaagcttgattctgatttgcagttctttgacaccacacttcaagctagagcaaatcaagttatcaacactcttgctgttggtgttgaagttcgagccctttcattcgattctctaaagcaaatcacagaatgccttctggagatgaaccaggaagttgtcaaggtaatcttggactgcaagaaagacatttggaagagccaggaactgtttgaactggttgaggaatactttgagaatagtttgaaaactttggacttctgcactgtattggagaagtgcctaaagcgcgctcgcgacagccaattgcttattcatgtagctgntcaacagtt

SEQ ID NO: 125181 - DNA, 488 bp, Glycine max
  Clone ID: PAT_MRT3847_84048C.1
cttcctcctccttctcccttatcaaatttaattaactataaaacaactttcaaaatggccttttcggaagcaaaaatgctttcagaaatctctttccgtaagctaaaatgtttctagaatgaccttttcataagcaaaaaatgctttcgaaatggctgttctagaagaatttttgctcacgaaaagaccattctggaagaaactttttaaattcgaagcaaccttttcggaagtgtattttgtatattctggaaaggggtttttgaaaatcattattatgcttacagaaagttcattccgaaagcaacaactgcaatccagagtagtcttttttaaagtgtattttgtatcttctagaaatgacattttagaaagtaccattttagcttatggaagaaccattttggaagcaaaaattgcaatctagaatagcctttctggaagtgcattttatagctttcaaaatggtcattttcggacggcgtggg

SEQ ID NO: 125182 - DNA, 373 bp, Glycine max
  unsure (1)..(373): unsure at all n locations
  Clone ID: PAT_MRT3847_84049C.1
cgctcccctagcttttgtttgtgtttctgctttgccccttctccttcttcagttgttcttcttccttttcactctgctctctctgaatgctaaattgaaccaaagcttgcaacttggtaaagacaaaaacacttgcaaaaatgaggggtcctttgggtgcaagaataggaaggtacccatcaagtgatggagttacccaaatgggtggaatcataaggcacaacaggaaatgcagggacatcattgntcttgtgatcttcatagctttttggatagcaatgattgtcaactccaggcttggtttcaaccaatgaaacccactgaggctaacttatggacttgactacaaagggaatgtgtgtggggacaagca

SEQ ID NO: 125183 - DNA, 652 bp, Glycine max
  unsure (1)..(652): unsure at all n locations
  Clone ID: PAT_MRT3847_8404C.1
aatgattgtggcatacgtgactacagtttattatccnatccccagtaaaggtattactattttcctatttggaagttagaactaatttaaaataaattttaatttatgacataagcttaagcctttacctgcttatccagtctcctggtaacattgagcaaagggtcgaggcatttctccaaatgtttgagaccaaactccacgagatgacaattgatgaattcaaggtttgatagttctattcatattttattttgttttctggaattgtttcctaataatgattcaataaagaatgcttcttccccatatttttggtagatatgcctgacttactccttgtgttgtgtgagttttgagttaaattctcaccagaagaagtacaaacatagattcaatttgaataataaaggatatctacatgttcacttgatgggaatgtgcaagtatgtacatataggacattatgtacatcatcatttataagcattaagcaaggaccacgatatttacacatcatttgtagcatgtttgggaattactaatgtcggtaaataatcacanagctgcaagaaaaaaaagaagatattttcccaaaaaaaagcaaacccaatacatttcactatttactatcaattatcaatgtacaggg

SEQ ID NO: 125184 - DNA, 330 bp, Glycine max
  Clone ID: PAT_MRT3847_84050C.1
ccagttgtcagacagcagcgaaagggggacagataagttagttgggtttttgagtgagacggtctatgaacacttcgctggtccttgtgctcatacgtcccatcactatggttgaacagcactacaaagcgtatcagaagtaaccactcctgtttctcaccacatataatactgggaacgcaaagagacctgtaacaggtttgaacggcttttgtgagtccattgggcatggatttaatactcacaaggaatccatcgtgcgtacctacattgacaggatatatcccttcactggcaatgttatcatccgtgaacatatcttggctggaa

SEQ ID NO: 125185 - DNA, 452 bp, Glycine max
  Clone ID: PAT_MRT3847_84051C.1
cttggtgagaagaacatcaccttaacaagttggagagaaggagcttcaatgatacgacataggctccgacaaaagaaggttctcttgattttagacgatgttgacaagcacaaacaattaagggctatggttggaagatctggttggtttggtgccggtagcagagtcatcattaccactcgggacaaacatctactaaaatatcatggcgttgaaagaacttatgaggtggaggttttgaatcacaataccgctcttcaattgcttacttggaatgcttttaaaagagaaaaaattgatccaagttatgaggacgtggaatctgctcttgaacattataagagaagtcccggtaatgaaatcatcctagagattctaaaagtaagctttgatgctttgggggaagaacaaaagaatgctttgaaacgtaagattagaaattttgaactccc

SEQ ID NO: 125186 - DNA, 2668 bp, Glycine max
  Clone ID: PAT_MRT3847_84052C.1
cttggtgagaagaacatcaccttaacaagttgtagagaaggagcttcaatgatacgacataggctccgacaaaagaaggttctcttgattttagacgatgttgacaagcacaaacaattaagggctatggttggaagatctggttggtttggtgccggtagcagagtcatcattaccaccccactcgggacaagcatctgctaaaatgtcatgaggttgaaagaacttatgaggtgaaggttttgaatcacaatgctgctcttcaactgcttacttggaatgaatgcttttaaaagagagaaaattgatccaagttatgaggacgtcttgaatcgtgtagtaacttatgcttctggccttccattggctttggaaatcataggttccaatatgtttggaaaaagtgtagcaggatgggaatctgcggtggaacattataaaagaattcccaatgatgaaatcctagagattctaaaagtaagctttgatgctttgggggaagaacaaaagaatgtttttcttgacattgcttgttgcttaaaagggtatgaatggacagaggttgatcatatactccgcaacctttatggtaactgcatgaagcatcatattggggtgttggttgaaaaatctctcataaaggttagctgctgtgatactgttgaaatgcacgacctgatccaggacatgggtagagaaattgagcggcagaaatcaccagaagagccagggaagcgcaagagattatggttaccaaaagatataattcaagttttaaaagacaacacggggactagaaaaattgaaatcatatgtctggatttctgccttatccgacaaagaagaaacagtagaatggaaaggaaacgccttcatgaagatgaaaaaccttaaaatacttattattagaaattgcaaattttccaaaggtcccaattattttccagaaggtttaagagtactggaatggcacagatatccttcaaattgtttaccatctaactttgatcctatcaaccttgttatatgcaagttacctgacagctccattacgtcatttgagttccatggctcatccaagaagctcgggcatctaacagttttaaattttgaccggtgcgaatttttaacaaagatacctgatgtatctgatctcccaaatttgaaggaactttcatttaattggtgtgagagtttagttgcagttgatgactcaattggttttctgaataaacttaaaacattgagtgcttatggttgcaggaagcttacgagttttccgcctctcaacttgacctctcttgaaacacttaaccttggtgggtgttcgagtcttgagtattttccagaaatattaggagagatgaaaaacataacggaacttgctttgcatgaccttcacataaaagaattgccattttcatttcaaaatcttattggactcctgtttttatggctggatagttgtggaattgttcagttacgatgtagcttagccacgatgcccaaactgtctgaattctatataacggatagttgcaacaggtggcaatgggtagaatcggaagaaggtgaagaaaaagtagtgggctcaatactatcttttgaggccacggactgcaatctatgtgatgattttttttttataggttccaagaggtttgctcatgtaggatatttaaatctaccggggaataatttcacaatccttcctgaattcttcaaagaactgcaatttttaacaactcttgtggtgcatgattgcaagcatcttcaggaaattagagggcttccaccaaacttaaagcatttcgatgcaagaaactgtgcatccttgacttcctcgagtaaaagcatgcttttaaatcaggaactgcatgaggctggaggaatcgagtttgtatttccaggaacaagtataccagagtggttcgatcagcaaagcagtggacattcaatttctttctggtttcgtaataaatttccagccaaacttctttgtcttcatattgcaccgtctactgggtcttttatccggtatccagaggtgttcatcaatggaaaatttcaagaatttgagtcccatgagacggacgatacagaaagtatgttgggattggatcatacacatatctttgatctccaagcgtatgctttcaaaaataataatcagtttgaagaagtggcttgggaaaaggaatggaaccatgtggaggttacatatcaaagtgtgttagacgatgaagaagaagagagtgaagaaggtgtgttagacgatgaagaagaagagagtgaagaaggtgtgttagacgatgaagaagaagagagagaagaaggtgtgttagagttagagagctcagtcattaaagcaattggaatccatatagtcagagaagaaggcagtatggaggaagatattcgatttgatgatccttatctcagcagctctgcatcagactacaaaccatagctttggggacacgcaagttttccatagcttttttctttttttttttattttattattttggtttccgttgtcaaaaattcacttaacccaacttctgttcaccctatcttcatcatgtacttttgacgcatttttatatattcatcttttacgactttatgcattttctatatataacctttcaagttttatctttct

SEQ ID NO: 125187 - DNA, 901 bp, Glycine max
  Clone ID: PAT_MRT3847_84053C.1
gatagggataagatagatgtgtatcgcggtgttcagttcgcctgctcaaacaaagtaccccttgattctcttacacaacagggacgagttttattctcggcctacggaaccattggcgtggtgggaaggggaaacgatcttgggtggtaaggatgcactgggcggtggaacatggttgggttcgacaagagacggtaggatagcgtttcttacaaattttagggaagttgagatgctttcgaatcccaagaccagaggggacttgccccttcgttttcttcagggcaataagagtcccgaggagtttgcggagcaagttgtgaaagaggcagatgagtataatggctttaaccttgtattagctgatatttgcacctccagcatggtttatgtctttaatagaccaaaccaagatcatctttctcttgcacaagttgttgttacccctggaattcacgttttgactaatgcagccctcgacgctccatggccaaaggcagaacggctgcgccataatttcaaagaatttattgatcaatatggtgaaagtgattttccaattaaagaaatggttgagaagctaatgacaaacacagtcaaagatgaagagtgtatgttaccagggattcatcctccagaacgggaacaacctttgagttctatatttgttgaagcggggctttcttcttcgggtcattatggaactaggagctcttctgccttgtttgtgaaatctaacaaagaagttaccttctatgagaaatatctggagaagaagcaatggaaagataaaatggtgacctataagatcagtgagagataataaaaggcagggatatgatttatttctgctactatgcttcaaaaatatcaaaattggtgcatcacaggccgtgttcag

SEQ ID NO: 125188 - DNA, 392 bp, Glycine max
  Clone ID: PAT_MRT3847_84054C.1
gctcaagctctatcctaatctacttttcataactttctttcttcaccaattactatacccaagaatctttaaaatatatctagtaaatcaatcctctaattttactaccaaccttcaatctattaaactccatacttaatacaatcatatacacattcatattcatattttaaacctctctatcaaaatcatctctcacaccatctaactatacatctccaattacttcctatttatatcatcaaccactacattaactttccctacatttttctttaacttttaatcattattcttaacatactctatccaccttttttcatttattttcaactccctttttttaaacaaatttttaaccttttattaaccctttaaaaccccaattttct

SEQ ID NO: 125189 - DNA, 645 bp, Glycine max
  Clone ID: PAT_MRT3847_84055C.1
tgcatcaactttccctgtcatcaacaaaaatcaatctcaaaccaaaacttccctaatcttctcctatgatttactcttcttctttatctcatcttttctcctaaccttcttttttttttttttagtttattatgtgaattatgccagggaaaatatatctctatacaaaattttgttctggttgggaagaaggaaccctacccatctccatattcaaggaaaatgctttgagaactgtgttattgtggaagcttgataatgtagaaaagaatgacaaatgccaaataacaatgatatccacatggtcttcctcaacacatggtggttcataaattcactaaaaagagaaagaatgtggtcatagtatatgattgattgagaggcagagacaatctttcatattagcaactcaaatctttcacgcactctatctctcgattggactcgtcgtactagtaggatagaaaaccatggaagagaatctattagcaaaacaaagagagaagcagaaagttacatgggatggtttgggtgaagaaatgaagaggatcatttgcatagcagtgcctatggtaattgtgactgctacccagtatttattgcaggttgtgtcaatcatgatggttggtcacctcaataacaatc

SEQ ID NO: 125190 - DNA, 365 bp, Glycine max
  Clone ID: PAT_MRT3847_84056C.1
acggcttccaagaagaccacacaaagggagggataactatgaattctagaggacgcatggactgcacgtagaatgtgttatgagattacaaggtatacttggacgtgcttgtaaagagaatacgctttgaatgcaagcacgagatttaaatgctcgaaatgtaaactaggcggatcctaggagtgtctagatgaatgaatttcaagaaccaacagaacacctaatgtccttagggtattatgtctaacaaggtcttacacacattgaatttttgtatcatattggcagcttccaacacacttttaatgaaaggcccttttgttacaaaagttggaagctatgtagttttaccatatctatcaaat

SEQ ID NO: 125191 - DNA, 308 bp, Glycine max
  unsure (1)..(308): unsure at all n locations
  Clone ID: PAT_MRT3847_84057C.1
agggaggnangagagnnagntcggaagnaggngaggtagganngtnnctgcangtnntggntnnnngtnanagnaantgagggancngntggnnggtattaaaaantcacaatgcaanggnngngncagggagnacnacnanntggaaatggaaggagaagaatggnantnataanagcagangtgaagnatgtgaacgcngaanaagctaaggaangtgtggaagnngatggatatannggantgatgtgaggganaaanatcagtnngagcgagcncanatnaaatcgngnactnangtgnctcnn

SEQ ID NO: 125192 - DNA, 186 bp, Glycine max
  Clone ID: PAT_MRT3847_84058C.1
ttcgtcccaaaaagattattattttccttctgaggacaaagaaaaacattactgaaatctttatccatataggctcttttacattatacaccacaaaattaggaatcccacatgcccccccggaattattctaaaataatctcgacctcccacacaaaaatgaactccttccttaaaaccctcgcc

SEQ ID NO: 125193 - DNA, 288 bp, Glycine max
  Clone ID: PAT_MRT3847_84059C.1
gcattgccgatcaaagtggtcttatttgaaaaacacttgggcgttggcgcaaatgtctgctatcgttaattatctctggatacaacaggctcactgagaaaacaatttttacttgcagagatttggacatctctggttgtctactatacaatagcatctcaatttagagaatttcagcagtgagaaaagatgggagaatgttatcaacaacgtatacagatgccacctaatgcaatgcggtagcatctgtataccttgttgatctacattcctccatcttgtctcact

SEQ ID NO: 125194 - DNA, 262 bp, Glycine max
  Clone ID: PAT_MRT3847_8405C.1
attcgagccgaatcggctcgagtgaagactgtttttcaagcccaccacgctgtgtcttcgaaccgttggtgttaagactaacagtacaaaaagcacaagcacaagcatcaacccttctttgaagatacctcaacaacaaaatgacccacctttgcaaaactttgctgtgccagggaaggcaaggagcaaaaggaagaggctttcagcaccaagaaccaacaaagaccctctaagcatatggtcacaccatttgaaccctcaa

SEQ ID NO: 125195 - DNA, 284 bp, Glycine max
  Clone ID: PAT_MRT3847_84060C.1
atcacaaccacattactgggaatagatcttacgatttgaagcatatggtccttataatggcattgaaatgatgaaacttgactgggctaatacaccttattggatttagaataaacttattgacaatcccaaacagtctacagtttttgatattctcttgggaatctctcaagattttgaaattgctggtaatactcttatgccagctttttctgttccacaggctactgccagatcttctgaaaatgcggaatcctctgcatgatctggaatttgtgttttct

SEQ ID NO: 125196 - DNA, 283 bp, Glycine max
  unsure (1)..(283): unsure at all n locations
  Clone ID: PAT_MRT3847_84061C.1
gatcctcacttgatganactactagttcctgagatgataacatcaaacttcgnaataacaacgaaacttccttataatttatcttctctcttctttctnncttncttccctctctnctattctcttcttgtctttacatnacaccctctttccccctttggccaaagctctgatattttccctcnnccaaatcnccgttttctngcacttttcttggatcangggtggcntcgttttctcagnttcngaatccattnnngttctgggnctctctccanntcgg

SEQ ID NO: 125197 - DNA, 234 bp, Glycine max
  Clone ID: PAT_MRT3847_84062C.1
ggggggggccattgaactgttttaatttttgttttaaaagaaaaaaaaacccaatgtttttttttccatattcccccattccattgtaaaactttggaaccgttcggaatttccccatttccttacccaatttcgttttttttttttttttgcctaaaacatattcaggcaaataagggttgccatttggaactccaatcgttcaaaaaccatgaattttgatatgatcctttt

SEQ ID NO: 125198 - DNA, 107 bp, Glycine max
  Clone ID: PAT_MRT3847_84063C.1
ggaagtgtacctgaggaacacttacttcgcgagtctttgtcgaagaacatataggtacccgttgtgtggttgatgcatctttgcggtgtcggggttacagctgcaaa

SEQ ID NO: 125199 - DNA, 376 bp, Glycine max
  Clone ID: PAT_MRT3847_84064C.1
caagagaaaacagaccctgaacatggatgcgccacgtataagatactttggacgcaccagctacaggagcaacgagcagtgcacactatgacattatagaataacattgtccgatgactggcatgacctaaggcatactgccaaagatctgtttgcagctgtgcttcccgcaggcttacacagacgaacgaaatgcttactctgaacacgatcacgtgtacagacaataatccacacttcaagaaaacagaatatcagaaaaactactctagtagtcagagctgcccaatctgcactgcggatggcgttgaaaaagacaaccaatgatcttacctcggcacatacacctgaacactgaggcccactctagaccagg

SEQ ID NO: 125200 - DNA, 1825 bp, Glycine max
  unsure (1)..(1825): unsure at all n locations
  Clone ID: PAT_MRT3847_84066C.1
ttaacctttcattttctctagaggaaacaaagcatgagtgattgcaactcccttcaacaaatgtaggtctaggaagtttcttagagcaccaaagaatcccaaattggttatattttctctccactcagaacatttccttacgaactccatcacctgcatcccttgaagcctaaaaatatcagttgaacttgaacccccacatccaatcacagtccattcttcttctctagcatccatgtccagcaaagctgacaactcagctagtacatgatcagaacttggtgtcttccctagtctgagtttagaccttctcatactctccaatcgaagccaaaagtattgcacatttgtgaaggaaagtggatcactgaaacttttttcaccacttcgtgccattatttgcttaacattttcacctgctcgtttgacctcagtaatcttatcattgaattgttggatccaaaccaagttttcactcccataaaggcatatattttttccttgttcgacccagtaagcaaggaaaggattgatgccatccagcaaaagttgcattgtcaaattctggtcttgccatagctcttccacttttgaagccgagaaggggtatgcttggggaccccaaatcttgatcatatcaagagcattgtaatttgtaaccttcccttttgaatctagagctaccatgatgggctcatccttgtagttccattgttcccttgtgtacttcaccactgctgagctaagtaaccttggtttctgaacagcattccaagccaaagaatctgacaaaaaattaaaactactttcttcagcttcagtccatgtatcagaaaatggaagggggatccacacaatcttataactctccctcaacctctcattcagaggatgatcacatgtttgctggaccagcaagaatatatctatcgggttgagtagctgcggttttgagatcaacaacagaactgtcttatttttcagttcagaaacaccaagcagtctcagaaaaatgacgatctcgaacccgttcaccattggatcgtcgtgaaattttagtatcatgttcgcaacacaattccgagcattctcaccgttgggaatttcgatatcatgtctgaactgagagaaaaacccttcgcattgtagcctttttctttcccgcagaaacccagagctgtctgaatcaggagggagaggccctgacggactcttcggagtgtaggccttgggggtcaccgggtttgagtgctcctttaagcctatgctgatctcatatggttggagcattctcgcaaaacatccatgaccctgactggtctccttatgatcttacttagtgagagtgacctgacaaaccccattgtgtggtgtgtctctgttatgtactcctaagcgccccaaagggtggtttttcactgacanntggtaccaccattgcatattggcttgagtcttagcataactgtctcacgcgcttgctaattgtttattatgaaattcatgtgttattatgtcttgatcagagaatgtgatttttgtgtaatgtgattgatgattgaaaagtgtgattgatggatgaaaagtgaactttgaatgacaaagtggtggaattacgtgaattacgtgtaagtaaattttatttagtttatatgatatgtatatctagttgtcttgtttctccattaattaggaatgtgataactcactccccgtgtgttgtttgtgtttggatcctgtgatgatcttgaactttgtgttcaggggagcagatgactaggtgaattgatttaaggaaccttatctaaggacgtccggacgcgtg

SEQ ID NO: 125201 - DNA, 294 bp, Glycine max
  unsure (1)..(294): unsure at all n locations
  Clone ID: PAT_MRT3847_84067C.1
acacccccacggatgcgagaagaccaccgaggggactattttaacataaaactagaacaatacaacggggtcatttatagactcaacagcaccaaactcctcaacgcctcctccaaacaactataaaaaaacagtatcttagtctcactgatccaagtcttcctcttcaccttcaactaccataccccctccccagacttcacctaccaccgncacctgcactcccagtaacaaatcctctactggtaaaactccttcgcctcctcagaaaatcaggttcgacactactccacc

SEQ ID NO: 125202 - DNA, 577 bp, Glycine max
  unsure (1)..(577): unsure at all n locations
  Clone ID: PAT_MRT3847_84068C.1
aattcggcaccagaagaattcgcggccacaggaattttttttttttttttttgacattaaattcttgcatagtattattcacttgtaattgagatcgaagttaaatccatacatttcatatataacggatcttcatttccccacctttgagaaacaataattaaaatgtaaataacacattacaaattaatgtggcaagaagaagcttgagaatgctaaaagagtccaaaaggttcaggcaggtactcaaatccattgtcaaagatgggtccttgatcacatttatcatcaacactacgcagccagtttgtgttgtttaagtcttctttaagcaacagtgaatcataacgataactctcgtacacatccactacttcactcaattttcccaagtattgcttttgcctttcacctatctctcttccatttttcctattattgttattattattatttctgctttggaggcttccgttaatgttcattgacactggaacactcaaacctctagtgtggtgtgtcttgggagttgaagttcgaatgctctgnngatagagtgtggcgcttggaactgaac

SEQ ID NO: 125203 - DNA, 469 bp, Glycine max
  Clone ID: PAT_MRT3847_84069C.1
tacgcgagaagacgacagaaggggcgtgaactttctgtacaagaacttcattgcaatttgtctcagttttttgctctgaatggaaaatgtgaaggagagataactatctaaattcaaatttattttataaccttgttaccattttcacctttccaaatttttggttacatctaactactacagtggttgtctaagtatacgtaccatttttcttttgtaacttttagcaaatgctcaaattcattctcaagattgtactgctttagtttttgattttcaaaaaaaagaaatcgttagttttttactttaaaagacggtgtttactttagtcttttattaattatcaattaatgtaaaacaagaatgaaaaaaaaaataataaagaaaaagtgaattactttttgcaaagtcataaactaatatttttgttttattaatttcaaatactaaagcatctaacttagataaa

SEQ ID NO: 125204 - DNA, 124 bp, Glycine max
  Clone ID: PAT_MRT3847_8406C.1
ctcatgcatacttagctgcaaatcaactccttttcttgctatgaacctactaccacgggattgtctctaaaaccagaatccttctctatatgaacgtcattaaagctctcatcactcacatatc

SEQ ID NO: 125205 - DNA, 451 bp, Glycine max
  Clone ID: PAT_MRT3847_84070C.1
gaaaaaaaaacaaatccttagcccttccttttgaaagggggggggtttaaaatcaagggggaatccaacccctgaaatttttcccccctttatttgggatggggggaaatggatcccccatcctacaggggatttctaaggtaaccaaaaaaactaatggttttggttcccccatcacaaacaaaaattttttcttcacaccaggttaaaaatccttttttaacaaacaaattaaacttttttattttccccacaggtaaaacttggggggggcaacctttttggcccacctccattattttttttacctcagcccctcaagggatcaaaagttgttttgtttttcccaaaataaaggggttaaaatgggtatttgtttgttttaacctaaaactttaaaaagctgttttttgtgggaaaaagcaatggcattccattggggctggggggg

SEQ ID NO: 125206 - DNA, 465 bp, Glycine max
  Clone ID: PAT_MRT3847_84071C.1
agtgtgtgtttgagatgaaggtaccacggtgaaaaaaatcatggtcaattccaattccacggtagagttacagcaacacatagttatttctcaaaattgacaatgatatcatgattttttgtccgaaaattaattatgcactgtatccaaacacactaaggcatgttatagaatgaagatataaggtgagttaaaggaaaaaagaagaaaaatattacatatacaatacattatattaatgaaactaatgtgtgttgttgataagaaaaaagtatcctactatagacattacctgataatgatagatgaagtgttagtaggaatgaaaataatgatgatagtgttgggcgatccatagtctgatctaatgtgaataaggaaaaggagaaagaagaagaagagagaaaattaattatatgaatgaatagtccaagttcttcttcttctaaaatgaattgaggccgg

SEQ ID NO: 125207 - DNA, 380 bp, Glycine max
  Clone ID: PAT_MRT3847_84072C.1
cccacgcgtccgctccacgcgtccgaaaaaaaaaaaaaaaaaaaaaaaaaagaaaaaagggtgaaaaaaaaaaaaaaaaaaaaaaggccgcccccccaaaaagagacccaagaatacaaacaaaaacaaggggcggccacacaaaaggaacaaagccaacaaacgcgagcaggcaaggccaaagctttacaacggggggaccgaaaaaaaaccgacgggccgcaatttaacaagcgtgggacggaaaaaaccctggcgaaacccaactaaaagcgcaagaggccccaaccccctttcccccgcagccgaaaaacaaaaaaagccccaaccgaaccccccccccaaaagtggcccaaccggaaggggaaagggaacccccc

SEQ ID NO: 125208 - DNA, 258 bp, Glycine max
  unsure (1)..(258): unsure at all n locations
  Clone ID: PAT_MRT3847_84073C.1
ggatctggtangtgttaccgaatgtcagttttgggatgagcaacttgatggtcttccagaaccaaatagcctataaatacaatgtgtttggattgttagctaattaaaaaaatcatggtgttccaccatgatattttaccacaccagaacatgatccaccacatttctaaacactcaattgcaatgtttggattagctttatgatgattaataatcaattttttttttttggtggaaacaaagcaacaaatatttgtt

SEQ ID NO: 125209 - DNA, 200 bp, Glycine max
  unsure (1)..(200): unsure at all n locations
  Clone ID: PAT_MRT3847_84074C.1
gtgtgaaaaanaagcgtggaaganagagtaaaaaggagaaggaggacatggaaaagatgtcaganagcaatttcttggagaagagagatgctcaaaacgaaaaccttggtgaaaatggtgaagtgggaggttcttttctgtttcagaaggtgtgaaanagaagcgtggaagaacgagtaaaanggagaaggaggactggc

SEQ ID NO: 125210 - DNA, 1217 bp, Glycine max
  Clone ID: PAT_MRT3847_84075C.1
ttccgaaagcccttattcctaatagcctcttctttctatctatctaatcctggcgacaagagtgtgaaatcgctgtgtgtgttgcagattagcagatggaagatccagctccaccatccgaagcatccaatcgcccccctcgtaagaggggcagacctcccaaacacctccccaaggaacacgacgccgacgccgaccggaccaccgtgcaagccgaccgagagagttcgcccgacgacttcgacgaagcacccgctaaatccaagagaaatcgtgcttccgaaggaacctccagcgtcgcgcacaaagtctctgaccaaaccctaattgaggtggtaaaaggtaatggcaagtttattccccaggcagtcaagttttgggttgaatgctatgaaaaggatccaaaacctgcaatggttgatctcttgacaatgctgtttgaggcatgtggagccaagtactgcgataagagtgatcttgtggatgagactgatgttgatgaagttgtaattgctcttgtcaactgtgctaaaaggggtgaagttgaagattatcaaaattccaaaaagaaagagattaaaaacttcaaagagaatctagaatcattctgggacaatttggttcgtgagtgtcagcatggcccattgtttgatcaagttttatttgacaagtgcatggactatatcattgcactgtcatgctcccctccaagagtataccgtcaagttgcatcattgatgggtcttagtctggtcacatcatacataactattgctaatatgcttcgtgctcaaagagagactactcagagacagttggaagctgagaaaaagaaaagaactgaggggcctcgagtggattcactaaagaaaaggtcttctgatactcatgatagaatacagttgttggaggagatgatgcgcaagatatttactgggttatttgtgcatcgctacagagacattgaccaaaatattagaatgtcatgcatcgaatcgttgggtgcatggatcctgtcatacccatcacttttcctgcaggatttgtacttgaaatatcttggatggacgctgaatgacaaaaatgctggtgtaagaaaggcttctataagtgctctgcaaaatctttatgaggtggatgataatgtgccaacccttggtttatttactgaaagattttctagccggatgattgagcttgctgatgacattgatgtt

SEQ ID NO: 125211 - DNA, 465 bp, Glycine max
  Clone ID: PAT_MRT3847_84076C.1
ggctcgaggtgcagtgatgagcagtgccaaaacacctagataatggcaaccatgctcacactctacattgacaaagatctaggctaaggcttggattacaaacacgagggcttgcttcgccaaagagtcatgcagatcaggcttcagcactggaaccacgctgcaacattcactggctatcatcaatcatctgtggagcctactcatgaccaaatagactatgagcacactggatcactcgcgagacagagaccttacgctatgaacacgaacgtagttcagtcaatgcaaaggcaacagataacagcagatgcatctatggataaacccgaccaaggacttgcgcacatactgcgttcaatggaatacagcaagcatgatattctctgctgacgggtccccaataagggagatcaagaatctgggaacataatgggtaccaatgccaaagagccaatccatgag

SEQ ID NO: 125212 - DNA, 367 bp, Glycine max
  Clone ID: PAT_MRT3847_84077C.1
catctataagatcattaacgatatgaggaagaaaacacgggaagatataacttgaacgccgaagaaactgacaaaatgaaaaatcaattaaaaaaccaaaaagattattattccttgatttttttttcctcctcctcctccagaaacatgacaccactctctagaagtcatgaccattgtaaccaagatgattctccactcttttcgacacgtaatgttgaatattgtcctcaacatactcagcaccctccacgagtgcgatttcacctagagccccagcaaccgtacccacaaacaattctgttcccatacaaccaaacttactcttattcttctgctattgcggcgcgtacccgtaaccgctccc

SEQ ID NO: 125213 - DNA, 312 bp, Glycine max
  Clone ID: PAT_MRT3847_84078C.1
cgcaaataattgctgatgctaaagggtgaacatgtttaccctgataatctctaacctgtatagggacgagaaacatcactattgagcagaaaaataaatgggattccagcttattcatgaaattgctgaagaattacaatatacctgattattgagtatcctacgaattttcgatgcatatgctattgatataatcattactcacattgtcatatatattactattatctttggatgtacctataataatgcgatgacactgagattctaacatatacatataataattacacatatccttttcaagaaata

SEQ ID NO: 125214 - DNA, 241 bp, Glycine max
  Clone ID: PAT_MRT3847_84079C.1
gacacacgaaggcttgatgggtttccttgaaccattaatcaagccgaaatatttgaaagggttaccggcattgacctggggggcaatctgaagcttccagaagaagcactggttgcaaaatgccttggtagaaaaatttgtgatcaatgtggaggaaattttaatattggcttcattatcgtcaaaggtgagaatgggccttccggaatggtcatggcttcacttctttcttctgcacact

SEQ ID NO: 125215 - DNA, 243 bp, Glycine max
  Clone ID: PAT_MRT3847_8407C.1
ggagtcatcacacggagtccgtctaatatccgcattctctgaggtgtaagaatgtggctatgagaaactacgtcagcataagctgctctcagccatcatgcagatggaatcagtgtatctgtcgacaggatcagcaccttgttcgggactgtaaaggttcaagtggatacctattggcaactctggtatggtagacttgctgagaagtaaaatcttggcgctgtgataggctatgcagcaggc

SEQ ID NO: 125216 - DNA, 483 bp, Glycine max
  Clone ID: PAT_MRT3847_84080C.1
gtacttcagcattatgtagggagtccaatgaatgcaaaaggggtgaagggaaatatgtttatttgtggagtaattggaaaaattatcattttcatttatgtttaaacgtctacaaatggtactcatgatatatctcctggctatgctataaagctgatggtttttaactgataagtacttaattttacaaattaaatatagctgataatttttgggattcataagtctggttatatgcttgacaccaatttcttttcttaatctatctcattctccaacacactcaaatgcttggctcttattcctattctcatggttggggctgtttcagtaaccttcggtccgttttgttccgctttcctcttcttccctgtgacggattctccctcgtgccgacctccgtcgctcctccatacggtcctctactcccctgtgaggattttgcccttctgttgtgctttcaggcggacactaggctttgca

SEQ ID NO: 125217 - DNA, 310 bp, Glycine max
  Clone ID: PAT_MRT3847_84081C.1
ttcccgggtcgacccactcgtcacgtacagccgcccgaacacgctccaatatacactatccaatctacttattaacttattaaatagcactaattgagacacttgggctcatcctcttcattattcaaactaacacttccttacatctttcaaaagttttatatccttttctatcattatctacaactccatctatatactccatctatctttcaccagaacctcatttacacctctttttttactcattatcattaccttttctaatttcatcactacacactctacacttaccataactccttaccta

SEQ ID NO: 125218 - DNA, 522 bp, Glycine max
  Clone ID: PAT_MRT3847_84082C.1
ccacgcgtccgctctcattctcattccattccattccattccgttgctatgtttcaaaaccctaaccaaaccctcttagcattctctcttgtgtaacgaattcaatttccgtgatgcctcgccaacctccgccttcacctccgtctcagcctggtgttctcgaccctgcactctggcttgtctgcgccggaaccaccgtggagatccccaccctccattctagggtttactacttcccccagggacacttcgatcaagcctcttccgctccaagaaacctctcccctctccttctttcgaaacccgccgttctctgccgcgtcgaatcggttcaattcctcgccgatcctctcaccgacgaggttttcgcgaagctgattcttcaccctgtcgctgattgcttcgcttcgggaccttccgctggtgctcctgctgctgcttctgcttccgctcaaaccggtgagaataacgtcgtttctttctcgaagggtctcactgcttctgatgctaataacgtggggg

SEQ ID NO: 125219 - DNA, 279 bp, Glycine max
  Clone ID: PAT_MRT3847_84083C.1
aaatatgcatcacgacgctcaattcccctctggctagtggcgtcgttctgctcatatcaacatcatttcgtcatcgattaactgtggatctccaggatccagtgtcgagcatctacagaacttcagcatgctggcggagctttctaggggataacatcggacatgaaagtggagagtgagctatggcatgacttctggcaatgatctttccatgcactcttggacaggctccactcttggaccgaatgatatagtgtatgaatgaataccttatctgtt

SEQ ID NO: 125220 - DNA, 541 bp, Glycine max
  Clone ID: PAT_MRT3847_84084C.1
ctggagttaatgatggcacatcttaattgaaaaagagaacctgaaatggacgactatgcggcacattttcacaaggccaacaacttaacaacactgcctacttaataaaaaagactatatcaataccatagacacaaaattacaatgatccacaatacatatggcaggcagtaccgaaaaggcaaaaagtgatacctaacacaataaaccctagttgttggattactgaagtgcttcaaatatcaacttaatctgctccccaataagtagtgagcgattcgcaaccagttccatctcagcaagtcgcaatttcctccacttgcccttcaactctttcctcttagattcttcaattaacgccaatcccctcttcatctcatcctcattcagttctttgaaaccagatacttcgcggtaaagcaaatttacattcccacactccttcaactccatcgactccagtaagtgttgtagtttcagatttttgctactacattcctgctagtagcatccttctttggagtctcggcaagttttcttt

SEQ ID NO: 125221 - DNA, 348 bp, Glycine max
  Clone ID: PAT_MRT3847_84085C.1
catatatctttgttttttctatttaggaagcatggcaatgccatgggtgggttatttactctctgccactgaacactttctatggagcccgtacttcgtaggtgaaatgcccaagatgcaggcttgctgatgaaacacacaacatactttgcctttggaccattcctgaagagtgcgttttatcatcaaaggaatacatccatggcgaacaatatatatcacacttcttaacagttaaccatcaagcttacttttatgccatagacctctaactacattccaacgacacatttttgttcagtataaatcgcaccatactcttttatatttcatactagcacaaaatat

SEQ ID NO: 125222 - DNA, 315 bp, Glycine max
  Clone ID: PAT_MRT3847_84086C.1
cagacgccttcgggagatatgcagctactccttggatgacgaatgggtttacaaggtccaggcacctgacctgaccgagacttttaagacttactacaagctggtgcagctggacttcaagaatataatcgtgtcaggatgaacactggacttacacgtcgatgcagaggcaaactctatgaacgctggctactacacatggtaaaggttcattatcaaggatccagatgatatctgcacacaaaatgcatgttcatacaaaacagcgcatgagagacaaactgatcacgcatggattcaacattgccgatatca

SEQ ID NO: 125223 - DNA, 1795 bp, Glycine max
  Clone ID: PAT_MRT3847_84087C.1
cagggaatggtcttatctggttaaggagcgactcttcacttgggaggaagtgacgatcgaaatctggtaagaggctgtaatcaatcaaccaaagcaacgatgtcgtggtttacaaggacaatcgcaaactcactcaaactcgacgacgacgacaatggcggtgacctaaaatcccctccgaagaaacccgattcggaacccgttcaacccgattccgcatccacccccaatcccaccacgcgcggcgtcaaagaggatttttccgagctcaccaaatccttttcccgccagctctggggagtcgcctccttcctcgccccgccgcccgatccccaatccgaaaagcccgtcgccgattccaatcccaatcccactgacgacgacgaagaggaagatatcatcgccaggaatccgaaacgatttcgcggagattagtggcaagttcaagagcgggatctccaaaatttctggtaataagacggtatccgaattcactaagatagcttacgagtttccttcagcttggatccgaagagtaatacggcctggatcggaagagcagcgttaccgacgacggtggcctcctacttaaagagcgtagctttgcatccagaaacttggctcgattttccccttcccgatgatgaggattctgatgattttgatttgtccgatgcacaacaagaacatgctctagctgttgaacacctggcaccaagcttagctgctcttagaatggagctgtgccccggatacatgagtgatggtaacttttggaagatatactttgttctcgtgcaccctagacttagcaaaactgatgctgctattttatccactccacaaataatggaagctagagcaatgttaactctggctttagacaaaagaagtaaggaaaagaaagaatctgacttatctgcaggagggaatgttccctcaaaagaggaggaacagcatctctttgtgccaagcactgttcaacttgaatcagcacctctccagacatctgctgctgaagctgccccatctgtggttgtttctaatgttgagatggagaaacatgccactcaaagtattgttccagaggttattgacaagtctgtggttaaagaagcaacggtaaatccatctgcagaacaatcatcatctggttcaaccaatagatttttggatgaatcctatgaggatgatgctgatgattggttgaaagaagaggatacttctgaaatggttggtcccagtggaactcctgttcacactggtaatgacgaggatgtatcattcagtgatcttgaggaggatgatggtgatgtacatgaaagttataaaaaaactagatcaggctctgattcttcaacaaaagactctcgagattgggttcagttaggtagaagttcacctaactctgataaggatttaaactgtgtagaaggcaaacatgttggctctgagcattcaagtgctcgtaattctatgaccaaggattccaatgattggcttaatgttgatgatattgatgtaatatgataatgccttggaatatgtcctagaggtaagtttttttttatttttaaatatgattctcttatattttgtgaatatctgcatatagtcgtgtactctacgattgacattctgaagaatgtgtttctgtaaataaaaccagtctccactgggcattgtgctatgtatggttatttattgcaccgtacataaactaaatcttctatttgatatctgaattccaagttatttgaggttatggcccctataagataaaaacccccccccc

SEQ ID NO: 125224 - DNA, 272 bp, Glycine max
  Clone ID: PAT_MRT3847_84088C.1
cgcgagctgccgccctttttttttttgtttttttggaaaaaatttgactggattagtttaaatttaccaacccggatacgatattcccttcacactgatcacccgtttcaaaaagggttctctacctggttaaaatagggggcaaacaaggaaccccttattagaatgggaaccccttattctcaaacacaaagtggttatttaacaacccggttagaaggttgatggtcctaccatcttctataaaggccctcttaattaatttttaaaaa

SEQ ID NO: 125225 - DNA, 1013 bp, Glycine max
  Clone ID: PAT_MRT3847_84089C.1
aaacggcgtcgcagggaatggtcttatctggttaaggaccgactcttcacttacgaggaagtgacgatcgaaatctggtaagaggctttaatcaaccaacgaacaacgatgtcgtggtttgcaaggacaatcgcaaactcactcagactcgacgacgacgacgacgaccacaatggcagtgacctaaaatcccctccgaagaaacccgattccgtatccacccccagtcctaccgcgcgcggcgtcaaagaggatttctccgagctcaccaaatccttttcccgccagctctggggcgtcgcctccttcctcgccccgccgcccgatcccctatctgaaaatcccgtcgccgatcccaatcccattcccaccgacgaagaagaagaagacgtaattgcaggtatccgaaacgatttcgcggagattagtggcaagttcaagaacgggatcttcaaaatctccggtaataagacggtatccgaattcaccaagatcgcttccagtttccttcagcttggatccgaagaggaacacgatctcgacggtgtcctcggagttacagaggatgtggttgccttcgccagaagcgtagctttgcatccagaaacttggctcgattttccccttcccgatgatgaggattctgatgattttgatttgtccgatgcacaacaagaacatgctctagctgttgaacatctggcaccaagcttagctgctcttagaatggagctgtgccccggatacatgagtgatggtaacttttggaagatatactttgtactcgtgcaccctagacttagcaaaactgatgctgctattttatccactccacaaataatggaagctagagcgatgttgactcaggctttagacaaaagaagtaaggaaaagaaagaatctgacttatctgcaggagggaatattccctcaaagaggaggaacagcatctctttgtgccaagcaatgctcaacttgaaccagtacctctccagacatctgctgctgaagct

SEQ ID NO: 125226 - DNA, 366 bp, Glycine max
  Clone ID: PAT_MRT3847_8408C.1
ttttaaactctctatccaactctttcgcccttctacgggcttattcccctctaacctacactcttattcattatgctctgttacatctttcacatccttgctcacattccatccactgtagttgctcaaacaatctgtgtacaaaaaagcattgtatttaagagaagactagtgccttttggctagaacctcttgactccagaagtttgtgtttatagaacggtgtccctgccctgaatcttcttgcattgtgtacacatgtgccaccccttgatgccgaggctcagagtcttccggcgctatgcatagcatttctttttatatagagtggaggacactatcgctgttgcctttggcaaaggagga

SEQ ID NO: 125227 - DNA, 368 bp, Glycine max
  Clone ID: PAT_MRT3847_84090C.1
ttgaaccacgccacaacaggcaaaaccaacggggggttagggtcatgtaccaaatgccacaacacggagggctgaagggcgaccatacacgcaagcaaaggggaatgaaggcccagaggcaacaagaccaggagacaaggaaagaggagcaaaaagaacaaccataaacaatatgaagaccagaagggcacaaacccggcacagcaggcccacgcaaaccgggcaccaacgctaaacccaaagcacagcaaaccgaatgcaaaaaaaagggaacagagagaacaccaacagaaccaccaacccagcaagcagagacacagccaaaccaacacagaaccccaccggcggagaaactgaagaggacaaaa

SEQ ID NO: 125228 - DNA, 646 bp, Glycine max
  unsure (1)..(646): unsure at all n locations
  Clone ID: PAT_MRT3847_84091C.1
ccacgcgtccgattggttatacaagagaaaagttgtaagatcctcgctttaattgttaggtaatacaaacacaagaattttcacattttaatacaaaaaaaaattctcggatttgaatcaaataacagatctgttgtatacttgtacaagttaaccttcccagttattgcaaaatttcaccgtttactgattatagtgtcaggccaaaaaatcagaatggcattgtgtcaaatggagaagcatcaaatggaaagaagccatttaccactattgatgatgttttgataggattggtaaaatggctttgtgatcaggtatgtgatacaggaaattgtttctttctcactggatcaactgctaagagtaattcacagacatgtcaacaatcaacctaatcacatcaacttatggaggaagatgccaaactcttgacatatatgggagttagtaagatttgcaaggacacattatttgcttgaacttgaacaactaggttataaattggaccatggaatcaattaaaccagatggcataaaaatatgcactcagatctataggaagtttatgaaatgttttatgtgaataanaaacttgcatgttatatcctaagatgtgagtagattcaggtctatgtaatatgcatgc

SEQ ID NO: 125229 - DNA, 467 bp, Glycine max
  Clone ID: PAT_MRT3847_84092C.1
cacacgcacgcgtgctcggaattgggctcgagcaaaagcacaaatggagtggtcaactcttgagtgaatttatgaaaaaaccttatgagtcatatacgggaagtggaggtccaccactattagactcgagtgttcaaacagatttcattgatgcttacaatacagaaaatattgacaaagaggagataatggctttgaatattgacagagaagagacagcgattttggttgcggcaagaaatggcataatagaaatggtgaatgagcttatatctaaaataccaagtgccatacatgaaactaactccaagaagaaaaatgtgttacttatagcagtggagaacagacaaacccttattgttgaggaattaaaaaatcgatttggagagaagaaaacaaaagtagtcttgcacaacctaattctaggtgtagacgatcaagagaacactatgttacacctggcagca

SEQ ID NO: 125230 - DNA, 455 bp, Glycine max
  Clone ID: PAT_MRT3847_84093C.1
cccacgcgttcgctcacgggctcgacaaaaaaaagtgcttggcttgcgataccataagaaaaactttctattatacagtgagtgagtgagtgaccctttgatttgaagaagatgggagatatgggtcagaaggcccaagaagctaaggagaacacgaaaggggcggcccattctgcaaaccagaaagcccaagaaaagagtggtcaaactaaagaaaaggcctctgagataggccagtccaccaaggaagcggcccggggtgctactgaggctgtgaagacaaagactactactacccaacccagcatcgcatagaatacaatactagttaatttcttcaatatatagtttaaacactctatgtttttcaataagttggggcttcgctcttatgtgcccaaaagagagcgtggaatgtactctactctagagtttctattatctagtttcaatct

SEQ ID NO: 125231 - DNA, 131 bp, Glycine max
  unsure (1)..(131): unsure at all n locations
  Clone ID: PAT_MRT3847_84094C.1
agcctttggcangaaattgaaggctngggaatttaactngttgggaagaagggaagcccattggccattgttcaaccctaattaagcttcccaacaaggcattccaaacaaaacangttcaacaaaaccca

SEQ ID NO: 125232 - DNA, 386 bp, Glycine max
  unsure (1)..(386): unsure at all n locations
  Clone ID: PAT_MRT3847_84095C.1
cnngctcaggcccnncngngcnngccnntntcgctgcnggcncnnccggcggcgnccctcntcacgnngcancagcgccccnntcatgncgacncacactctctnctnncttagcnnncnngccgcccgccgntcanncncngtccnnnncgacgngncganccgnnagaanangcctcngngcagngcagcgncanncggnnngnccnccggctaccnganacnggtagcngnannncnacncacgannnagcgnggncccntgncgnngcgagnnacnaggcannnncanngngagcgagncncnnncgccctangcgcgncagccncncnnangcaagcngtgacatnntncaactcagangnannnanngccnnatctnngn

SEQ ID NO: 125233 - DNA, 358 bp, Glycine max
  Clone ID: PAT_MRT3847_84096C.1
cctggacggccgtccacccactcgtgcgcatgttagaatagtagatcttacccgaggatgacattgatgatgggtccaggaaactgttggcccagttggcagaaaaggatccgaaaatctctgcctttgagctgcaaaccatcctgagaagggttctagcaaaccgccaagatttcaagtcagatggcttcagcatcgaaccatgcaaaattatggttgacatgctaaattcggccggaagtggcatgctggggctgaaggagttctacattctctggacgaagattcaaaaataccaaaaaatttaccgagaaatcgacgttgacaggtctggtaccatgaattctatgaaatgcgg

SEQ ID NO: 125234 - DNA, 893 bp, Glycine max
  Clone ID: PAT_MRT3847_84097C.1
ccacgtgtccggaaagaatttgatgaatttaaggaaaataggaatagtgattcaaattcagttcagcatgctaaggagaatggggattgtgcatctcattctgttgtaaatagtggtgattcttctttatcaaagtcacgaaggcagcataggaagcgaaaggcttcagctatagatagtactaaggtttccaaggaggctgaacctttggtttcaagtagtaaaatatctgacgatttgcaagatgaagaggaaaatcttgaggagaatgcagctaggatgctatcttcaaggtttgatccaagctgtactggattttctatgaaaggttcaaatggtttgtcctttttccaatcttctagtcaaagtattgttaaccacagtttgaagtctccgttaggttcagaatcaacatcagctgatactgctggcagagttttgaggcctaggaaacaatataaaaacaagggtgattccaggaagaggcgccatttttataaaatccttttaggtgatgtggatgcatattgggtactgaaccgaagaattaaaatcttttggcctttggaccagagttggtattacggtctcgtggataactacgatgaaggaagcaagctttaccatatcaaatatgatgatcgagatgtagaatgggttaatctacatactgagagatttaaactcttgttacttcgtagtgaagttcctggaaatgcaaagggtgaaagagccttaacaaaacgtaggagttctgatcaccaaaagggaagcaaatccagtaaagaaaggcaaagaactacagaagatgatcgttgtggtgagagcagtatggactcggagcctataatttcatggttggctcgatcttcttatcggcttaaaacttcttt

SEQ ID NO: 125235 - DNA, 946 bp, Glycine max
  unsure (1)..(946): unsure at all n locations
  Clone ID: PAT_MRT3847_84098C.1
cgtgaagttatccttgtcaagtaccaattatttgtcatctaaaagtttagtttctaaggctaatgccttagttggtacacaaaatgaatctacagctgcagctagttgctttacttcatcagctgttgataatgtctccaaaagtgtcagtaatcatgggagaatgttgaatccaaatggtgaaaactctgttgccagggttttggccagggtggaatccactgagctacagggtttgaataagcctttgttgcaaagcttggtaaaaggtgatcaccctgaaatagcttttttgctgagacaattgttaattgttttctcatctcttttgaggttaaatttgctgaaagatgatggtttcttaccttctagttttgtacctactttcattgaaatttcacaagtcctgttattagaatttacagagatggttgtggtcccacaatattctgctttgcttttgttagatggtgcttgcaactatttgagagaattagcgggttattttcctttcactgatcctacctcctctaganaagtttacacaaaattgatacagattcacatgagggcaataggcaagaccatttcgttgcaaggaaaaagggcaacactaacctttcatgaaagacagtcaagtaccaagtcacttcataaaggatcagttgaagcttattcttttactgaattgcactgcttttccttggatgaatttaaaattgggctgcggaattcattcaaagcatatatattagaggccatctgaattgcatcttttgtctactatacaggccattgagagatctctagttggtattcaagaaggatgtactgcgatttatgatgtaatcctatttttttttactagaacatttatcttttttggttaatgatggattgaaataatggtaccggacaatccctcaataaattgaatttataaact

SEQ ID NO: 125236 - DNA, 244 bp, Glycine max
  Clone ID: PAT_MRT3847_84099C.1
atctctgttgatttgatgcaccatgggcatggctgtcatttcacatgttattacacattgttccactacattggagtgattatgtttgatacttatgggaatacatatattataacgggtgtgtataatacaaaaaatatatacttatacaaataaatagggggggtttttttatatgatccaatcttatttacgcgtgcttgctaatttatttattttttatagtttcacttaaattcaattt

SEQ ID NO: 125237 - DNA, 454 bp, Glycine max
  Clone ID: PAT_MRT3847_8409C.1
aaatcatgaaataaaaatgattggctttgtatagtataaagaatggtagaataattgaattggctttgtagagcatatatagttaaaacatgaaagaatcaatctatctatttcaacaaaaatacatgactgaagaaaatcaattcctgtctctcatgttttgtgtcctcattctgctactacccgatgatccaccctgacccttttgtcccatacgtctacgagaccttgtcttcaactcaatcatttgctcctgaaacctactttcccatctctcatgttcactactaacactcacacttccccatctctcatgatgatcactactaacagtactcatctctgtgcttcccaaacccaattcactgtcatactcttctcgaagccttggattggacaaggtcttgtaagctgtgtttagctgaacaaacatcctcggtgattcctctttcat

SEQ ID NO: 125238 - DNA, 1475 bp, Glycine max
  Clone ID: PAT_MRT3847_840C.1
ctcttttcaattttcaactctctttggtatttaacttccaccccaactctccttagacttgtgcatttcctgttggctcccatagagtgtggccgtcacatcccaggatcattatgagttgtggctgctttggagcctcaactctcaagaggaaaaggaatccttctcgtactcctaatgagattgatggctttccacttgataatgttaagaatttctctgataaagacctgagactggccactgataactataatccaagcaaaaagctaggacgaggaggttttggtactgtttaccagggaactttaaaaaatggacaacaggtggcagtgaagacactttcagctgggtcaaagcagggagttcgtgaatttttaactgaaattaaaactatatcaaatgttaagcatccaaaccttgttgaattggttggttgctgcgttcaagaacctaatcgcatattagtgtatgaatatgtggaaaataacagccttgatcgtgcattactaggcccaagaagttcaaatatcagattagactggagaaaaagatctgctatttgcatgggtactgcaagaggtcttgcatttcttcacgaagaacatgtgccacacattgtgcacagagacatcaaggcaagcaacatactacttgacagagacttcaatccaaaaataggagattttgggttggctaaattgtttccagatgacatcactcacattagcacaaggatagctggaacaactggttacttggcaccagagtatgcaatgggtggccagttaaccatgaaggctgatgtatacagttttggggttcttatacttgaaataatcagtggcaaaagcagtgcaaggacaaactggggagggtccaacaaatttctattggaatgggcttggcaactgtatgaagaggggaaactgttggagcttgtggatccagacatggttgaattccccgagaaagaggtaataaggtacatgaaggttgcatttttctgcacacaagcagcagcaagtagaaggccaatgatgtcccaggttgtggatatgctgtccaagaacatgaggctgaatgaaaagcaactaacagcaccagggttgttccaggattcaggagcttcctctcaaaagaagtcatcctttgaatccactggctatcaatttagctctaacccttccagtattactcagttggccccacggtgaagcataaaccaaactttggatgtgtgaatcgcatagttaatattatagtaggaaaggagaaaaaaaaatagagagaaagaacaaagagggattatcttcttttttattttagatttttctctttttggatcttatttttaagaatgtattataattataaggtgggcttggataagtattttttgaaaaaagtggttttatgatattgcaagggtgtataaacttggtgacactaataaaatttcaaattaatccccc

SEQ ID NO: 125239 - DNA, 355 bp, Glycine max
  Clone ID: PAT_MRT3847_84100C.1
ctgcatacatgacagttcatttcattttgctgagagccaaaacaaggagcgcagaatttgtttcttaacactcaaactgttgagtaaatccaaccttttgaaaacaacaaggagttttttgtggatcccacatggcaattcctttctgacgcaacatggtaaacatgcaaatgggggggttaaaaataagctcccggcctatcctaagagaaatcccaaatggggcattcgccattgaaactggaaaatgtagaggtctaaacaagcatgtaattccatcactacttaaagaaaccaacacagtgaacaccagctacttatggcctaaagctgggtgggatttctgttgattcca

SEQ ID NO: 125240 - DNA, 393 bp, Glycine max
  Clone ID: PAT_MRT3847_84101C.1
gaaggtgcaggagtttgttgtgagctataagctagtttatcgtgaggagaatatgaagttggttgttttctttgttgctgcagtagtttgggtagcatggcgatgccgtggggcaggctaccagaggttgggtctccgaagtgggactggctatggtgagcgttcttcggaggtagaatgcgcagggtttaggcggtgctgtggaagcacacaacatccgagccttgaaaaccattcctgaagagtgcgttgaggcaacaagggactacaggaatggcgaacagtttagatcagactctaaaagagttaaccaacaggctttcgtttatgctagtgagcgcgaagtccatcagagggacatatttatattcggcatagataacagcgtactcg

SEQ ID NO: 125241 - DNA, 241 bp, Glycine max
  Clone ID: PAT_MRT3847_84102C.1
ggctcgaggagcctcctgaacattggaagcacactctatccctaatccctatgttctaccctgctgtcaacggacgctaagcctactctgaactgaagtgtcgaaggcttcatatgcgtgcaatgacctgctgatgccgatgagaacgtgaaagtgtcaccttaaagatccttgtaaggtggatcatgctactatccatttaagagcaacagatctggacagaaaggattttggatcttat

SEQ ID NO: 125242 - DNA, 126 bp, Glycine max
  Clone ID: PAT_MRT3847_84103C.1
tggtgacggcgctaaaagatgataaagatgagtttgaacgacattatgatcatgcgatacgtctgtttgttgactcttttccgtgaaggggttaggggtgcatgcatcgccctgatattctccagg

SEQ ID NO: 125243 - DNA, 452 bp, Glycine max
  Clone ID: PAT_MRT3847_84104C.1
gaaaaagtgttgtttgaaatttaaatcgatgccatatcaatgtgaagatcgaagagtcacagtcaccatgacggcagattcaacgccgctaagaacactagtatgaacacaaaacatgaaaaagttgaattcagattttgttatatggtaatctcatcgacataaagggaaacacaggtatttgacaaagtcatttgaagcttatctatttttgtgtgcgtgccacaccggatgctgctttttgtttttggtcgcagtgattacgcaactcaagtttccacctttgacttatatagctgtccagtttccacaccacgcgattgaataattaatatttgaagattctgcttctccaacttcctttcagcgcttctggggtaccttgtggtaatctctactaagacatatatagtaagctcttccccccttcaatattttcttcatgatctttt

SEQ ID NO: 125244 - DNA, 246 bp, Glycine max
  Clone ID: PAT_MRT3847_84105C.1
gcgctccgtttgggtacagaatacaaacaaacaactctcgcacccaaaataatcgagaaaagaaaattagatagagagaagaagaaagcgtatctggaattttcgtttcgttggtgtgtcgtgtcgtgtgacggttcttttctttgagactttccttcaaattctagattgcttccgattcttttctttcccttataaccaccaacctctccctttcccccttttcatattcttcctcgattgtcc

SEQ ID NO: 125245 - DNA, 449 bp, Glycine max
  Clone ID: PAT_MRT3847_84106C.1
cttcgttttttttttttttttttatttttttttttttttttttttcaacaaaaacatgtaaatttttcatattttggaggggcactttaatttcagtagaacaacaagtagctggccaagacacaagtagaagcccccaaggtgatgcaagaaacaaaaaactcgagccgaccccaaaaagatcacttccaccctctgatttcactgcctaaaagaaggaaccctagggtttcagcgaaacatccgtcaatgtgaaaaaatgctttgtaaaaacagtcaaggactctagcgaaacataaacctaaaaaattccaaaacatctttagtccgtgctaaaacccaaaagcggtgcggaaccaaaccaaccatttggcataacggaaatttcccgagtgatcttatagctttccaaacaatttccacagaagggaacttctccgacccaaaaa

SEQ ID NO: 125246 - DNA, 319 bp, Glycine max
  Clone ID: PAT_MRT3847_84107C.1
ccacgcgttttctttgggcgcgatcacaggttgccgcaccttaaaaccggaaacaaaagcaatcgatacttgactccaagaaggaaataagttccctcctacttgtttgagttcgatttcttaagggaaagaaaatcactctctgtgctggtcacagacttcgtgaatcaatttcttttccactcctggtttatttgctgaacactctcctatgtgatataggacttccagtcagatttaaacttcttctgtgtctttctcactcatatggtaaattttaagttcaagctggcgaaatctgggattagagctcccactg

SEQ ID NO: 125247 - DNA, 482 bp, Glycine max
  unsure (1)..(482): unsure at all n locations
  Clone ID: PAT_MRT3847_84108C.1
ccagtgcgtgagtgtgaagattgaagaagctctttgccattcaggggttgttccaaacaccaatgggcgaagtcatgaacgtgcctcccgaatccctcgacaaatccccttcctcctccgctccccctccgcctccgcctacgccgccgcattaccctccccggcgaagggaccggcgagacgacagggatttcgatcgccctcccaaccgccgcggcgattactatgaccggaacgcgtcgtccccgtcgtcaccgcgagacagagacccgctgccaccgcgagacagagaccgagacagagacagtgacctcaagcgccgccggagccccagccctccccaccgcgaacggcggcattctccgcctcgacgcttgcctccgccgtacaagcggtcgcgcaggggcagtcctcgcggcggatacggacctgatgatagcagacatggatatgattattatggtggntatgaacggggaatg

SEQ ID NO: 125248 - DNA, 456 bp, Glycine max
  Clone ID: PAT_MRT3847_84109C.1
aaccagaacaactgggtgactgaagtgatgaaggtggccgttgcttatgctcagatcacatacgaagaggaaggtctctgggacattgatgtgaatattttcttgtcggaggaagccaatgtcacagccaactacacacctcgcactgcctgtggtgaccttgtcatcaaactcggcgagtggctcaatgcggccactgtggaaggtctgctcacttatacgagacagctttacatggagaactcaagctggaagaccaaggaagcggcactctaccttctgaaccagctgctcagcgatttccaggatgtcgagaaacagattggctctgattcggccaacggttatgtcgacttcatcaagcacgctcttcaggaggaagaggtcttccttcgtgcccgtggcttccttgtcgctggtagcctgaccagaacatcgggagacgctctgatgcct

SEQ ID NO: 125249 - DNA, 469 bp, Glycine max
  Clone ID: PAT_MRT3847_8410C.1
cagatagcagttcagcaacatacaacagacagttggatgtggaaacctgaccccaatgccactactccacaaagagtgcgtataatctgttgcagggagaaacagcggaggagaacttggatggagcttttgcggacctatggaagctaaggatctcaactaaaacatcaatctttgcttggcggctaattagagatcgattgccaactaagtccaacttgcgaaggagacacgtagaggtaagtgatttaatgtgccctttttgcagaaataaggaggaggatgcagtccacttattcttcaactgcaccaaaacactacctttatggtgggaatctctatcttgggtcaacacctcgggcgcattccctctaaatccgaggcaacactttctgcagtatggaaatgggatgaatggagggataatatgcaacagatggaagtgttggtgggtaactttaacttggtc

SEQ ID NO: 125250 - DNA, 626 bp, Glycine max
  unsure (1)..(626): unsure at all n locations
  Clone ID: PAT_MRT3847_84110C.1
acccaaccttaaaaggggagggggcaggaccccttatcccaaaaaataacatcaattcttaataggccccccctggctaaaaaaaaggcgggggggacaaattggggtttgggcagaccttcccaagagggaaaagggggggaaaactgggaaaaggcaaaccccccccctctgggcccgatttcagggtgggcattaagcccaccccctttaacaaagggggtggggggaaataccccctccccctataccaccgggggtttgggggggggccccccggttccttttcnaaaaacagggaatctggttcctccggggaaccaagcggggtaggtttttggggggggcgaaccccctttttaaaacccctccccaaattgggggggcgggctttttggggtcaccccctcctcctatcccaaaggccttttttggggggggctgggaaatccccccctaattgggccccggggcgcgggtccggcaaggggcccgggcctttgggggcccccccaaaaaaaccggggggggggccacccccccggggggggttcggggtgcccccgggggggggcccccgtccgccttgaacccgggggggggggggcccggggccccccgggggg

SEQ ID NO: 125251 - DNA, 481 bp, Glycine max
  Clone ID: PAT_MRT3847_84111C.1
tctagctatctcgatcgaactgtccaaggtcctgtcacttgtctacggttggcagtgtgttgtgtaacagctacagaggtcgcaaaatgggcattcctaacattagtatttggcaccgccaagttgttcatattaggcataatcgaaaactgaacaggtaacataaccaacccgagtttattgcattactacacatggagtgggctcccgaaataatggcaccagccgtctatttggcttgaggataatagttaaaaccaagtaatttgttagtgtcgctggtcttgtaccgcgcctacgtaaagtgggcgtaacatgggcattccaacattagtatttggcacgccaagttgtcatattagcagaagcggaacgttaacagttacataacacctagtttgtacagactacacgtcaggggtagccgaaataatggcacagcaacaatttggctgcaggatataggacaacaagttatttg

SEQ ID NO: 125252 - DNA, 594 bp, Glycine max
  Clone ID: PAT_MRT3847_84112C.1
accagcacgatcttgcctcattaaccttcgctgctcttgagcttgcagggcatgtagcacttctgccaatgtgattttcgaacggctgcgagaagacgacagaagggctatagatgcttcatacctctccggcaccgttaccaaaattttctctacaattcttgaatcagcaaaatcacttcccaacaactttatcttgttggcaatacccaacaatttgtttgagtattctttgattgtctctgactctttcatcctttgaagctcaaattccctccttaaatttagcacttgcatgcttcgtattctatcatctccagcgtattcctctttcagataatcccaaattgctttggatgatttaagagtcatgattctgatgaatatcatttgtgaaacaccagtgaacaaacatgacctcgcctttgccttcttcatctttctttgcttgtgatttttaatttgggccgtggtgggatatttcggcagcggatatatttcataatcctcttccacagcatcccacaaatccaaagattccatgtaggattgcattttcactgctcatagatcataattctcttcctcaaagat

SEQ ID NO: 125253 - DNA, 403 bp, Glycine max
  Clone ID: PAT_MRT3847_84113C.1
ggcggaccacaggcgtccgccacacgcttccgccaacgcttccgcccacccttccgaaaatggagccttaaagatttttggggggccgcggaaagtttaattttaacctttcggttttggaggtcagcgttggacaatgttgttggggggaaattgaagttgaagggaaaagcactggttgtggttggtggagtgaagaataggaaaaggaggaccaggggaattcgggaccaacttttgcaggtcgccaagaataaagtttaagcagggggaaatccagaacaggccaaagatcctaatgatggagatttaaattgttgtgggggaattaagcgggaaggggaaaacagcccattttgatgatcattttacaccgccgggagggcgttccataaagcaaagg

SEQ ID NO: 125254 - DNA, 333 bp, Glycine max
  Clone ID: PAT_MRT3847_84114C.1
taaacaaactaactctaagagggagacgacacaaccccccccagtaagggttacggtacactcctacgaaacgtcggacgtctcgaagggctccgccggcgcgtcaaacaatacggacgagggcgaaatctatactaataacgtaattcctccctttaacaacctttacagcttcgtcctcacgttcgcaaggaactgtctcgccggaaaacacactagtagccgtatctacaagaccaaaggctcgagccattaaatcggtcccactgacagtaatccgcatccgattaccaatcccggtaaaccatacgttcaaacaaaccaacccattaa

SEQ ID NO: 125255 - DNA, 856 bp, Glycine max
  unsure (1)..(856): unsure at all n locations
  Clone ID: PAT_MRT3847_84115C.1
ccgggtacgacccacgcgtccgcggacgcgtggggtgattggatcgaatcatttgattccatttcattcatgtaaaatggagttggattaatacatcatcacaaaagtgctagtgctactgagtttgagctggtacagtggcaggtgttgtgtttgtttgggattgaatagtttatttagtatcaaaaaagaagaagaaaaaaatgttgtcacaactcaccacacacccggatgacggcgaaggaaagtgggtagcccgttgaggttgagagatcctgagcgtccattacagaaagttgaagcctgaattgaattcaaggtggaaggaacgcaacttttcatttgagaatcagccctgtctctgtatgtgttggactcgatcactgatttagttcatatcacctaacaacgctaacggactatctaactatgaaaaaaagagagctgcggaatgacaattttgctcgatgcctcagatcggattgcttatagatccagtcgtcgattcgcgatctgagctgcagactgataattaaaaaccctaatcccggtatacagaaggtgcgtcatgcgcttgcgcatgctaggttctcttcttgcgtngttgtcagattgatggtactatgagagatatgcaccgggattctactggtagtactaataacaacactaataagataccatcggcactgaggctgtcctcacctcaacaatctctaagacgcttgggattgtgttcccagatagcaacggnggagcactcttctcctattgtcttccctgaaaaacgtggcaaagtcaaggcttccaggaagaccagtgtccccactaccattcgtncagatgatcaagacat

SEQ ID NO: 125256 - DNA, 140 bp, Glycine max
  Clone ID: PAT_MRT3847_84116C.1
ataattttaaaccccacgcgcacggtgccgcaggcgacaacgtgaaccaaaagctacagcgacttgacagctagacgcaccaaaaaaccggctacaaaatcgagtgcgactagggtaggaaaagaaaacaactccttgcg

SEQ ID NO: 125257 - DNA, 633 bp, Glycine max
  Clone ID: PAT_MRT3847_84117C.1
aacctcctaagaaagccccgacgtagaaacccattcttcaacagcacacaaagcacgtcgtcaaaatggcctctcgtatctcccgccgattcctctccaccaccgcccgccgcttccaggagcaccagaaggctgagctcaagaaggagtctcgtcgcaaccctgagattctgattctcggtggtgttatggttgctgcccttggcggtgctggctactaccctggccgatctcctactggcgctacctccgagtctcccgtcaccattgctactcacccatgggagagcggcagctctggcaagtaccagtaccaccccggcggtgaccccaacgcagctcccaaggacgctcccagcgctctcaacgttgtcgtcgttcccaacgtcacccttcccgccgagcttcatgaaaagtacaacaagtggggcaaggacggatacccttaactcacgagtttggaatgatgttggagctggctacatgaacaagcatgtattgtagggaatgaggggagagcttatgagttggatcagtcaggtctctcgcgccctgtgtagaaagaagaaggacaaaatgggcttgatctaagcaaccacccatagttcacatacgacgcgccgcgatttttct

SEQ ID NO: 125258 - DNA, 887 bp, Glycine max
  unsure (1)..(887): unsure at all n locations
  Clone ID: PAT_MRT3847_84118C.1
gtttatcctgtcctctttggcatgcaactatgaattttttctgtccaatttcactatcctgcatgtccttatagacctatatgattatttgggattttctgttacaactttttcctcggtcctttttcttccaactataatgtccttattggagatttcataaaaacatatgcatgtctaaattgttaatcagtttagtaagtcgtatgatatgatgagcattgaatcaccctatgtgaaattcatggatggtttaggcttttggtccaaataaaactaaatgattatttgggattttctgttacaactttttccttggtcttatttcttccaactataatgtctttattggagatttcataaaaacatatgcaccccttatgggttaggccgtgtagggggtcttctgaggcgacggccattggtgcgccctgcgtggtgctcagggaggggctgggcgtttggtccgaagaaagcggtgctgtgtggggcgtcattcgcttttgggtaggcttggctgcctctccctgctgggcgccgggtttctcggtcgcttgattggtttgctttcggtccccgttgcggtatgggcttggttgccattgccctgggctctagcaatccacgggggatgcagggcccttagtgtgtggccgtaggatactagggacgctgcgcgaaataagagaggagagaatcacttttgggtagttttgggtgtctgtcgctgcagggcggagaatttttcaatctcttgatttgtttgctttcattgtcagatgctatattagctttgtaaccaaagcactgttctctattaatccacagtaaattcagttcctataaagtatattcatagaatactagaaacacnncacgaaagttca

SEQ ID NO: 125259 - DNA, 448 bp, Glycine max
  Clone ID: PAT_MRT3847_84119C.1
cttgtgttatctactgttactgatcctttagatgacttcaagaaagccgtagtatccatcatagaggaatatttcagtaatggggatgtcgacttggccgcatctgatctcagagaacttggatcaaataaatattatccatacttcattaagcgtcttgtatccatggccatggataggcatgataaagagaaagagatggcttcagttctgctttcagcattgtatgctgatgtcatcagtcctgcacagattagagatgggttttttatgcttattgaatctgctgatgatcttgcagcggacatactggatgcagttgacatccttgctttatttctggcacgtgcctgtgtggatgacatcatttctccagcctttcttgccagggccaagaaggctcttccagaatcttctagggagttcaagtaatccagactgctgaaaa

SEQ ID NO: 125260 - DNA, 451 bp, Glycine max
  Clone ID: PAT_MRT3847_8411C.1
ggaagccggaaaatcattactggatatttcataacccaaggtccattaatttttggaaaccaattcatttaaaagatcaaaccactggccaccgataccaccgttcataaaatggaaattattatgccctaggacataggttccgaagaaccgcttttttaattaaccaggggatttaattcaaattccaaatggtggattgttaaaaagcagtaaccttttccagccaaccaaacaaaatccacaagtaactgggggcgaaagaaagaaaccccggccaatttttgggccccaacgggcctttggggaaaaaactggattggaactggccccattttaaaaggtacgaaccaaacaaactttataaaggtttgccacccttaaaatttggcataaaacgggcaaccccccccatgaaaatgggaaaatagcccggaaaaaacttgggttt

SEQ ID NO: 125261 - DNA, 1128 bp, Glycine max
  unsure (1)..(1128): unsure at all n locations
  Clone ID: PAT_MRT3847_84120C.1
ttcttaaccntaggccccaccactcttattacctcttcccgcaccccatcataagccgcgtcgacaaggaaggtgaattcggagccggagtcgaccatggtttgacccgacccgccagcgttgggtcgaaaaacagaaggtgggatgttgagttttcttgccaccgattcttattccttgcatggggacggtgtaggctaatgggtctagattcggcatacgttgactttgagggaaggtcaacatgctgacgtagcggaagcgcgcggagtttgggttgtttccgaggtagaacgacccggttgggaggttgttgtcgttcgcggcttgtcgggtggggacacagtacgagaatttggtgactttggcttgcgaggggaaggacaagcggccgaggttcattccaagaatgcccctggcgtcgctggactcggtggcgcagcctagaataagtggaggggtagtttgggaaggggagaaggtgagtttttctctgacgaggttgccctcggcgtaggtgccgtcggcgtagaagtatgagtagtggcagaggcggttctggtcgcaggttgtcgggagggtaaaatcgggaacgcggggtttgcagagagggtgggtgcaaggaagaatatagaaggatgaagagagtgatggatcaaacgacgccgttggagggggttttgttgtggcactgaatccatgagagttggcttcctgtgtccaacaccatttgttgatgctgtggaggggttcctattggtagagtaaccaccagggccatggagtatttgaacgaagattttatgttgtaggaagaagaagaagaaagggttctgagatttgggtttctgtttagaggttttgctgtggagagagggagtgaggtgagtgggaaagagagtgagagtgaatcgatggtagggttaagtttggcggagaaggaagtggagaagaagaatgaaaagagaagcatgcaaagttgaaagagtgaaacaggggaagacagagccatcgaggaagatatcatttttattttttgttttcgaatggagagtggcaattttcgagccttggtctttctgatgtggttctcgaatggggtcgtcttgtcgtagtcgtctagacgcg

SEQ ID NO: 125262 - DNA, 552 bp, Glycine max
  Clone ID: PAT_MRT3847_84121C.1
accgcggcggcggccgctctagaactttggatcccccggcctgctgcctcaatacaagtttcttgttcatcttcatgggacgtctttactatcttttcgtgtaattatctcttatatataatatgattatactaacttcaccatttgtgttcagaacagaaaagttgttaagtgaattaaagtcatgatgggccatcttagtcgagagtcgagattccctcaagataagtcccaatggccttagcagacttgggatattttattgtagttgttttgtcatcacgccatacaggtgtagttggaataatgcctttgtgattttagagtcttgttcttagaattgggcctctctaacagtcctttctagaacattagcttctttttttacagatccttttatcgtatgttaatgttgaatggtataatacatgcaaaattaagactttgtttagtatcgtagtagcttacacacaagttctgaataataacccctctctctccctgccccaccaaagtagtgtaaattgaagtgtacggtgtacctagtcactt

SEQ ID NO: 125263 - DNA, 402 bp, Glycine max
  Clone ID: PAT_MRT3847_84122C.1
cttttgagttccactaccaatggtgattttgttcaaggaaaagatctcgcaatgggtaaagttaatgtagcatgtgctgctggtggcttgaccataagttacacttcaacttcattggtggaatctgggttggaaaaaaaacaaagggttattgggggggattttgggagggatgtttacgttgctcaataccattaataacccccaaaagaaagattggttggagggaaatttttcctttgatattaaatctcgctttaaatgggaaaaagtttcctttacaaaagcacattgtgagagggaagacacctcaaaatgacacaaatggggcgggggcacacattttagaagatatttctgtgaagggggatcacgagaaacccccaaagattgttgccccat

SEQ ID NO: 125264 - DNA, 297 bp, Glycine max
  Clone ID: PAT_MRT3847_84123C.1
cccactcgtccgaccactcttcccatttcttatcatcttcaatttatatgccactcgggagttattcactataaagtatcaccacccttcatctcaccctcaatctccacactgttcaccaataacttcctaaataacagatccaccacaattgtttctcattacatctgttagtgaaaaaatctattctcaaacaaaattcaacaaatgccactccggctttacttatactattgaatgcaaaaaacatgaattctaaccaatctctcacaaacatgtgtgagaacttctacactt

SEQ ID NO: 125265 - DNA, 311 bp, Glycine max
  Clone ID: PAT_MRT3847_84124C.1
atgtctgattcatacattatatatattctgaaatactctacccgttaggggaaagagattgcgtgtaagtgagtgagtgttgctggtaaaggcgacggtcctgctatcctaatcgatttgggaacaacgaaatcttgactaggtgtgtgaccacactatcgatgctaaattataccctaggatcaggctagcagaactaagccatactacctgcgtatcatggactcaaaacaactgatcgatgatctgccgagaaatcacgaccatatcaaccgttgactcccagatgatgatgctaagcacttgatgga

SEQ ID NO: 125266 - DNA, 1279 bp, Glycine max
  Clone ID: PAT_MRT3847_84125C.1
tccgggtcagccccgcgtcgtccggacaccccaaactccacgcgtccacaaaatgtggcgaaggagcttcagcagcagcaccgccgccaccaccgcgactctgaagggcaagaaatgggacgcgctgataatcggtggcggccacaacggcctgacggcggcggcatatctcgcccggggaggcctctcggtggcggtgcttgagcggcgccacgtgatcggcggcgccgccgtgacggaggagctggttccagggttcaagttttcgcggtgcagttaccttcagagcctgctgagaccgtccgttataaaggagctggagttggggaagcacggtttgaagcttctgaagcgcaatccgtcgtcgtttacgccctgcctcgacggacgctaccttctcttagggcccgacaaggacctcaaccactctgagatctccaaattctcactcgcagatgctcaggcttatccaagatatgagagtcagcttgagagcttctgtaagttcatggatctagtgctggattcgcccccacctgaatctgtgcaccataaatcgtctattaatgaaaaactgaagaataaaatacagaattcagtattttgggcaagttgtctgcggcaggtgtcttccttggggcaaaaggatatggtgaactttatggaccttctgttgtccccagcttctaaggttttgaacaactggtttgagacagatgttctgaaggcaacccttgcaactgatgctgtgataggcagtacagacaggccagtgtccacaccccaggaagtggctatgtgctgctacatcatgtgatgggcgaaactgatggggaacgaggaatttggtcgtatatatgttgaaggtggaatgggctcaatatccaaggctattggtaatgctgctattgaagctggagctcatgttgtaaccaatgctgaggtgtctcggttgttgattgaaaactctagcactgtctgtggtgttagtgttgttcgtgactcgtgaatttgctcaatcaagtggatttataaaggtggatcttagcaattaaattttgtagatatgacttacatataggtggctttggctgatggtactgaagtgcattcttcaattgttttgtctaatgcaactccatataaaactttcatggaattagtgtccaacgatgtccttcctgatgattttgttcgtgccattaagcacactgactacagttctgtaagttaattactttctcagttttttttttttaaataccctcaatctctactg

SEQ ID NO: 125267 - DNA, 266 bp, Glycine max
  unsure (1)..(266): unsure at all n locations
  Clone ID: PAT_MRT3847_84126C.1
ctctactacggatgtgacacagtaaccaagccaccaggttttgagntgagctctcaaagtcatccaaatcttggatcagctgaagtaaganagattacctcttctgagctgagtagtgtgcaccctntcagttatgcaggctttgtggaaaccaacaggtttccgagggtcttgcaaggtcaagaaatatgtccattganatccctgacaggaaaggttgatatgaaccttggtgcttggggatgccccaatcttagttgcacaat

SEQ ID NO: 125268 - DNA, 326 bp, Glycine max
  Clone ID: PAT_MRT3847_84127C.1
gttattttgtgaaaccgagatcacagggtgtcgctccttaggacctgaaacaaaaggattcgttactggatatcaagaatctattactgtcggcctactcatttgtggacgatctctgaagggaaagaagatcactctctgtgctggtcacagacttcacgaatcatttacgtttacagtcttgggggaggtgctgaacactctcctatgtgatataggactacgtgacagatgttaaactgtcatatgtctctttctcaggactctgattaatgtcaagctcaagactggtgaaatagtggattagtactaccactctcctgtat

SEQ ID NO: 125269 - DNA, 262 bp, Glycine max
  Clone ID: PAT_MRT3847_84128C.1
ggaaaaggtcaagatccaatctttcctttgcaattcaatggtaaaaagtttaagaaacctttttacctttttggtgggacctcaaaagaattttacaaaaaaggttttttttttacaaacctaaaaaacccagcttaaaattttacccccttctttggacaaaaggggttttttttttatattattttgggtgcccttccccccaaaaataaaatgtttttaggcaagggttttttccaagggccatgaacactaacctggg

SEQ ID NO: 125270 - DNA, 464 bp, Glycine max
  Clone ID: PAT_MRT3847_84129C.1
aaaaagggggcctttaaaaaaccaaagcaacccaacgcagcaaaggccggaaacccggggggcttatttttttggaaacagggggtccgaccaacccccccccttaaaacccagataaaaaaaagcaattttgcccccggggatcaaaaacccagttcggggaacaacaggtgcgaaaagaggggggaaacttcaaactttggccgaaaaacaagctcccttgaaaagaagaccccggaggcccgaaaagaaacccacatttattggaaccaacatccccgggggaaccagcccgcacgaatcactttttttttggggcagccttggggaccctggctccggggggatccttcttttcaacggtcttgggggccccccccgcccccggttggcgcagggccctaaccgcaaacctacccgggggggggtactcggggaaaggttcaaccacccggggggggggg

SEQ ID NO: 125271 - DNA, 293 bp, Glycine max
  Clone ID: PAT_MRT3847_8412C.1
cctctggctactaagacgagacaaatcaccaggttgtctcttgcctgcccgaggattcatcagcagttcgcatggccgacctatgtatggaacccccggacctacgcttatttccaactacccgcaacattaccatgttcactacccccttcctaatactggggggcctaggactacaccataaacccttgaaccgaatttctagcttacgaccacgagcttgcgacggcataactctcactttgtagtacctcaaggataactgactggccgccctctatacagcactataa

SEQ ID NO: 125272 - DNA, 760 bp, Glycine max
  Clone ID: PAT_MRT3847_84130C.1
gcgaaggaaagcccggaattcggctcgagaaagaacataaatagtatatacgagtcctagtttcatataatagttccatataacaaacattatggaagaagattatccacccgggtttcgtttcttcccaacagaagaagagcttgttggcttctacctacacaacaagctagaaggccaaagaaatgccatagccatagccatagacagagttatcccagttattgacatcaatggagttgagccttggaaccttccaacacttgctggggagctttgtcgtggggacacggagcaatggtttttcttttcgcccggtcaagagagggaaaccaggggaggcagacccagcagaaccacagcttgtgggtattggaaggctacaggttctccttgctatgtttactcttctcacaacaaagtcattggggtgaagaaatccatggtcttctacaaaggaaaagcacctatgggaacaaaaaccaaatggaagatgaatgaatacagagccatccatgtcccttcccaatccacccctgccacccttcatttgacatgtgaattcagcttgtgtcgggtatatgtcatatcggggagctttcgagcatttgatcgacgaccattagagaaagaaggagcagagtcgcgggttcatagaattgagaatattttgggtggggcacgtgctcaccaaacttgccctcactctcagatgctagaagctggagaatcaagtagcacaaagtgggatgtgaataat

SEQ ID NO: 125273 - DNA, 1128 bp, Glycine max
  Clone ID: PAT_MRT3847_84131C.1
caaaatttgagcttctattggagagaaacaaacaccaaataaaaatagcaatcatggcaaataagtaccatgttcgttctattagtttgccttctagatctcatcctagcaccattagagttgaggaggagcttagcaagatcaaaacttgggaaggaacattcacatccacatcagggtccattcacacaggcatatccttgattgaagatttgtacatttgcttggatgatcttctcaacatggcatctacccaaaaggtgatttctcaccatagaggtgaaaaatgtgtgcaagaggtgttggatggttcagtgagaattttggatatatgtggcatcacaagggacaccatgttgcaaattaaggaaaatgtccaagcccttcactcttctctaagaagaagaaagggagactcatgtgttgaagcaagtgtggctgagtacaagttgttcacaaaaaagatgaagaaggatgccattaagttgatcacatctttgaagcagatggatggcaaatttggggtgtccacacttttggatcttgatcaccacttcgctgctgtgattagagtgcttagggaagtcattctgatgaacttgtcactattccaattttttttgtcattcttcaccgtgtcttcatcgaactcaaagacatccaaatggttgctggtgacaaaattgatgcacagggggataaaaccttgtgaagacaaatcagagaatatcaatgaatttcagtgtgtggaagcatctttgagcacccttctaaatgaaggcactattaatgatgagaagatgcaggtagttcatgaaagattggaggctttggagaatgccattgaaagtgttgagaatggcttggagagtgtgtttaggcgcttgattaaaactagagcttcccttttgaacataatctcccaatagagtactttcaatagatatttttctccaaattctgcaatgcagccaaattttaggggtatgctgaggaatgaaatttttacctacaattatttgtagatatgtataattcaaaagaaatatattgaaatgtaaaaacaaaaaagaaatctttgttccctaaaaaaaaaaaaaaaaaactcaagactagttctctcctcgt

SEQ ID NO: 125274 - DNA, 124 bp, Glycine max
  unsure (1)..(124): unsure at all n locations
  Clone ID: PAT_MRT3847_84132C.1
ctgtgtntgggcctttcgttgagctcgtnaagtcgtggantctnccanantggctcgtccattagnnctaccctggcntacatggccgtngtgctctgtgcnatnggtggctacngtacctatc

SEQ ID NO: 125275 - DNA, 305 bp, Glycine max
  unsure (1)..(305): unsure at all n locations
  Clone ID: PAT_MRT3847_84133C.1
attaacccgcccggggatanaagcctaccatagcacagatggaagagggacattttaagcagaggatggggtttgctcccgattcaaatgataatatggatctactgctgagcattgatctgttgggtatacaaggagcaggcaaagctatccaaaacaagactggtgctggaaagaaatacgcatggatgaagacacacaaccactgtacatgatggcttcaagaggatactagggacaacttctgagcgatgcgggtaagtccacgaagtcaaagaacgccaggagcagtggcgaatcaatgg

SEQ ID NO: 125276 - DNA, 557 bp, Glycine max
  Clone ID: PAT_MRT3847_84134C.1
ccgggaacgaagcttcatctgcttttctgtctctcttcgctcgatgcttactgacgctgcgatgaagctgataagactcggtttggaggagtatcgatgcagatcctcgagataaggatgaccctgttcctccaagcacgtcagaaaatcccatgaacgcttgtgcggacttgagtcctggagtctacgagatgaggctcaaggttagaggacctgtcatgatgccctctatggttcttcacatcactgccaggaaggccgcctgtgtcgcactgaccatgacctgcgacggatatgaccttcgtgagccccacagggggattgaccttctacagttccccacatcgcgaatgagcatattacctctatcgctagtgagcctgtagtgaatgatgatagtgaccattgcaccatgctatgatctggatccaaatttctatgtgttatgcttccaactgcttgatccctctctttctgctgattgtgaccatagattgggggactgactatgtcatcgctttctgctagctgtacacatgaagacattgctgcatacc

SEQ ID NO: 125277 - DNA, 169 bp, Glycine max
  Clone ID: PAT_MRT3847_84135C.1
ccgtctgcgtaagcagaataccaagatggaatgcaaccgacacacacggatcttcttggattttcttggaaagattgcttggtaaaggaaagctatgggagtatggggatgcaatgactgtgaaaaagcgaagaccggcggcgcttacacgttgagttccggaagtgct

SEQ ID NO: 125278 - DNA, 224 bp, Glycine max
  Clone ID: PAT_MRT3847_84136C.1
agaaagcacctacatgccctgatttcaaacaacctatcaaatttaattagaacgtggccttacatatatcctacatttaactgctgccactcactatacgatttcatataacacccttacgtaacatggcttgctaaaaactcgatttcctcacactaatgatacttagcactaatgagatcaatgtctcaagtcaaaaccaagctgttacacattcattcgac

SEQ ID NO: 125279 - DNA, 344 bp, Glycine max
  Clone ID: PAT_MRT3847_84137C.1
cagaattctgctcaattgtgtattggcacagaaaagtggatgattccgatgctattagagacatattctggacacatccagacgccattaaacttctgggtgctttcaacactgtattggtcattgatagtacttataaaaccactaggtatcagttaccactacttgagatcgttggagttacttcaaccgagttaacattctctgctgcatttgcttttgtggagtctgagcgagctgaaaattttacttgtgcactaaaaaaattaagaggattgattgccaaagatgatgaacatgccccaagtgattgtgactgttggagacattgctctgatgagtgc

SEQ ID NO: 125280 - DNA, 220 bp, Glycine max
  Clone ID: PAT_MRT3847_84138C.1
cgtgagagagcatccgccccaataactagaacattatgttgattgtacattcagagggacctgtattctttttgggtatgctgctggggctgtcgggtacagtccatcaacactcaaaacattggttattttgattacatcatcataccaattacacctgtcaaatgcactttaatgcttccattaaagaaaattagtcaaataatgcattggattcaaa

SEQ ID NO: 125281 - DNA, 534 bp, Glycine max
  Clone ID: PAT_MRT3847_84139C.1
atgtttctaacgatgtaaaattagcgaatacttcactacattcgtcgctacacgcaaagaatgtatgacgatccttcttagtagtgttcctatttgtacagcgttttctatgacatgatggcgactccgatcttctcattaacagatgacctctaagcagctctccacatactttcgataattagcccttaaacctgaaatgtttgactggcaggagaactactaatgaagatgcatgagaagccttagtggagatactgaggagttttggaccattaacctctttatacaatgattggataaatgggatatcccgtagaactactcaatcgcacaaacgcgagtatatctgtcttcattaggcacagtgaaagatttcttttgatgaattatgagctgagatgactgcacttcccgttcaataaacgtcgaagtggacagcacaacattacagttactgccaagacgatcaccagcgatgatgatgctaatgccactatgcttcatgataggaccaatattctcacccagcat

SEQ ID NO: 125282 - DNA, 158 bp, Glycine max
  Clone ID: PAT_MRT3847_8413C.1
gggggtgtgttgaatattttatttatgattgtatgatggtgctttcccaaagagagcactaacctattgagcggggttcgacttagaacattgcttgtactatcaggcgactaaggctgggaaactaagtaccctatacaccttggaaaggccctccc

SEQ ID NO: 125283 - DNA, 727 bp, Glycine max
  unsure (1)..(727): unsure at all n locations
  Clone ID: PAT_MRT3847_84140C.1
cacgcgtccgcctctctttctagtttctctctcttagggttttctcctcccccattgacccaccgtccatcgcaaaggaagtcgcgcccaatttccatggactcagcagcaacatcagcatgggatgggcgttgccacaggtgctagccaaatggcctattcttctcactacccgactgctcccatggtggcttctggcacgcctgctgtagctgttccttccccaactcaggctccagctgccttctctagttctgctcaccagcttgcataccagcaagcacagcatttccaccaccaacagcagcaacaccaacaacagcagcttcaaatgttctggtcaaaccaaatgcaagaaattgagcaaacaattgactttaaaaaccacagtcttcctcttgctcggataaaaaagataatgaaagctgatgaagatgtccggatgatttctgcagaagctccagtcatatttgcaaaagcatgtgaaatgttcatattagagttgacgttgagatcttggatccacacagaagagaacaagaggagaactctacaaaagaatgatatagcagctgctatttcgagaaacgatgtttttgatttcttggttgatattatcccaagagatgagttgaaagaggaaggacttggaataaccaaggctactattccattggtgaattctncagctgatatgccatattactatgtccctncacagcatcct

SEQ ID NO: 125284 - DNA, 710 bp, Glycine max
  Clone ID: PAT_MRT3847_84141C.1
cccactcgtccgaccaaacctatctttctcagtttctctgtcttagggttttctcctcccccattgacccaccgtccatcgcaaaggaagtcgcgcccaatttccatggtaagtcatcatggataaatcagagcagactcagcagcaacatcagcatgggatgggcgttgccacaggtgctagccaaatggcctattcttctcactacccgactgctcccatggtgttctggcacgcctgctgtagctgttccttccccaactcaggctccagctgccttctctagttctgctcaccagcttgcataccagcaagcacagcatttccaccaccaacagcagcaacaccaacaacagcagcttcaaatgttctggtcaaaccaaatgcaagaaattgagcaaacaattgactttaaaaaccacagtcttcctcttgctcggataaaaaagataatgaaagctgatgaagatgtccggatgatttctgcagaagctccagtcatatttgcaaaagcatgtgaaatgttcatattagagttgacgttgagatcttggatccacacagaagagaacaagaggagaactctacaaaagaatgatatagcagctgctatttcgagaaacgatgtttttgatttcttggttgatattatcccaagagatgagttgaaagaggaaggacttgggataaccaaggctactattgcattg

SEQ ID NO: 125285 - DNA, 1670 bp, Glycine max
  Clone ID: PAT_MRT3847_84142C.1
tcacggctgcgagaagacgacagaaggggcctccctttttaattgaaaccaaaccaaaccaaaccaaaccaaacctctctttctcagtttctctctcttagggttttctcctcccccattgacccaccgtccatcgcaaaggaagtcgcgcccaatttccatggtttgtagattaaatcttaaagcagtaagtcatcatggataaatcagtgcatactcagcagcaacatcagcatgggatggcgcgttgccacagttgctagccaaatggcctattcttctcactacccgactgctcccatggggggctccagcacccctgctattggcctattcttctcacaacccgactgcagccatgttggctactggtacgcccgatgtaacatatccttccgcacatcaggctcaagatgaccagcagagatacccacaacagcaggttcaaatgttctgatcaaaccaaatgcaacaaaatgagcaaacaaatgaccataaaaaccacagtcttccgcttgctcagatacaaaaaatagtgcaagctgatgaagatatacggatgatttctgcagaagctccagtcatatttgcaaaagcatgtgaaatgttcatattagagttgacgttgagatcttggatccacacagaagagaacaagaggagaactctacaaaagaatgatatagcagctgctatttcgagaaacgatgtttttgatttcttggttgatattatcccaagagatgagttgaaagaggaaggacttggaataaccaaggctactattccattggtgaattctccagctgatatgccatattactatgtccctccacagcatcctgttgtaggacctcctgggatgatcatgggcaagcccgttggtgctgagcaagcaacgctgtattctacacagcagcctcgacctcccatggcgttcatgccatggccccatacacaaccccagcaacagcagccaccccaacatcaacaaacagactcatgatgaccatgcaattcaattaggtcggaaagtagcatgcaccttatgattattacaaatttacttaatgcctttaagtcagctgtagtttagtgttttgcattgaaaaatgccaaagattgtttgaggtttcttgcactcatttatgattgtatgagctcttatgctgagttacttttggttgtgtttatttgaggtactggtgtggtagttaaattagtttgtagctgtccataagtaaacagcgtagctgcttaattaggaggtctgaaatgatgaaatagtttgtattgttattgcagaaggtaggttttattcagtatttcattttactgcaatggctgaatttattgctcatccgcttagtactagttgatgttttttcctgtcactcgttatgtgttgagtgtgaagaaaaattagtgtgccatttttcacctgtaaatgcacactacagccccggaagaacaaattgttccgatcattttcaattttttttcccggtaacatgaaaagtggttgatgttaaatgctgtccctgtaaaaaaaaaaaaaaaagaattgacagcaggaaaaaaaaaataacgagctgttctttttcttgattcaaaaccacataaatatatccagattagttttatagttaataattgattttattcggaag

SEQ ID NO: 125286 - DNA, 1587 bp, Glycine max
  Clone ID: PAT_MRT3847_84143C.1
gacaaagcaaaagcaatagcccttagaagaagaccctcttcctctcagggaatgggcggaagatggagaaccctctcttcgttctataaccgcataaccacttctttttcttattcttccaaaccccattttccctccttcaaccgctccatctctctcgccgccgccgcaacttctgaaatacccgacccggatcaattcgggttcgtagacccggaactcgatccctgcgtcaaaatcccagtcaaagcttatttcctctccaccagtataaatttgaagggcattcaggctgataatcacagaaacgttgttcctccatcttcccgctcatcttcaaactatgttgctctccgcttctgtgacttcaatttggactccaatggacatgggtttcacatgaaagcaagcaactgtcgttacatggttgtatatcagtatgggtcagctgttttgtttaatattgaggatcatgaagtggaaagttacctggaattagttaagaggcatgcatctggtttacttcaagatatgaggaaagatgattatgcaataaaggagaagccactgcaagttgaggacatgcaaggaggtccagactacatagttctgaaatcgttggatactgatggtatccgtataattggaagtgtattgggacaaagcatagctctggattattttgtctcacaggttgatggtttagttgaagagtttgctggcgtaaatcgcggaatggagaaaactggaaccttcactatggataagaagaagctacttcagctagttgggaaggctaactcaaatttggccgatgtgattcttaaagttggtctctttgagagatcagaaattgcttggagggatgcaaagtatgctcaaatatatgagtatcttcgggatgagtatgaagttgcccagcgccttcgtcacctggttggcaaggcgaactctgttgtgcccgatgtgcttctcctacttggtctcctccagagctcggaatcagctttgagggatgcaaagtttgctcaaatatatgagtatcttagggaggagtatgaagttgcacaacgctttggaaacctggatttcaaattgaaattcgttgagcacaatattcattttctccaagaagttctccagaacaggaaatcagatttcttggaatggtgcattattggtctattgactattgaaaatgttctatccttatacgagattcttggagcttcaaatacagtttcttagtagatagtagtaagaagttgaagctatagattaatttattgtagtaacaattctagcaatttttgagccgataaaaaatttgcccttttgtatttagtatggtaaataatgtccacatatcccggacccattgagctgtatgaaatttatttgaaattgtgatataattcaaaaacaaatggattaggtgcatctagttccatcattgttggaactgaactattgttcatattgtaaacttttatcctccgaggatggcaaataaatctgaatttgttatcataaaaaaaaaaaaaaaaaaaaaaaaaaaaaaaaaaaaaaaaaaaaaaaaaaaaaaaa

SEQ ID NO: 125287 - DNA, 1143 bp, Glycine max
  Clone ID: PAT_MRT3847_84144C.1
cggatgcgagcccggacgcgtgggcggacgcgtgggcaaacttgtctttctcagggggtctctctcagggttttctgctcccccattgacccaccgaccatcgcatgggaacggcccgagctttctcaggttctctttcttagggttttctccaccgtccactgcaaagtcttgcgcccaatttccatggaactgtaaagagaggatagttagaagattaaatcttaaagcagtaagtcatcatggataaatcagagcagactcaacagcagcagcagcaacaacagcatgtgatgggagttgccgcaggggctagccaaatggcctattcttctcactacccgactgcttccatggtggcttctggcacgcccgctgtaactgctccttccccaactcaggctccagctgccttctctagttctgctcaccagcttgcataccagcaagcacagcatttccaccaccaacagcagcaacaccaacaacagcagcttcaaatgttctggtcaaaccaaatgcaagaaattgagcaaacaattgactttaaaaaccatagccttcctcttgctcggataaaaaagataatgaaagctgatgaagatgtccggatgatttcagcagaagctccggtcatatttgcaaaagcttgtgaaatgttcatattagagttgacgttgcgatcttggatccacacagaagagaacaagaggagaactctacaaaagaatgatatagcagctgctatttcgagaaacgatgtttttgatttcttggttgatattattccaagagatgagttgaaagaggaaggacttggaataaccaaggctactattccgttagtgggttctccagctgatatgccatattactatgtccctccacagcatcctgttgtaggaccacctgggatgatcatgggcaagcccattggcgctgagcaagcaacactatattctacacagcagcctcgacctcctgtggcgttcatgccatggcctcatacacaacccctgcaacagcagccaccccaacatcaacaaacagactcatgatgactatgcaattcaattaggttggaaagtagcctgcaccttttgattattacaaatttacttaatgcctttcagccagctgtag

SEQ ID NO: 125288 - DNA, 571 bp, Glycine max
  Clone ID: PAT_MRT3847_84145C.1
acatgaaagcaagcaactgtcgttacatggttgtatatcagtatgggtcagctgttttgtttaatattgaggatcatgaagtggaaagttacctggaattagttaagaggcatgcatctggtttacttcaagatatgaggaaagatggtatatttcttcagagaaactaatcaatcgtatagttcttctgaatcctgttgcatatgtgtaataagtaacatgttctgtgtgattagattatgcaataaaggagaagccactgcaagttgaggacatgcaaggaggtccagactacatagttctgaaatcgttggatactgatggtatccgtataattggaagtgtattgggacaaagcatagctctggattattttgtctcacaggttaatatgtgccaaatgtcatcttctttccagtactttgttagccatttgttaacctgaaggaaaaagacaacccttaaaactaaagccattatttttattttaaaagaagccattgactttttggcatttgctctctctcattatcaggttgatggtttagttgaagagtttgctggcataaac

SEQ ID NO: 125289 - DNA, 260 bp, Glycine max
  Clone ID: PAT_MRT3847_84146C.1
gagcgatattggagcttattatcaatccattggggttcgcatactttggcatgacatgaccatatcaaatgaaaattcaacatcagaagattcatacccgtctagacttttttggcaaaactgcacccttattctttatctgaacaacagtactcttccacaatttttatcacaactcaatgcgcagaataaaggactcatcgagtttacaaacatgaatctagatataacttgtctcaaatacaaatatcaatgctatt

SEQ ID NO: 125290 - DNA, 340 bp, Glycine max
  Clone ID: PAT_MRT3847_84147C.1
cgggtcgggtcacgcgtccgagcttaatatttgctttttctttgattattccggtcttatgtcactcctatagccgagttagttgtatgcgtatgctcacctagaagctactagatagcatgcatagtctgctatgaacagtagctttcacattatttcgtcatacaagttgtcgtgaattaacttcacagatccgcagtacacagacgagcataggcctgagatcattgacgatatttgatgtgcatagattctctatccttcattaagttttcaaggcgtagtgtacaggatcacttcatcagtaatctgacatctacagtcgtccactccaattctg

SEQ ID NO: 125291 - DNA, 283 bp, Glycine max
  Clone ID: PAT_MRT3847_84148C.1
tttggctccaaggacaattctaattgggcacatgacaaggcgttggcatcaataaagctccgtacttctgggaaaacacaccgcccaagtttaccttagaccgtggggggaaagctctctttttcgctatcaaagggctaccaatcctaacaggataaatgaaggtaaccatatcaaaataaggctggcgtttcacaaggccgcaacgatagcattctgaatatacacacggtgaaacaagtctccattacgtatttactcaaaaacctcaattggcggccag

SEQ ID NO: 125292 - DNA, 787 bp, Glycine max
  Clone ID: PAT_MRT3847_84149C.1
aattcggctcgagggtgaaacctgatggtgctgtttggggtgcccttttgggtgcttgcaagattcataagaatgcggagatagcagaattggcctttcagcatgttgttgagcttgaacccacaaatataggttactatgttttgctatcgaatatatacaccgatgctaacaacttagagggggtttcaagagttagggtcatgatgagggaacgcaagcttaggaaggatcctggatacagctatgtggaatataaaggaaaaatgaaccttttttactcgggggatttgagccatccccaaactaagcaaatatataggatgctagatgaattggaaagtcttgtgaaggaggttcatccaccaaatgagaaatgtcaaggacggagtgaagagctcttaattggtacaggggtgcacagtgaaaaattggcaattgcatttgctctcttgaacactaagagtggaacagagattactgtcatgaaaaacttgagagtgtgtgttgattgtcatttgtttattaagttggtcagcaagattgtcaatcgtcaatttattgtcagagatgccacacgctttcaccatttcagagatggaatctgctcttgcaaggactactggtgaaaccaatacaacactatttcttaaacattggctttcaatacagcacaatgatgtctgacctcaccttggtggttgttgctgttggtgagtgaggaggactgaggacaatgcatccatgttgagaaattctataaatatgcatgacacagtcatttagg

SEQ ID NO: 125293 - DNA, 310 bp, Glycine max
  Clone ID: PAT_MRT3847_8414C.1
aacttcttccgtgatgggtcctaaggcagaaacaaagccggctgacagacaagggaaggtctcccccgctgtccctgaaagcgttgcggctaagatcgagctgcccgatgcctcatctaaactttccgctgaagaggtctggagagtagctggattacggagaaaaaagatcgcctgttctcagctcttaatcccccagccacttaaagaaaggcaagccaaagtttccaggaagagatacacattaactatcattaggatccaatgtccagatggagttgtccttcaaggtgtattcagctccatgtgg

SEQ ID NO: 125294 - DNA, 199 bp, Glycine max
  unsure (1)..(199): unsure at all n locations
  Clone ID: PAT_MRT3847_84150C.1
caaaaggcgnacaggagagagcanccccaacggacccacagcccnggcagnaaaggaagcagccaggggacaggcgcgccacgccgcaaaagctcacgacaacggagcggccccaacggcggagccagagaccccgccagacggggagcaggggagggacagaaccgcggaaggagcaaaaaaggactttttttttttt

SEQ ID NO: 125295 - DNA, 328 bp, Glycine max
  unsure (1)..(328): unsure at all n locations
  Clone ID: PAT_MRT3847_84151C.1
tgatnaaaaantagcgacnnnatgtgcatngattgtgntgtnnnggnacagtgatnantncgcggangnaagcangngnaccnaccanntantggatntnatcagngntanggtngtgangnnngcangtggtcttaacatagtcanctctncnngtcatgcnncagnnngcttcngtngtacnatnngnnagnantcacaatngntnggtgcttnatgcnngnncnantnnncanacncnaagntnagaggtgtggtcctnnttannattgatcngcgcctgnnatatntaattgtcngtnaggtatagctgacnnntnnttgcntt

SEQ ID NO: 125296 - DNA, 513 bp, Glycine max
  Clone ID: PAT_MRT3847_84152C.1
cccacgctttcgaccacacgtccggtttgtagtcgatacacgatcttcttcttttggtgaactgaggttgtgatcggaatttctctcaactgataatgtcttgctgagcgtaactgggggtgcgtaagtttctgaaaatgctcaaacaggatgcgctggctgccagatgtacccagacttttgctacactgaatcaacctccacctaaaactggtgcatggtagctgtacctgctaagggtaaatgagaagctgctgaaatgtatacgccctctcagaactatgcctgctcatgtgaaccaaactgctcctgcaaaccctgcacttgaaatgaggttggagagcaactgctgcagatatcgcccatagttatgcataacgataacactattaatgtcgatctaagaactgatgtattatgtgtgcgatgggtcattggcactgaggtggtttgtgttaatcaaacatctgtagaataaagctgtcatgtcttgcctttcaggatgctcaagag

SEQ ID NO: 125297 - DNA, 392 bp, Glycine max
  unsure (1)..(392): unsure at all n locations
  Clone ID: PAT_MRT3847_84153C.1
ctagaacatgctctagctgttgttctcctggctccaagcttagctgctcttggaatggatctgtgccccggattcatgagtgatggtgacttttggtagatatacttggttctcgtgctcccttgtctttgcattactgatgctgctattttatccactccacaaataatggaagctagtgcaacgtttactctggcttttgacaaaagaagggaggaaaagaaagannnnnttgatctggaggagggaatgttgcctcaaaagaggaggaacagcatctctttgtgccaagcactgttgaacttgaatcagcacctgtgcagacatctgctgatgaagctgccccatgtgaggttggttgtaatgtcgggatggagaaacatgccactcaa

SEQ ID NO: 125298 - DNA, 494 bp, Glycine max
  unsure (1)..(494): unsure at all n locations
  Clone ID: PAT_MRT3847_84154C.1
cagtccttcaaagaggaagaacttgaggtcatctgtgaggtgatcaaaganngtcttcaatctgatccaaaggttaagacctacaatgaaggacataactcccagattgagggaagttcttcatatatcacccgagcaagctgtcccaagactctctccactctggtgggctgaactggagatcttatcaatggaggccacttaaaaagttctatctaactctcttctgtgtattctaagtcaagtctctctctaacctttaccgtgctggaagagtacagctttctgataatgctatatggtatttgccactcaaattctttaattctatctgttctttcgtaagtccatataatcgaaataccatagttattcttgtcccagtggaagcgtgttgtgtaattttgcaagtggggtgttgtaaattgtacttttgttgatgaattattgggatgtaaaaaagtcttgacaaataaattggtgtttctgtccca

SEQ ID NO: 125299 - DNA, 1378 bp, Glycine max
  unsure (1)..(1378): unsure at all n locations
  Clone ID: PAT_MRT3847_84155C.1
tcgttcttctttacctatgaaccaattcaacaacacacttcatcacaaaactttctttattccatttcttcaaacttagtttatatatatatattaaactatttctcttgtgccatgggggcgcggtgtttcttcatgtgataaacgctgaaaaagaaggaggagggtctatttcttcatcatcaagagaatcacgacccggtcttggtgacataccagcgcgttgcgactgctgcttgatcatgactcttgatccaccctatatttgcagatgagcaagagcgaatagggcctcgcatagagcttcctctgctaactttgtgtgggaatcaaaactgccccaaaactataaatttcttctcaataaagtacttggtgaacaaaatcttggttccatgaccaagaaagagatctatgccaaactatgccaacccaatttctttgatggtggtaccaaagaagtttggctggacagaagcagtggacaagtttgtatgttcatttcatcaaaatccttcaagattacaggaatagatgatagaagatattggaattatattccaactgaggaatccaggttcaagagtgttgcatatcttcaacaaatgtggtgggttgaagtaataggggagctagagtttgagtttccaaaagggaactatagtgtattttttaagcttcaattgggaaagccctcaaagagattgggccggcgagtgtgcaaccttgatcaagtgcacggctgggacatcaagcccgttagatttcaactatctacatcggacggccagcgttcactctcccagtgctatttgcgtgggtccggagagtgggccaactaccatgttggagactttgcaatcgataagcccaatgggccaaccaacattaacttttccttggcccaaattgattgcactcacaccaaaggtggtctttgcatagatggggtagtgatttgcccaaaggagttcacacaaggattgaaacaattttagcaaagtatgctttactttgtgtttttaatcaatgacttttgtgagagcaaattaggtctaggtctctccctccctctctctcttgggtattttttatttattttagatttttccaattattggctcttttaggaagaattacttaggggcactctatttttgttacaaaggaagtcttaaatgatgtgggaagagaaaaaaaaagtggaaaggaataatggattttgagaccaaacaatttagggataaagatttgtgttacttaaaccactcttagactgggtgtcctaatttttgtacagttgtgtttttttgctgtcatgtttgtaaagaaattgaaatgtgtgaaatagttttgatcgttgtatttnttnttatat

SEQ ID NO: 125300 - DNA, 503 bp, Glycine max
  Clone ID: PAT_MRT3847_84156C.1
ctttataaagcatgattcatcatatcatatatgatatatcttctccttcacaagtctttctttatcaattatcatgctatctttttatatatgtggtttgtgtgatacaggaaagcttaagatatttttaatccatactttggaaaagatgatgaggtgtagttggaccatcttatagcttgataatgacaacagaatttggattctttaactgttctttatgtttgaacacattgagttgcttcaaccttcaaacgggtcttgtttcagtgtgatgattagcaatctgtactattttagcactcatgttgtaccagtatcttccaccaaagaagacacaacgtcttcgtttctccctggaagtgatctgacctaaaccatcatcatcatgaattcatgatcatcatctttttgcagatagaatatgaagcatcttatgagcaagctgtggctgggaacatgcacacacactcttgactctacagtctacaccttgaaattag

SEQ ID NO: 125301 - DNA, 436 bp, Glycine max
  Clone ID: PAT_MRT3847_84157C.1
gtgtagttttttcacacataggggggcatagggcgtccggaggttgggaaacgggcttggcgcaaagatgacgatgaacccaagacccactgctgcactggcctacctctggcgtataatcttgcgggtcgacagaagttctacattggtgggaggtgcatgatcaagagatgggacacgctcagttggcaagatggaatacacccatactacacgctatggaccggttcggcctatggagtactgagtaggggcaccgacattgtgtgtagcgattgtgctggtattgatgggaagattgccaagcatgttttgaacatgatggctcaaacgatactccagggttgtgactgggatggccaattgatgactgaaaggacacacctgctgctgcgttgcgatcaaggatggcaagttggtagaaagaccttcgaga

SEQ ID NO: 125302 - DNA, 286 bp, Glycine max
  Clone ID: PAT_MRT3847_84158C.1
ccaaaaaccgatgatgtatatacacctttcgcctttatccctggccgagacagctccatgtgccgttactcttaaaccctctctttcacttcactcatcgcattaacaaaccaagtaaccaacaatgaaatgaacaacaacaacaatgattcttcaacttcaccgaaccttcttctccaccaccaccacctcctcctcctccgtaccttcctcacgccccgtctctttctgccacttcatgttggggttcagggcgatccagtggccaccaatcgctctcgcgccg

SEQ ID NO: 125303 - DNA, 610 bp, Glycine max
  Clone ID: PAT_MRT3847_84159C.1
gcctacaaatattcccttttagtacttgcctaaatggatctgcatcaaagacaattgagacattgaagacattactatctaaatcatacaagtcctcaagctttctgtgactaccacaagttatgcaaatctctcatgtgtttctctcttgtattcaaaaaatcagagcgtgaggtagatatgtaaatgactttacaagttcttgatcattgactacttagggcataagttatgcatgaagaatattatgccccatgaagagtaattttatgtgtacataaagatcaaaaccaacatcaaaatgttaccttcaaagaaccagctggaattactgcttctcttcatgagcattggctcctccagttttggatttcaatggatcagcaggaacaaaaatatcatatgcaccttctttttctcctgccttcttcatatcatcatcaatgccattgtaatccaattccttcaaaatggaaggaactcgcataccatccttaccataaattgttcccatttccatatcaaatttatgttttgaggatataaaacctttttcaagatctgaagtataggattcatcttgaatatcatcctctattgtaacccattc

SEQ ID NO: 125304 - DNA, 1260 bp, Glycine max
  Clone ID: PAT_MRT3847_8415C.1
tttcggctcgagtgaggttgtagctgttactggtgatggaaccaatgatgctcctgcactgcatgagtcagacattgggcttgctatgggcatatctggaactgaggttgccaaagaaaatgctgatgtcattataatggatgataacttcactactattgtcaatgtggccagatggggacgggccatatacataaacattcaaaaatttgtgcagtttcagttaacagtcaatattgttgctctgattattaactttgtttctgcatgcatcacaggatctgctcccctcacagctgttcagttgctttgggtcaacttgattatggacactctgggtgcattggccttggccactgaacctcccaatgatggacttatgctaagacccccagttggaaggacaacaaattttatcaccaaacccatgtggaggaatatttttggtcaaagtttatatcaactaattgtccttgcggtcctcacttttgatgggaagaggctactgagaattaatggtccagatgcaactatagtgctcaacactttgatattcaactcctttgtattttgccaggttttcaatgagataaacagccgagaaatcgaaaagataaacatattcaaaggcatgtttgagagctggatattttttacggtgatcttctccacagtggtgttccaagtactcatagttgagttcctgggaacatttgccagtacagtgcctctaagctggcaattctgggtgctcagtgtcgtaatcggagcatttagcatgcctatatctgctatactcaagtgcatcccagttgaaagaggagatgctacaacgcaccatgatggttacgaggcgctaccttctggtcccgagctggcataaaatacgggaaggaaaaacataacttttcccttctaagattttctttagtgcaaatgtggctgaaattttggcctctgtggcatactacaaatcttgtcttttggcttcgtttttaagaaattttctcacaaaaatggagggaggaaccgccacttgttcaaattattttcggaaaatgaaaaaaggttttgttttttctacaataaaaaaaaatatcgtggaactaatttgcatcatctcttgcaaatgttcaattttgttttcatctttctcccctggtcatccatgtcaacgggcacatcattaataatttgggttagatcaattttatttttttaagggaggaccaaaaataaataaattgccccaattattat

SEQ ID NO: 125305 - DNA, 380 bp, Glycine max
  Clone ID: PAT_MRT3847_84160C.1
gttattttgatttaagtgtatttgtggtgaaaatggtaaagattgatatgggttttacgcttttatactactacaattcaaatttattttcttaattaatcttttttccctttgacacccaaacacagccgtagaccgtagtccgtggataccaagattttattaacaagaattgctaactccaataacacaaactggtccgatatttgacttatatttttttcgcttaaaaaaaatccaaaccaaactagatctataataatgtatatcaacttgagtttttctgattcgggtagaatcctatataactcggctgtgaacaattgtttatcatccctaacaaatgcgtaattaatgaaatgaatcttaaacaatttgaa

SEQ ID NO: 125306 - DNA, 273 bp, Glycine max
  Clone ID: PAT_MRT3847_84161C.1
gagagagagagagagagagagagagagagagagactgagagagagagagagagagagagagagagagagaggaaaaccaagcgagaagcagctgcaaaaaaagctgcagaggatgctgccaacctagagaagggagatgagcaccaagcaagctcacaacatgcaacagtgactgagcgtgccgctgcatcaacatctgaagctgacaataagacaagtgatttcatggatgatgacagtgccctactacagcaggcacttgcaatgctaatg

SEQ ID NO: 125307 - DNA, 390 bp, Glycine max
  Clone ID: PAT_MRT3847_84162C.1
actacaaaagttgcgttcgagcccaacttcgtttcacctccattgccatttgtctataaccattgggcgctttatcagaaaatcaatttctaacaagcccctttaaaaaaaatttatgcaagaaattttcagggggacctaagttttgagaacccccttgaacacctatataaatggccaccacaagcttccagggctttggtgggtcctcctatttttgctcaatttcactttggtgaaggctaaaataaataaaatattcctcgaccctcctcactatcgggtgaagtggaccacgctgggcataagctccgagcaagccacaggagaactctggcatcctaggatagggtcaacatttctggccgtggactataatcccataaatgc

SEQ ID NO: 125308 - DNA, 403 bp, Glycine max
  Clone ID: PAT_MRT3847_84163C.1
acaaaaagccttttcaagtccaaatccgatttagtaaaaaaaaaaaaaccaatttaatggggaggggtggtatttctcccccgggggagtccccacaacttttttatcaggtttccccagaatttgggattggtccggaaacataggggattgcggtttgatacaaccgagaagcttatttacctctgaatctttaaaggaaataaattaggggattaactttgaccgatcattattttggtcatttgcgctaacggggctttatatatagaacggcccaaaagcttattgaacccatgggtggacccaataacctttttttttgacccttatcaggggcgggctttaaacctccaaaaagtggttctcctcaaaaaagagaaaaaattggggttcaaccttt

SEQ ID NO: 125309 - DNA, 397 bp, Glycine max
  Clone ID: PAT_MRT3847_84164C.1
gcttctgtctgaacaacagaaccttcttgctctcggatctgctttacttcaagaggcaagtgccacgctgagcttatcgccaatgctgagaacattgtcccttctggaaagggaataattgctgctgatgagacaacagggacacctagacacgtgtttggccaacatcagtgtaaagaacattggagtggggcaggcgatctcttagggagctgcttatcactgctcctggtgtacttcaataactcagtgcagtcatactctatgaggaaaccctctaccagagcacagctggaggcaagccctaagagaatgatttgaaggaagttggtgcgctttctgtcatcacggttgacaagggcacaaactatcttgctggaactaatggagaaaccac

SEQ ID NO: 125310 - DNA, 1539 bp, Glycine max
  Clone ID: PAT_MRT3847_84165C.1
tacggctgcgagaagaggacagatgggggccttataatgcggcactatcctctcctcctagaatttttattatttaaaaaggaaaaaaaacattaggaaattgggaaagatactaaaactttccctggaactgagttggagtataatttattcttgttttgcgcacttctcagatgaatccctagtttccttacaaggtcctctgtaccatttacaatggaacatgcagataaaggaaaagaatcatcaaatagtataaatgaagtagaagtcactaattctccaattatttgtggccttccagatgatatttctcttatgtgcctcgcaagaattccaagaaaatatcattctgtcatgaagtgtgtctcaaagagatggaggaacttgatttgcagtgaagaatggttctgttatcgccgtaagcacaaacttgatgaaacctggatttatgttattttgcagggaagagcggttgagattttcgctgatgtaataaactcgatgagacctggatgaatgctttgtgcagggacaaatcaaatgagattttctgttatgttttggatcctactgttttaagaagatattggaagctccttgatggtcttccaccttacatctcaaatagaaaaggcatgggctttgaagctttgggaaataagctattcttattgggtggttgtagtgggtttctagattctacggatgaggcttattcatatgatgcatcctcaaattgttgggttgaagctgcttccttgtcaaatgctaggtgctactttgcttgtgaagttttggatgaaaaactatatgctattgggggattagtttcaaattcaagtgataattcttgggatacttttgaccctttgacaaagtgttggacattccatatagatcctaatattgcttctgatattgaagattcagtggttcttgatgggaagatatacacccgatgtgccagacatacggatgtagcttctcatgcttttgctgttgtatatgaaccatcaagtggcacgtggcagtatgcagatgctgacatggtttcaggatggacaggtcctgcagttgttgtttatggtaccctttatgtgttggatcagagtttgggaactaggttaatgatgtggcataaagagagacgcgagtggatacctgttggaaagctttcacctttgcttactagaccaccttgtcagcttgttgcagttggtaaaagcatttttattgttgggaaaacgcttagcactgtggttgtcgatgttggtgatttggggaatgagggtcaggtgatgatgggttcttctatacctggattattatcggatttcaatgtaataagttgtaaatgcttgtcaatctgaagcattgtgtattattatgttatgacatgtatcaatgttacatcattcttttttcttggtacaatgatagtaccaaggattgaacttatgactttatgtaaattacatgaatcttccataaattgacaatcctagtggtgtggcatgatttggagtgttttgtatc

SEQ ID NO: 125311 - DNA, 331 bp, Glycine max
  unsure (1)..(331): unsure at all n locations
  Clone ID: PAT_MRT3847_84166C.1
tcanncnagcntacgnnanctcggaannngnngagcttcgcnngntctcattnttntncctanaatnaaatccatggncacngcnacatccnaaanccttngattccaatctncgtcactctncgctctcntngaagctggcnctctnntgccgcgttctccgtctgcgntcnggcctngnnagcgcggctctnggtctcttcgtgnctagtgcgtctncgcngggntctacgngaancccanggtgttngtcgcggngaagctcgggagangnggggctgnaagngntaaagganttngcnaagttcgatgttctaanaacttaagaact

SEQ ID NO: 125312 - DNA, 1866 bp, Glycine max
  Clone ID: PAT_MRT3847_84167C.1
ctcgaggtgagtatgccacacatgctatgtcctcatctcaatctctctgcatttgtgcgttgcattgcacatatctctcaaaactttgttctggttctgtgactcttactattttcgtgtgtcttgcatttggataattatctgtcacctgagaaacccacctcagagattcacctaacaccccttcttttgattttgaaccccttccatttcaatcaaaacctctctcatcgtcttctattctacatacaatcctacccttttcttcactctgcttttctgacaaaagtgttggttgaccttgattctttcgttatcgcgtcggcagtccacaaacttgggactcataacagcgtgacgcgttggcctgttgggcgcagtcattatctctctcaatttttttcttaaagtgagtgattgggtggtgctgagtcaggaaagtggctgagattgggttttggttttggtgtgattccaacaaatccacgtttgagccacacacactttgtctttctggctttgttttctttgtcccattcctatcccaaactttcttgtggctctgagattcaattccccgttttgttttttactctttagactctccgccacctgaacattacccatccatctcatagcactcaccccagaaaagcaccgtcacttgttcgtttcaacgttcttctattgatacgttaatgctttttgattcctttcagatttttctaactaactaactatctgtgaatcaaagaaatttcagtgtacgtttcgtctgattctttgggatactgcttgagctcgatgggagatgtggctaaggaccttgcagctgggactgttggaggggcagcacagttgatatgtggacacccctttgacaccatcaaggtcaagctccaaagccagcctgcaccactccctggtcagcttcccaagtattcaggtgcatttgatctgttaagcagacaatagcagctgaaggagcaaggggtttatacaaaggtatgggtgctccgcttgctacggtagcagccttcaatgctgtcctgtttacagtgaggggacaaatggaaacattagtgagtgaggtccaatcctggtgcccccctcacagtggatcagcaggttgtttgtggggctggagccggagttgctgtttccattcttgcctgcccaactgaattgatcaaatgcaggttacaagcacaaagtgcgcttgctggctctgaaacagctaccgtggctgttaagtatggaggacccatggatgtggccaggcatgttctcaagtcagaagggggcatgagaggtcttttcaagggcttggttcccactatggggcgtgagatacctggaaatgctatcatgtttggtgtatacgaagcattaaagcaaaagtttgcaggaggcactgatacttctgggctaagtagaggttctctgattgttgccggaggcttggctggagcttccttctggttcttagtttacccaactgatgttattaagagtgtgattcaagtagatgatcacagaaacccaaaattttctggttcatttgatgcattcagaaagattcgagctacagaagggttcaaaggcttgtataagggttttggtcctgcaatggctcgaagtgttcctgcaaatgcagcatgtttcttggcatatgagatgacaagatcagctctgggatgattaattcttgtaacaggcttaatatcaaattctcatgttttctttttctttttgttcactaaacattttattccatccatttatataaccgcacaagcgcgtcttccgttattgcttcaatcaacgactcattctttcattagtaatacaaacatccttattttc

SEQ ID NO: 125313 - DNA, 203 bp, Glycine max
  Clone ID: PAT_MRT3847_84168C.1
tctcgagccgaatcggctcgagtacggctgcgagaagacgacagaacggggcccaccactgatcttccggttaaaaaccttacgggtggtggcacacttcttccctacaggcagcgtcagctaggacttaagccagaataattgattaattcttggcaaaatcccatggccgcagccgcagatgggctcttccggccgatcta

SEQ ID NO: 125314 - DNA, 216 bp, Glycine max
  Clone ID: PAT_MRT3847_84169C.1
gattgaaattgttttttgttggttttttgtgataggggaaacaccaccctatgccacataatttttttgaatatgaaagaaaagttacagctccgcgaaccaagcctcgggggcttgtgctgactttttgtgaaaccgcagggaggggaaaacaaatgtgaaaaaccctaattcgcccttcgcagaccactttaataaaatatattacatcctttt

SEQ ID NO: 125315 - DNA, 379 bp, Glycine max
  unsure (1)..(379): unsure at all n locations
  Clone ID: PAT_MRT3847_8416C.1
aatcccggtcgacccaccctaccttcattaaaatcnctttattatacaaaattttctttcattaaaaataccttctttttcagaatacttatcaatgaaaaaggacccccttctaaagattactgcacacttctacaattttctgaaaaatacccaaatatatcgcctttcactcttcacaaatcctcaattttaacttttttaaagcttcttacctttattatataatttctacataacaaaaacccatattaaagttcatacagagctacaacataaaataaacaacacctatcatatcatatataaacacttcattcaaattctaaattcacttgtaatttaaccaatcaaaacactttgaacacccttttatcca

SEQ ID NO: 125316 - DNA, 469 bp, Glycine max
  Clone ID: PAT_MRT3847_84170C.1
ttccaaaatccccatcctttggtagtagcagcagctattttttaaattggatgatgcaaaaaggcaaattgttgattaaaccaccttcttcttcttctcttcacacgaattccctctagtactcgtccaagcagaggaggagtagaagaggacagaccaagacaagagaaacatagaagaacaaagaaacaggtctgtttttaaaaaccaccattttctcttttatttatttatttatttttcctgggaatacttagttggtacgaggaaacacagagaacaaagtcccaagtagcagtgtgaggaggaaagagaaaggtggcaccaaaatcaatctcagatctcacaatcagcaccaccccaaatcccatctgattgctttggtcattcacaagtctggaattttagtcctaatttttgggccaaggtttatgggttcttcatctgggaatcctaatcagcagcagca

SEQ ID NO: 125317 - DNA, 382 bp, Glycine max
  Clone ID: PAT_MRT3847_84171C.1
ccaaattgaaatgaaagcctgggcatacacggtagggtataagattcacccattagggcgattagggaaaaaactgtgggtgagaccaaaaaaaaaaagctccttgatgggccacttctagacgtcacaacaatcaacccggacaggcattgttcctaatgttaccacaccaaacccgctagtgttatcaggagatttcactggcgcgcgttgacccttcttttgagaaaaaaaattgggagcggacctctgtgtttttcaaaacttttgaactgtgctcgaaaaacggctgtccccatttaaccgcttttaaggggcttttttctttgagaacttgtgaagagaccctttccccatactgttttgttttttttaaattttt

SEQ ID NO: 125318 - DNA, 315 bp, Glycine max
  unsure (1)..(315): unsure at all n locations
  Clone ID: PAT_MRT3847_84172C.1
gatntcaaatctacggctnnatntnncccccggaccccaacncatagtacagtgncncanncannanatntnatcgccntggtangnannngcacnnagncncnncttgtnnacantcancacnatcnntncgtnntcgatngntccnctcgacacanncagnnnnngnngnnnnngcacncgcagannngggntcnncangtttcacngcntgnncnncancntncacactcagtgnaanacacanggncngctcggtnnnnagnccntcnnccnngnntnacagnntgnngncnngtcgcgntngtgtgnngn

SEQ ID NO: 125319 - DNA, 283 bp, Glycine max
  Clone ID: PAT_MRT3847_84173C.1
aaactcctgtttttatttggactgcacaattcaaatctgggaggccattgcatatgatatctgcgggctgcatgaacacccagttctaccgaaagccgtacattttcaacacaattgagaccatgttaacaccccacttctctctgcaacactcttggttctcaaacaacaacactacaaggtccctcaggctttttctctcatccctacatttactccaatcacgacattcactccacttcttatgtacctttaacaaatcaaggacttcctactaatggat

SEQ ID NO: 125320 - DNA, 455 bp, Glycine max
  unsure (1)..(455): unsure at all n locations
  Clone ID: PAT_MRT3847_84174C.1
actcgagccgatgtcggctcgagatttatatgatgtggtgataagatgaatttttatgaatgtctctgtaaaagttatatacattgacattatataaatttaaattaaactattaaaaggagacatgtgacaaaattacaatgaagattgtatcaatacgcacactcacactgcaatattgctggttctatcttttcttttgtttgagggaatgttggagttctttgttacggatgatgggtttgactgttgaggaaatttaattttgaagtttcaaactaaaagtttgattaaaattttgcaaaaagtatttgggtgttcaagaaagaagaaaatgagaaaaaattacaggttggtctttcttattaataaaaccaacaaattatcatgttgaaagataattaaaattaactttttttacggttaanattaaaatacttaacatagagaataaa

SEQ ID NO: 125321 - DNA, 683 bp, Glycine max
  unsure (1)..(683): unsure at all n locations
  Clone ID: PAT_MRT3847_84175C.1
ctggtttgcaaagcagtatcttcgacctggaagatctgtagaatttggggtaaatttaggatcaaaagcacccaaaaatccaaatgggccataatctattgtaagacccaaaatgctcatgttatccgtgttcagcacaccatgagtgaaaccaaccccctgtcatctggcaatcagggaagcagtacgctcagcaatctccaccacccaccacccatgctcctttgagttgaagttcccacctttcagattttgaactcagtatctcaccaagcgtcattgcccagcccacatgccaaattgagggttgtgtacttgaacggaaggagagacttgagtgtaacagatcttccagagaacactgatccattgaaatgtccaccacacgacacgtatacctcctgaagaaacagtttggttgctgctgttgttgaacagatgatgatcttcctccttcccatcaatgtcgaaatagatttcaacgacaagaacatgctgctggaactggaaatgtaagatctgcaattgtaggctctggtccatatcctcggatgcagaacgacatggaaacacanatccataacattgcgcaagaagcatacacctctgtcctgcgggcttttaaagcccaatctgatgcaataacttgggaaaaagaaagtttaattacagagcttaggaag

SEQ ID NO: 125322 - DNA, 475 bp, Glycine max
  Clone ID: PAT_MRT3847_84176C.1
ggatgtagagaagttgaataagatggccagttctgttacgactggtgggatgggggctattagaaggaagaagagagctgtccgcaggagtactactacatatgacaagagggttcaaatcaccctgaagaggataggagtgaatgctatccctggaattgaagaacttaacatctctaatgatgaaatgggtatccagttcttaaacccctaagtacaatcatttattgctgccaacacttgggttgttagtggttcaccgcatacaaagaatttgcgggatattctgtccaacatcatccaccaattatggccagataacttataaaacctgaagaagctagctgtactattttagatgcacgttcttgaagcaggaaatggtgcatccctatcacaagatgattatgattattccgtccctgatcttgtcacatgggatactcttgatacacatgctgatgatactaatact

SEQ ID NO: 125323 - DNA, 819 bp, Glycine max
  Clone ID: PAT_MRT3847_84177C.1
acccacgcgtccgttttaaaggttttctatttctaaaacagcgtttgcgtttgtgtttggtcttagacgccgcacgccaccaccgtcactgtttcaatcctcgaactgtgtcttcttcgctttctggtctttttattaggttttgttcatcgatccatcgccaaacatgccttccagtcacttgcttctcgaggaacctattaggatggtctccatccttgagccatccaagcctagttttttctctgcaatgacaaagattgttggtaccctgggacctaaatctagatccgtcgaaaccatttctggttgcctcaaggctggcatgtctgtggctcgttttgacttttcatggcatgaccctgagtaccaccaggagactttggagaatttgaaggctgctatcaagagtactaagaagctctgtgctgttatgctggacacagtgggcgctgagatgcaggttgttaacaaaagtgagagagcaatctcgctcgaggcaaatggtctggttgttctaactcctgatcagggacaagaagcctcttcagagatattgcctatcaattttgatggactggctaaggcagtgaagaagggagacaccatttttattggtcaatacttgttcacgggaagtgaaactacttctgtatggctagaggtatctgaagtcaaagggcaagatgttgtttgtattataaagaacacagctacattggctgggtcattgttcactttgcatgcctctcaaatcatattgatttgcctactctcactgagaaagacaaggaggttataagcacctggggtgttaaa

SEQ ID NO: 125324 - DNA, 785 bp, Glycine max
  Clone ID: PAT_MRT3847_84178C.1
cccacgcgtccgttttaaaggcccacgcgtccgcttttctatttctaaaacagcgtttgcttttgtgtttggtcttagacgcagcacgcccccaccactgtttcaaccctcaaattgtgtcttcttcgctttctggttttgattaggttttgttccatttgaaacaatattcatcgatccatcgccaaacatgccttctagtcacttgcttcttgaggaacctattaggatggtctccatccttgaaccatccaagcctagttttttctctgcaatgacaaagattgttggtaccctggggcctaaatctagatccgtcgaaactatttctggttgtctcaaggctggcatgtctgtggctcgttttgacttttcatggcatgaccctgagtaccaccaggagactttggagaatttgaaggctgctatcaagagtactaagaagctttgtgctgttatgctggacacggtgggcgcagagatgcaggttgttaacaaaagtgagaaagcaatctcacttgaggcaaatggtcaggttgttctaactcccgatcagggacaagaagcctcttcagagatattgcctatcaattttgatggactggctaaggcagtgaagaagggagacactatttttattggtcaatacttgttcacaggaagtgaaactacttctgtatggctagaggtatctgaagtcaaagggcaagatgttgtttgtattataaagaacacagctacattggctgggtcattgttcactttgcatgcctctcagattcata

SEQ ID NO: 125325 - DNA, 433 bp, Glycine max
  Clone ID: PAT_MRT3847_84179C.1
cttccctctccccctcctcctcctctccttgagaaaaatgaccacattatggccgaagatgagcattaattcttcctcggaaaataaaatttaaagtttttgacattgagaacatttatgacttattgcccaatcccttatttttcattagctccaattagggaatagaccaaacccactctattttgatttctccctagtaaaccaaaggaaaaaacttgtgatttatccaaaataaaacagaaagttcattttttgcttttgtaacctttaacaacactccgtcacggacacaccttaaaaggttaaaaataagcgtattcaaaatcttttgtacaataaagcttgctcttaaagaaaacgtggaacttaaaaataattaaaaatttacatatgttttccgcccataatatcaactagactcatgatgacg

SEQ ID NO: 125326 - DNA, 489 bp, Glycine max
  Clone ID: PAT_MRT3847_8417C.1
ttcttttttttttttttttttttttttttttttttcctaagggggaaaaaccccttaaataatatccaacaaggaaattcttaatatttggagggggaaacagccccacacgaggctgcctggaataacatattaaaaacacctccctaaccaagggaattggaccgattagcgggaaaccgcatgaatggagtataaaacccagggttttatccacctgaaactaacatgaatggagaacctcacctagctaataaagggacggcagtaaaatttctaaaaatggagggaaaatcaaatttccagggtcaccaaacccaaatttgggggttataaacagccttaactgaagaaaataccaagggcatccgcccatacccggaaacaaattgtgggacccattctgttcttttttcactgggaccccccaaactactgattccagccgacccaatctttaaaatttaaccttaaacccatatggggggg

SEQ ID NO: 125327 - DNA, 573 bp, Glycine max
  Clone ID: PAT_MRT3847_84180C.1
cggacgcgtggggtgctgctggagctgctgctggtgtagtggttcttctaatagtttttgtgtttgtgatgctgaggcgcagaaggaggcatgttgggaccggaacatcagtggagggctcattgatggcatttagctacagggatttgcaaaatgccacaaagaatttctcggataaacttggaggagggggctttggttctgtcttcaaaggaacattggctgattctagtatcatagcagtgaagaagcttgaaagcattagccaaggtgagaagcagtttagaacagaagtgagtacaattgggacagttcaacatgtcaaccttgtaaggcttcgcggattctgttctgaaggtactaagaaacttctggtttatgattacatgccaaatggttccttggagtccaaaatgttttatgaagatagctccaaggtgttggattggaaagtgaggtaccaaattgctcttggaacagcaagggggttgaattatctccatgagaagtgcagagactgcatcatacactgtgatgtgaagccaggaaacattctcctagatgctgattttg

SEQ ID NO: 125328 - DNA, 283 bp, Glycine max
  Clone ID: PAT_MRT3847_84181C.1
aaaaaacctgctatcgcctaaacacaatgcagctccttgatatgatggcagcttcaatcatgggagcatgaacatatcaagcgtaggatatgtttggtgatctactggtcgcagattatagtacccgtacttataaattctaatgcacctgacggatgttcgctatgtaattacacaacatgttttgatttcacaccattcttgacaagctctgtcaagaaacatagcaataccttcttgtacttcaacataccttcgactatatagtagataattaaagtgc

SEQ ID NO: 125329 - DNA, 1441 bp, Glycine max
  Clone ID: PAT_MRT3847_84182C.1
tggtgatggagcagttggttagtagacttgatgtggcaatgttcaatgctattcttcgtgaatccgctgaagagatgcccatggatcctatatctgaccccattagtgattctaaggttcttcctattccagctggaaaatcaggctttggggctggtgcacaactgaagaatgctattggtgactggtcaagatggctttcagatttatttagcattgatgatagtgactcacgtgaagttatcaatgaaaacaatgaacccaaatgtgaaccatccttcaaacctttccaattccttaatgcattaagtgatttaatgatgcttcctttggacatgcttgcagatgggtccatgagaaaagaggtttgtccaaaatttggtatatcattaatgaaacgagttgtctacaattttgttcccgatgaattctccccaggacctatccctgatgctgttttcgaggccctggacgaggatattgaggatgatgaaggggccattacaagctttccatgctctgctggttccacgttctatgaaccacctccagcttcttcagttgtgggcatgctacaagaagtgggaaccaaaacttcactgagaagtgggtcatttgtgctcaaaaaattatataccagtgatgatgaacttgatgaattggattcaccactttctgctcttggcatggatgactcatcacttttgtccaaggaactagttaagggaggccgcaaggttgtacgatatgagctcttgcgagaagcgtggaagactagtgaatgatgttcctatcaatgtgttcttttcttcttcttcttgtatataatatgtgtatctaaaatttagcccgatatattttgtattttttttaaataaaaatcttggtcttacaatcatgtacttttttacccataaaagctgcaaggaagttcctgttccatgtcctgctggtttcacgctctatgcaccacctccagcttcttcggttgtgggcaagctacaagaagtgggaaacaaaacttcactaagaactgggtcatttgtgctcaaaaagttatataccagtgatgatgaacttgatgaattggattcaccactttctgctcttggtatggatgactcatcactttcatccaaggaaaagcttgcactagttaagggaggccgcaaggttgtacgatatgagctcttgcgagaagcgtggaagactagtgaatgatgttcctatcaatgttttttcttcttgtatataatatgtatctgaaatttagcccaatatattttgtattttttaaaaataaaaatcttggccttacaatcttgtactttttatacccataaaagttgaaggaagttcctgtagttttttgatgttttcttccaagacaactactactctggcaaattccccatcttaatagagtttttttttgggaggc

SEQ ID NO: 125330 - DNA, 468 bp, Glycine max
  Clone ID: PAT_MRT3847_84183C.1
acgagcaagggggtcccatgccgccacagtcgtctttcccttcactcgtctcaccacgcactcagttcaacaacatgaatattctaggaaatatgtccaatgtgacttccatactgaatcagtctttcccaaatggagttccgaatcccgggctctctggtcctggaaacagccagcgtggagcaattgatactggagctgaaaaagatccagtctccagtgttggcaatggaatgaacttcaataattcttcgttccacatttgtacagtcaagtatagtgaatgctgcttcctctggtcaaggtcagggtcaacaattttcaaacccttctagtaaccagctgttgcaagatcaacaacattcccaacagcttgaacctcaaaatttccaacatggtcagcagtcaatgcaacagttctctgctcccctgaatacacagcaaccgccgcagccgcagcagcatttt

SEQ ID NO: 125331 - DNA, 322 bp, Glycine max
  Clone ID: PAT_MRT3847_84184C.1
ggctcgagctgtgtgacatctaatactataatctgtattactcatcacgcgggatacactggattcaaactgattaacgatctcgatcgaccgaatatcttcctggattttcctgtatggttgcaaaaagtatggacttgatcacgaagcacacagattgaattgtgaacctgttctactgcccagcaggacttggaaaaacttgttgtaatgcactgcctagcgtgaatcgtggctcatgatctgcagctaccagctaattgactgcaagtgtattagtctcttacccttcaagctccactaagtctacaaggttgaatcc

SEQ ID NO: 125332 - DNA, 322 bp, Glycine max
  Clone ID: PAT_MRT3847_84185C.1
gggcactaaaggggcctcaattaattataaaaaataaacggaaaaaaacaaattacataaattaaaattataaaagagggggggaatcattaaaaaaataaatgatcgaaggggaaactttaaggaagacacaatcatcatttaaaaaaaagatttttaaaaaattaaacattatttcctttaatgattcggaagttattgtcccttaaaaaaaatgaaaattgctaacacgtccaaattttaagctaaaacaaaaattttattctaaacgaaaaaaaaagtaattaaagcttaaattttaagtctatcaccaacaaaaata

SEQ ID NO: 125333 - DNA, 392 bp, Glycine max
  unsure (1)..(392): unsure at all n locations
  Clone ID: PAT_MRT3847_84186C.1
tttgggctgatttatgtgcttgcatggtcgtgagaagttaataaaaggggccccgccggacgcaaaattacgggacgacgaaggcgatacgaaaaagtccgaagaactagcgagactcgcctagacggaaggccgtcccggggcgtacttaaatccgccttcgccggacatggcaccaagaaatcgtanaccacgtccatcaccgcggacgattcagccctcgccgacatctccaccgaggaatactctatagccgagtttactaacgaacacgcttagagccgcgataccgcggttcctaacaaaacacaaatcataactggcgggacccggagactacggtaatcgggagaaccgtaagccccagaaatcacgcctcagggggaatcatt

SEQ ID NO: 125334 - DNA, 520 bp, Glycine max
  unsure (1)..(520): unsure at all n locations
  Clone ID: PAT_MRT3847_84187C.1
ggaattcggcacgagggcaagaagcaatctttaccctgaaccctcagatcacgtgtgtgtgtaatttctgtggtactcaaattaatttccacccatgcattaatgtaaaattgtgacttagttgtataatattataccataatgttcattgttaagaccgtagcccttgaattcttattcacgaatgaattgggaaagccaacacaaagattcaattctgatttcgtagagccggtgctggctgttgcctacgcgtagggtgtcccccaccccgtcccggggcgctaaggggcttttgtttatggcggcaatgttttgctgacgccttgaatcaagtgttctcccccatttgctagtagattgatgggtcgcacgcccggcacacatgttttggccttgtcttgtgtgtccataaccgggacctaccgccgccccgcctgaacataccaatagncaccagatttatatgggctaccggggaggaagcaatgatcttcttaagatcgatccgactagaaga

SEQ ID NO: 125335 - DNA, 553 bp, Glycine max
  Clone ID: PAT_MRT3847_84188C.1
tcacggctgcgagaagacacagaaggggaggcccggttgggtcatactgagtcaggcacatcaaaagcaaaagtccaaacgctcccatctcgccaccgtgaacaccccgacacaaacacactccaagcgcacgttagcagtctccgccgtcttcgccaccgtgccatcgccgtcgatggagtctctcttcggctcgatcaacgttcgcgacctcctctcggcgcaggacctctcggaccctaactcccctctctcagcgccggatctccgtctcctgatccagcgcctggagtcgcagtccttccagatccgttctcaggtgcagtcctaccttgtctcgcaccacgaagacttcgcgcgcctcttctctctttgtaacgacaccgtttcgcagacgcgcgaggtctccgatgatgtttccgccatcctcggcctcctctccgaccacccgatcgatgccgaggtgcgcgagatcgtgtcggagacgaagtcgaagaaggaggagctgaagatgaagaaagagctgctgggattggtcggaacccgtgtggcc

SEQ ID NO: 125336 - DNA, 1661 bp, Glycine max
  Clone ID: PAT_MRT3847_84189C.1
ccctcccgtcggcagcgaaaggtcgtgtttctgttgttcaagctgtgccatacatgctggaaattgtacctgtgggaacatcgaaagggaatggagtaaaagtgctgctagatcattttggggttactgctaaggagataatggctattggtgatggggaaaatgatatggagaggccgggatgttctttcaatggcattacatgtacctgggcttaagattcctattcttatgttgggtgattttttaatttcagttgagacgaaggcaagacaagcgaaggaaagaagccatactcttcttgatgagatccgaatcacaataggccatggcttcaaacatcttttgggatttgaaagctaaatccctggattaactaaagtagaaatggaaagagagctggaaatccttttaaagagtcttgattggaaaggaaaaagggctaataaggagtgcatttgatgctgaaacaaattcaaattttcaccaagacagtgcagatgacaggaagaaagaaggcagtcttagattttacaaaccaaagttcagatatatcttctgtgatatggatggaacattgctgaacagcaaaagtcaaatttcttctacaactgccaatgctttgagagaggcgtcatccaggggtgtgaaaattgtgatagctactggaaaagctcgtccagctgtgatagacatttttaagatggtagatttagctggaaaagatggcattgtttcagaattttctcctggggttttcttacagggattgcttgtttatggtagacaaggtcaagaaatatttaggagcaacttagatcaaaatgtctgtagagaggcttgtctttactctttggagaataaggttccacttattgcattttgtgaagggcgctgcttaaccctatttcgtgatccactagttgattcgctacatacaatataccatgaaccaaaggctgaggtcatgccttctgttgaacatctattggcttctgctgacatacagaaaatgattttcttggacactgaccggagggtggctgataccttgcgtccgtactggtctgatgcaacaaatggtcgtgcctctgttgttcaagctgtgccagacatgctggaaattgtacccgtgggaacatcgaaagggaatggagtaaaagtgctgctagatcattttgaggttactgctaaggagataatggctattggtgatggggaaaatgatgtggagatgcttgaattggcttctctaggcatcgcacttagtaatggatcagagaagaccaaatctgttgctaacgtaattggtttgagcaatgatgaagatggtgcagcagatgccatctaccggtatgcattctgagcaacagaaggccacaataagcatttcattcaaattctgtaggggtttaagctatcaaccctgattaattatcttttccccatttattttctttcacaaaaagttgaacacgaggaaagcgtagttattagaattttacgtttcattattcgaatcttacgatttgatacaattcggttacctaccaattcttataataagatgaatcttaaatgactttgtatcataagatacatgaatgaattagtgtaattcggtatcatagaaatgattcaacaattcgttcaaaaaaaaa

SEQ ID NO: 125337 - DNA, 337 bp, Glycine max
  Clone ID: PAT_MRT3847_8418C.1
cacgcggccaactcggtctaactacatactctttcccacttttgacgaagtacccctatacagggtcgacgtgcccatatcaaactacaccctcattctagggtcttctcaactagtgctcctccactattcattaatgaactaaaaggttaaaataataatatttacatcatatgaccttatcaaaaccaaccatgtagaacgcacttttataccttccaataaaaaacctcagaaccttaatccgtatgctctcaacactttttaacacttaccttcattaaatacttctcatcacattattatcattgtacaacaaatgccctaccttatgacc

SEQ ID NO: 125338 - DNA, 1071 bp, Glycine max
  Clone ID: PAT_MRT3847_84190C.1
cgtaagctcggaattcggctcgagcacaatttgctttcgtttgttgttgttgttgtttctgttccttctcttgttccttaaactctttgtttcaaacatccttagaaaaggtaaaaatttaaaaaaaagaaaagaaaatggtggctgtggtttcccaagaaaatgttgcggcattggtttctcgtaccggtagggagttgcaacgttatagaaaaggtcgtcgccaagttgtgggatgcataccgtacagatttaagattggggagaagacttccttggatgttgtttctgatgaattggaagttctggttattagttcccagaaaggaaaagggatgctatttccaaagggaggctgggaattagacgaatcaaaaaaggaggcagctttgagagaaaccatggaggaagctggggtgcgaggcattgttgggggtaaattgggcaaatggagtttcaagagcaagactcatgacactttctatgaaggctacatgttccctttacttgttcaagaacaattggagttctggccagagcaaaacgttcgtcaaagaatatggatgagcgtcacagaagcaagggaagtttgtcaacactggtggatgaaggaagctctagacagacttgtaaatcgtctctctggtcaaaaacaacttggtcattatcgtgataataagcgagttcttggttctatgaactgcaaaggagatgccaaatctgcttctgtaaatagtgtagcatctttggagggtagagctcaacttttttgaggagtaggatccagaagaattgagccaaatcatagtatataaaaataataatagatagtagatcacatagaagttggtgattccccctattttttttccctttagaaagggaatttacatctatgtgtgggaattcactatatctgtattattgtgaggcttgtgggatacccattagtccacaaacgaattgctctcttttttctagcaacagagttgtgataatgttaagaaggggaataaggctttgttaaaatatgaaaaaaacaaacaagtattcccgccgaatagtgagctc

SEQ ID NO: 125339 - DNA, 346 bp, Glycine max
  Clone ID: PAT_MRT3847_84191C.1
cgattgagcccttcttgaattatccaaatatggtccatgaaaaattttgggtagtcaaaaaaaggttaaaatatccccttacatgaaatggatggactgcctatgtaagcattcttttggaaattggcaaagggtaacatatgcacacttcatgtattactgaagctgtggttttttagtcgggggttaatatcgatggtaatgcttgtgcacgtacatgttctaaataatgttcgcattgcattgcttcgttaaatcatgaattgtgcaagtttgattgccttaattcgccttctaactcggatgtatcatgaaacatcgtctaattttatcattatgtccatat

SEQ ID NO: 125340 - DNA, 212 bp, Glycine max
  Clone ID: PAT_MRT3847_84192C.1
ttttagcttaaaccaaaagctatttttcatgctttataaacataccctaatgtgatcagagcactcaatgctggggggtcccataattttttcttactactcctcatactaatgttccttctcattctaaaaataagcctgtgtacattatatactctcacagttttatacattaacctcacaatactcattaatagtgttgtcccttcttt

SEQ ID NO: 125341 - DNA, 282 bp, Glycine max
  Clone ID: PAT_MRT3847_84193C.1
aagaggttggggcatcattccatccatcaattttattcacacaaatccataccgcaatttctaaagaaatgggatttctagggacctgaacatagaggaaaaacccaattttggggcttcacttttgactttaggaaatagggggaaaagccccaattgaaaaggataacccctattaccttgggatatctaaaatacaacctaatttctcaacattttatttcaaataagcatggggaaaaactttctgactacaaaatcgggttttaaaatatccccaaa

SEQ ID NO: 125342 - DNA, 420 bp, Glycine max
  Clone ID: PAT_MRT3847_84194C.1
cgatccttcttcagaaatcaaaatccttcttcgttaaggaagacccagaagcagaggggtttgattctgatcgaaacccgcgccatggccatgttcgattccatcttcaacaaaggttttaaggctgccaaatgtaaaacattgctgaagctgacaattccgcgtataaagctgctaagaaacagacgagagattcagttgaagaacatgcggcgtgagattgccaagctacttgagactggacaagaagccacagctcgaattagggtagaacatataataagagaggagaacatgatggctgctcaagaaatcattgaactcttttgtgaacttattgcagtccgccttccaattattgaatctcaaagggaatgtccccttgacttgaaggaagccatatctagtgtatgttttgct

SEQ ID NO: 125343 - DNA, 818 bp, Glycine max
  Clone ID: PAT_MRT3847_84195C.1
gtacttaagaacggaaggcgggtcgagcgagtcccgatccttcttcagaaatcaaaatccttcttcgttaaggaagacccagaagcagagggtacaccacatataatccaattttcatcgtcattgatgcacacttaccccacccttctcttttttctttgttctatttaaataaataaaaaaattgaaaccttaaattcctagctgtcttcaatatcgtaaaactcactctgcaatcatcgattttgttttcctgtgatttagggtttgattctgatcgaaacccgcgccatggccatgttcgattccatcttcaacaaaggttttaaggctgccaaatgtaaaacattgctgaagctgacaattccgcgtataaagctgctaagaaacagacgagagattcagttgaagaacatgcggcgtgagattgccaagctacttgagactggacaagaagccacagctcgaattagggtagaacatataataagagaggagaacatgatggctgctcaagaaatcattgaactcttttgcgaacttattagcggtccgccttccaataattgaatctcaaagggaatgcccccttgacttgaaggaagccatatccagtgtatgttttgctgcaccaaggtgtgcagatttgcctgagttgttgcaggttcagatgctatttgctgccaaatatgggaaggaatttttatctgctgcaactgagctcaagccagactgtggtgttaatcgccagttaatagagctgctttcaattcgtgctccttcaccagaaaagaaactgaaccttctaaaagaaattg

SEQ ID NO: 125344 - DNA, 255 bp, Glycine max
  Clone ID: PAT_MRT3847_84196C.1
attgccatacgggctcaagcgtggggattaaattccttccatgtactaccgtattgcaaaaaaagaattatgttcatgagctgagattactacatgtattctgcatatgttacgtcaactgattgggacgctttaaggtgtcatgtccaaactaatccttgacgaatttgaaaaaggtcgtgttttagtaatgccggatttgccttacctgaggctttaacgaaaagcggaaggggtttgttaaaagttcattct

SEQ ID NO: 125345 - DNA, 140 bp, Glycine max
  Clone ID: PAT_MRT3847_84197C.1
gagcctgcttacgcatagccacagacccgcgtgggggccagcactaagccgctccctatggtattatctctagcatccaaaggggtgtcttcactctcacggcttgggcgaatattgcacattttctctgccaaatgaca

SEQ ID NO: 125346 - DNA, 1228 bp, Glycine max
  Clone ID: PAT_MRT3847_84198C.1
tacggctgcgagaagacgacagaagggggggtggtaatagtgaaggtagaggtggttcatatagaggtagtcaggggagagaagatggtggttatggtcaagttcctgctcctactgcccaatcttacggtggtgttggtggaaactacccatccacttacagttcttatagtgatgggaatgcaagttatggaacagaagcagttcctccacctgcaagttatactggtggacctaattcctatcctccatcatatgggggtagcgtgggtggttatgggggagataatcaaggggatggacggagtggtggtagatctgggcctcctgctggatatgacagtagttacggtgctggtaatcgaggtggatttggtggatcttctgcagagacccctgctacagtgaagcagtgtgatgagaattgtgacgatacatgtgacaactctagaatctacatctcaaacctaccaccagatgtgactactgaagaattgagggaactttttggaggcattggacaagttggaagaataaagcagaagaggggctataaagatcagtggccttggaacataaagatttacactgatgagagtggaaacaacaagggtgatgcatgccttgcttatgaagacccttctgcagcacattctgctggcagtttttacaataattatgatttgaggggttacaaaataaatgttgcaatggcagaaaaaatctgctccaaaagcttctgcctgcatataaccatgggggcaatagggggggctatggtggagatagacgcagagacaattatagagatggaggcagttctgggcctgataggcgtgataattacggtgggaatcgatcacatccatactgagggcttcaatagtgaacattttatgtactatggtttatggtctgaggaatttgttgtattcagttggctggtaacttgaaatggaagcaaagaggtaggttgttcacttacttttagcaagacctctttgctccttctggttttgtttgtcactcgttggtggatttttaattttaggcagggattaatttgagcatgtgaatgtttttagaaaggcaagtggtagtctccaagctgccgaggtagtttgattgtttctggtgagtgctacttgcattggaaacatgctctattcttgcttagaatttgaacatcgtgtcattttgtggataaatgcttaaatccatattctct

SEQ ID NO: 125347 - DNA, 279 bp, Glycine max
  Clone ID: PAT_MRT3847_84199C.1
ggcgtgtggaattcagtggacaatgttgcgagtagcgttgaaccgattggcgttgccgagagtgtcggcaggtagtgtagtgtttgagcagcgcacagtgagcggagcggtgcgttatgcgtcgtcgtctagtatggtgcggttcactcgcgaccacgagtgggtcaagctcgactcggccaactccaacatcggcatcgtcggagtgtcagactatgcgcagaaggctttaggagacgtcgtttacgtcgatttgccgagcgtcggacgcaagctgag

SEQ ID NO: 125348 - DNA, 1249 bp, Glycine max
  Clone ID: PAT_MRT3847_8419C.1
cgaattgtgtaaacaaaacgaattacacaaatcatcattgaatgatatcgtgcatgatccacaccacataatttagagagaatagaagaaagaccaaacatgtgtatcaaattgaaggaggctggtctctgttgaagaaaagagccaagcgtttgatcaaacactgagccttatgactcgccaaatcatagagatgaaacgcatgaccctccccaagagtctcttcaacttccaccacacccatccacccactcctactcaaagcattatagtaaagccaccctctatccctcagcacatccttctccgccacacacaccagcaccctcctacaccccagccaccccaagctcggtgccccctctgccaccgggttaacccgcgggtcatccttgtccgccatctccggactcacaaaccgccacagccggtccaccactgccttcctctccgggtccactgcctcctccgatccaaccggaactgagccccaaaaatacgggtggacaagacacactccgaggatgtccatgccaatgtcccaatcagggtcaccaaggagcatagttaggttatgcactatgttagcaccagcactgtccccagccaaaaaaaccctaccgaagtctgcatgctcattcaaccaaggctcttgtccatttttgttacggtgtgacgccacccactgtagtgcagcccatgaatcctcgtacgctgccggaatagggtgctccggggctagccggtagtcaacggagacagcgacgactttggcttcggcgacgattgtggcgacgtagttgtggtagtttgcggtgaagggggaggaggcgcagaaggcgccgccgtggaagtagattaagagagggaggttgttgttgcggcggctggtggtttgtggtgttgggaggaagaggcgtgcggagagagtagcggagtgagggtggaggagtgtgatgtctttggatgtaatgtggggagtggtggagggtggaacgacgtcggttccggtgaagcgttggacgcgaccatcggtgaagacacggatgagaccgggaaaatcgtgtgctatttgtggttctgaggtggtggttggtgttgtgtttgtgtcgttgtccatgggagtgatgaagatggagatagatagatagataactattttatgaatgtaggtatgttatgatcgaggactatcatcctccacttgtgttttgggtcacttgctgcccacgcgtccgcggacgcgtgg

SEQ ID NO: 125349 - DNA, 703 bp, Glycine max
  unsure (1)..(703): unsure at all n locations
  Clone ID: PAT_MRT3847_841C.1
attagcacaaggattgctggancaactgggttacttagcacgggaatatgcaatgggtggccagttaaccatgaaggctgatgtatacagttttggggttctcatacttgaaataatcagtggcaaaagcagtgcaaggacaaactggggagggtccaacaaatttctattggaatgggcttggaacctatatgaagagggaaaactgttggagcttgtggatcctgacatggttgaattccccgaagaagaggtaattaggtacatgaaggttgctttcttctgcacacaagcagcagcaagtagaaggccaatgatgtcccaggttgtggatatgctgtccaagaacatgaggctgaatgaaaagcaattaacagcaccagggttgttccaggattcaggagcttcctctcaaaagaagtcatcctttgaatccccaagttatcaatttagctctaactcttccagtattactcagttgtccccccgatgaagcataaaccaaactttggatgtgtgaattgcatagttaaaatatagtaggaaaggaaagaaaaggaaaggaaagagagagagagagagagagacagaaagaacacatagggattatcttcttttttttattatatttttctcttttttgtatattattttttaagaatgtattataatttataaggtgggcttggataattttttttat

SEQ ID NO: 125350 - DNA, 706 bp, Glycine max
  unsure (1)..(706): unsure at all n locations
  Clone ID: PAT_MRT3847_84200C.1
cacgccgtccggttggataaaatttgacccttttctcaaactagtacaacacacggaacttttgtgtgtggagtggggtgtctactgtcttttttttttttttgttaattttagtgtttgtacactttcagcttgaaatacttactactcagggtttggattacttcgaaatatcatccttttctacttttatgattatgggttttttatttttccttcttcaatttttacgtggatttaaacgttaccgtatagtctgactttagacatgtattgttttgagaattgaagtttggttggtttttataagttgtctgggaatcgtgtgaaataagaagttgagtacgttcccatatttatatctgaagttttataactttatgctttttttttttatgttgaaaataagcgttacatcagaatggtgaagcaaacttttaatttaattataagcaatttaaatttttaaatggaggagtttnggagttcataaagtaattaaagtggaagatttgggnttttgttttttctgtgattatgtgaatttgcgtgttgaaatcatgaaattgagttataactaaagaaatttgcttgttgtgatgcacaaagtatgaattacttgttcagaaatgggttctactttctagtattgntgaatngtgatggttaaatttgaaacctgtttttttttggctacttgcttttg

SEQ ID NO: 125351 - DNA, 206 bp, Glycine max
  unsure (1)..(206): unsure at all n locations
  Clone ID: PAT_MRT3847_84201C.1
cggacgcgtgggcggacgcgtgggcggacgcgtgggcggacgcgtgggcggacgcgtgggctttgtcactttcctggaaaatttatcttccgttttctcgctgacaccaccgcacactctcactctaatcaaccanntggcggacgaaggnntgttgcncaacccggcggcggcgtcgacgatcagtacggcgaaggaatcggcga

SEQ ID NO: 125352 - DNA, 158 bp, Glycine max
  unsure (1)..(158): unsure at all n locations
  Clone ID: PAT_MRT3847_84202C.1
aggggatatagtctgattttggaaccatctgcctggagttttaactacatgtattcactgtacctctggtacttgattatatatatatatatatatataagngatctttgccgagcaaaaaaaaaaaggggactaagtctttgtggatgtgctatact

SEQ ID NO: 125353 - DNA, 253 bp, Glycine max
  Clone ID: PAT_MRT3847_84203C.1
gagacatgcaaacttgatggtgtacgacttcagtggggaacgatttcgagagcaatactctacgatttttagggaccggatagtttaacctgctgcacttctctgtgaaatggaagatccatcatttttcgatcggatgatcagtcatctgagagcaacttgcaagtactatactggttatccaaaggaccttggaccatcacgggtattcattttacctctgagcgtgagtttgttaaactccttcacgaag

SEQ ID NO: 125354 - DNA, 726 bp, Glycine max
  Clone ID: PAT_MRT3847_84204C.1
cggtccggattcccgcgtcgacccacgcgtccgttctctttcactctatctctatataattctaagcttggttggttaggccgcgtttgggagaaagaaaaggtaaggtaaactgaataatttgatacccctcttgtctcgtaactaacgatggcagcgttccgatggaagagctttgaggagaacgaggatcaccctgaactgttctttcactttctttgaagttaatgctggaaaaagtctatttgtatcatttggaaagaataagttcatcaaatacttacactaagacatttattgggattgatggagctggaaagcgattagctgatgaagtcttgcaagttgttaaaaaggggcattactcaacccgcagtgcctatgatttgattggagaaggtgaaagagatagaagccaggaggaatgttttgtgaagctttggaggttaaaggttcctgctaggttcctggtgtttgggtggaaactcctaagggataggctgccgacaagaaaaaacctgcagagaagacagattcctctaccagattctctttgtcctctctgcagaacccatcaagaggacgcatcccatctcttcttccattgcagcaaagttcaacccatatggtgggaaaccatgtcttggctgcaactcaagggtgcttttcctttaaacccaaagcagcactttcttcatcacttgggtcttcaacctgctggtgtga

SEQ ID NO: 125355 - DNA, 480 bp, Glycine max
  unsure (1)..(480): unsure at all n locations
  Clone ID: PAT_MRT3847_84205C.1
tacggcgacagaagggggggagaaagaaaaggtaaggtaaactgaataatttgatgcccctcttgtctcgtaactaacnatngagcgttccgacggaagagctttgaggagaacgaggatcaccctgaactgttctttcactttctttgaagttaatgctggaaaaagtctatttgtatcatttggaaagaagtaagcttaagctgcctaggatattatttttaatgttgtgaagattttcttgggtattgcatgagtgcctcatccacgaatgtaaaattatttgtctggctgaagtccttaacaattatttgttgtttgtagtaagttcatcaaatacttacactaagacatttattgggattgatggagctggaaagcgattacctgatgaagtgagtcccgagacatgcaaatttatgtatctcaagttagcacgcccaattttagttctgatagctngtgaatcatctcaaattg

SEQ ID NO: 125356 - DNA, 278 bp, Glycine max
  Clone ID: PAT_MRT3847_84206C.1
cccttatctttctctcttctctctccccgctctaaccctaactccctaccctattccgctttcggtcatccatcatggaaagggggaaggtccagacccgattttaaaaaacccatgcccaacttgctgggaataaaaaaggcgcccgcacccagaactaggaacccccccgaaaggggaaagccagcaaagatcctaacaagccaaagaggcctccaagtgctttcttcggtttcatgtaattataatatattggtatctctacgaatcatttgact

SEQ ID NO: 125357 - DNA, 221 bp, Glycine max
  Clone ID: PAT_MRT3847_84207C.1
aaccatataatgccacaaccatggttgtttttttaactaatacaggaacttgtaatgatttatactgtatgactacacagacctgaagttggataacagcacacacatttattgagacgaagataacatcccctggatattaggaaggccaaacacatggcaattacatggggggggagaataccttaacgcccacaggtgcagtccgtgcaagtgcagtt

SEQ ID NO: 125358 - DNA, 364 bp, Glycine max
  Clone ID: PAT_MRT3847_84208C.1
ggggtcctccgttttattcatctgggaattccctagggcaagatggcttctgggaaaatatgctatgagacagatcggtaagaacgatcgtgctagtagtgtgctcaactgtgactgttgtcatgtttgtggctctgagcttggttggggtttgggtgatgacatcatctacaggtgctcctgtgcgtgacggatatgaagcccacgatactacgatccatgtgctggaacaagcagtggagaacgaagcagtgagtgcggtcagctgtagcagtacgctgctgtttgaagatgatccatgtcatttgcctgaggatgcaaccaagggggacagcattgcaacctttgaagacaacttaaactc

SEQ ID NO: 125359 - DNA, 610 bp, Glycine max
  Clone ID: PAT_MRT3847_84209C.1
aactagtctcgagttttttttttttttttttttttttttttttttttttttttttttttttttttttttttttttttttttttttacatccccccccccaaaaccctttttactttgatttcttaaaatacaaatcactttgccagggggggggtccccttttttatgaaacacaaacaaacgcccttttttctaatttctaaataagcaaagtttgacaacaaaacccccaacccttctacttgggcaaaaaggggtccatactttttttttttccccacataaaccaacttttttggttcttaacaacccattaatactcatcacgttcatgcgggggggggggttggtggcactgttgttttttttacatttttcgcctccacctttgcatcccttgaattttttgcaggtggttcccttgaattttttgcattttttgcaggtgcttcccttgaattttgggccttgctttgaatatcctgcccaacttcctggttttttgccctacttttttgttttgtgcccacgtactccgccggcttcggcagatggtgctccgccggagggccaaatttttcgaccccggttggttctcccggatgtattc

SEQ ID NO: 125360 - DNA, 377 bp, Glycine max
  Clone ID: PAT_MRT3847_8420C.1
gggggcacaaagttctcctacattcactcatgtccctagtgaacagagtatgccccgttctcaagcatttaagaagctgatgcattcgattccacttgctacactatcagcattcttattattcacataaaacatttagctcggctaccccagctatattatttttaggacccatgcttcacttgctctagagaatcatgtgattcttgggggccaatgcagcacatgccctaattatgtttatcaggattgcacgctgttttgacaatgcatacaccactggtgcacccggtggaaccagaggaaccttggggaggtagctgaggatggtaacgactgggtggaatgagtggaatgtgccctaattttcagcttta

SEQ ID NO: 125361 - DNA, 269 bp, Glycine max
  Clone ID: PAT_MRT3847_84210C.1
gacgtgcaagacacgaggggagactaattttacatgaatttcttaagtatgttgtgactgtctaactgattacacattcttgcaacattttagaccaaatccacgttgtttgcaaaaaggatgcttcgtatacattcattatctagaccactcacagccctctttctgacccttgtccttcacaatccgaacagggtcagggaagcacgcggcgcgcaaaagaacatacaaggcttcaccgcgcttgagcgacgactgcctgaccaagc

SEQ ID NO: 125362 - DNA, 654 bp, Glycine max
  Clone ID: PAT_MRT3847_84211C.1
agtttggtgtccatgacagctgcaagaggaaacctttggatacattgcacctgaagttttctccaaaaactttgggaatgtgtcttataagtctgatatttacagttatggaatgttattgttggaaatggttggaggaagaaagaatgtagccatgtcttctgctcaagatttccatgttttgtatccagattggatccataacctgattgatggagatgtacatatccatgttgaggacgaatgtgatattaaaattgcaaagaaattagcaattgttggactttggtgcattcagtggcagccagtgaatcgtccatctataaaatctgtcatacaaatgctagagactggaggggaaagccagttaaatgtgcctcctaatccattccaatcaaccacttcaactattacaggtggacacacaagagttacaagacgacctttggagttagaagttattcaagaatgatttatagtgggagaaaattaatagtttaatttgtagaaaagtaatagatgtatgtattttatgtaatatcattaaatccaaccatagtgtttaagcgtactttttctactaagaaggaaggttttggtgtgtttgaattaactatatgaaaataaattaaactattcaacaattattatttt

SEQ ID NO: 125363 - DNA, 387 bp, Glycine max
  Clone ID: PAT_MRT3847_84212C.1
agaaacacaggagggacacatgtgattgttactactaggttgtgcaaagtaatgagctatgatactattcagcttcttcctttgccattatctgatgcaatgattctgatgataggaagaaaaatgaaagattatccagcagatgagatagacatccttgaaaaattcaatgagaaacttggaaggttgagctttggcttgtggatgattggttcattactgtctgaacttgcaataggcccttcttctctctttgaggccataaaccaggtgtcactcattgaagattcaaactcttgctatatgagcattgcagaagggcaatggtgcaagagcaacccttttctcatgaagaccctcctcttttgtttggagactttggaaaaa

SEQ ID NO: 125364 - DNA, 680 bp, Glycine max
  Clone ID: PAT_MRT3847_84213C.1
tgggcgtggaagaaagcgacaacgaggcatcgaaaactgttttgtcgaaatggttcatggtgttgcagcaagagaatcagaccaacaaccggagagaagagacagaagagagaggtgatggtaatgaggaggaaagtgtgtctgttcctcctccgaatgcattattgctcatgcgatgtaggtctgctccggcaaaaagttgggtgagagagagggaaggtggtgatcatgatgatgatgatgaagaacaacagggaaaagaagagaaggagaatgcagagagagaaaaggaaaaagaaaaaggggaaaagaaagggcagagtttaaagtcgttgatggaggaagacaagagaaagaaggagaatgttgtggtgatgcgatatgattctgatttttacgacatttcttctgatattgccaaagagacgtggattgttggagggatcagagatctcatgtcaaggagtcgaagttccaaaagatgagatgaacatgatcgtcgtttgcgattttcttttacgagtcactacttttttctacgagtttgtgcccccgaaatactactactttggtgtgataaactggtaaatttaatatcaagatcccggttttagcttctgctatttgctcaagtttgttaacctgtacagcttaatttctgatttcttctttgtataagt

SEQ ID NO: 125365 - DNA, 175 bp, Glycine max
  unsure (1)..(175): unsure at all n locations
  Clone ID: PAT_MRT3847_84214C.1
ccccatccttggctggngatgagagagcatggaagaagtgtgccatggtntctcatcccatcttggtggcaaantgtgnagtgggncatcagcccagaatgggaagggggcatgagganncntcccaggagttcnaggnntttggggnnnncgnntaattnggnntttggggccc

SEQ ID NO: 125366 - DNA, 311 bp, Glycine max
  Clone ID: PAT_MRT3847_84215C.1
aaaaaacaacccatggaggggcttttgctgggccaaaaactcagctggggaaaaatccagaagccgattgtatttttgtccagagcttttatcccggtgttacaaaatccctagggtgaacaaaccgtggatgatcccacattttttgacaggtttaaaaaattaaggggcttgccccttatttatctcaaacaaaaatctttcaagagaatggttccttttgatctccctcaggagggggccccacttcctccatattggggaaccctaaaaaagggggtggtctatgggccccgggggaaaattcccta

SEQ ID NO: 125367 - DNA, 220 bp, Glycine max
  unsure (1)..(220): unsure at all n locations
  Clone ID: PAT_MRT3847_84216C.1
attacttaatcaaattctgtccactttttagatttagggtactttttcttgtctttgcaattatttctagctatctcttacaagaaaattgtttccccaatttaggagccatacgagccagtttagcatgttctaccacattagagttgttcatttttctaaggcttgtgttttcattaattaatcacattgtgcggacgcgtgggtcgacnccgggaat

SEQ ID NO: 125368 - DNA, 227 bp, Glycine max
  Clone ID: PAT_MRT3847_84217C.1
tgcctttgggatttcaaaagaaactatgcaaaatgtttgtaataagtttgtggtgaaagacgaagatttgattttattggcttatcccaagtcagaccaagggagatcccaagtggatccaatctgtgaccatctgggatcgctcaccctggatagagactgatgtaggatatgatatattaatcaaaaagaaaggaccacgactcatgacctcccatcttcccatg

SEQ ID NO: 125369 - DNA, 809 bp, Glycine max
  unsure (1)..(809): unsure at all n locations
  Clone ID: PAT_MRT3847_84218C.1
tcgcgatctacctgattcatcccagaaagacaatgacttaggtgcatcacgaaaggttctaaattttcctcacttttcaacaccccgtaataatgtttcttcagcacctggtagtacacagtttagggaaaaaactactgctaacttgtcacaaagtgaggctagagagtactcagtgatcacagttggttcaagtcactgtggcagcagtcatatccctcaggagaaagatgtaagcagggtttcaagcagtgctgtttgggctactaataataataatagtttatctgctgagcctgaagctgtcagagattgtgtccagagaccaatttgtcctaggagtgacaaaggaaaatcagagatgattgaaccaactgtgacttcatcttctggtggctcaggcagtaccggtattggaagaacttgttccctatcaacaagagatcatggccaaaagagaaaagggacagaagaagaagcatctgaggaacaaagtgaggccacagaacttaaatcagctgatggaaacaaggcttctcagcggacggggtcttccaaaaggaaccgtgcagctgaagtgcataatcaatcagaaaggagaagaagagataggatcaacgagaagatgaggacattgcagcaactgatacctaacagtgacaagacagatgaagcatcaatgttagaagaggcnaatcgaatacttgaaatcgctccagtttcagcttcaggtaatggtgnatggggtctgcatgacaccagtgatgttcccaggaattcagcactatatgtcacaaatgggtatgggg

SEQ ID NO: 125370 - DNA, 325 bp, Glycine max
  unsure (1)..(325): unsure at all n locations
  Clone ID: PAT_MRT3847_84219C.1
gtaaaaagattgttgctagcatcgtccaggaggcggttttttccgttttttttttggcgaacccccccttttttggggggggtgtgtctaacttttttaagggcatcctgagttttctgggggggggtgatttataacccttcctccaattatggagcgggccccgtaaaatttttttaagtttttgttttttaactgtttttttcgggggatgtgtttcactggtactgtgggcctcttttcactggnaacggggggagaactgtttttttttgggggttgggctaacaggggatttatcactatcgcttgagttttttttggc

SEQ ID NO: 125371 - DNA, 2400 bp, Glycine max
  Clone ID: PAT_MRT3847_8421C.1
cctttcgcgttgcccacgcgtccgcggacgcgtggcctaattctccttcacttgacaaaagcttcgtgtgtatccacctctgtctttcctttcctctaaagtattcttttacaatatataactgtaactacttatttcctaagaattataacttacgtaaaacatgttgggctatgcgaacccgtcggggaatctggctgtggatggagacatgacagtgttggaaagacagagggcgaggatgaagtggcaagaagagcaagagtacttttctggaaacagcttcaacggtgttttttcttcttcttcttctctgcacgttccagattccattatggtggctgctgactccggttgtgcacttgctgaggtcgtggctcaggctcagcctcgctcaatcaataagccatctgctgctcctgggcttcatgccaattcttcttctatttcaaggacttttagttgtccacctgctctggtggaccccgagcccaagcccactgactcctcaattgggaaagacagtttcaagaagaggaaaactgacaagcctcacaatcccaaggttgttgcagaaaatgagaacaaagacaagaggatcaaagtcggcgctgatgatggagaatccaaaatcaccaagtgtaacacaataaacacaaataccaacaacaaagaaacttgcacagatacttcaaattcaaagcaaaattcaaaagcccacgcgtccgcggacgcgtgggcggacgcgtgcgccgaagtgtgcgccactggataaacgcttcgtgtgtatccacctctgtctcaacatttcacgcttcctctgtttgctcgcacacgtcgtttttttctttttgttgcttcggagccaactcaacaacaacgccgtgcctaatccttaagaataacgaattacaacaaccaaccatgttgcattgtctcaacacttcctgttcggacatcacagtcttggaaagacaacgggaagcaaccatcaagtgccagaaccaccaaccaccctacttaacggactttaacgccgtcttcccttcttcttcttcttcttcttcttcttcctcttcttcttctcatagtcagggcttgctcatgatgtgctcggattcctcgctcggccaggtcctaactcactccgtcaaacccgatccgggcgtctggcccgaattcggttttctacccgccatttcgagaacttttagcagagacggagacttggtttcgcccaaggaaaacatggccagtgggaaagaaaatgctaagaagagaaagcctcagaactccaaggtggaaagttgcggagattgataataacaaggacaaggacaagagagtcaaagtaactggcgaggaaggagaatccaaagtaaccgagcaccataccagaaacaagaatgccaaatccaacgcaaataagaacaacagagtaagcacctctgcggacacttccaaaggctctgaggatcaaaatcagaaaccagactacattcctgtccgaacgcgtcgtggacaaaccctggaatgcttgaagaaatcatcaaagattatcaatctcttcaacgagaaagaagtttaactaaatgaaagatgttatagcgggttcaagcatgatttcagagagaagttcgattgcttgaagaaaatttttaattttgttcaattaattttccacccgtagttcagtgcttggcattgaaattagctgctctatttgccaaacttgacttcaatcttgacgtacaaattttccaaagaggtgttttcttcctgtgctcacagttttccaaagatatggattgcctcagatatgagtattagtaacaacccttcgtatcatcagttcaattcagcgcagcaacttgtatcgtgctgtggtggattaataaacagcatgggaataagccctcccaacatgggactccgaacgaacattattagtactagcactgtacctttgcccgaaacttttcttgactcttcctgtttcgctcaaattctaccctcctcaaattgggaaggtggtgatttccaaagcctttacaacgttgcttttgatcaagggcgaacagcatcttttccccctcagccatttacaggtctagttgaagctagcaatctaaaaatggagatgtaaaccagatcatccattattacaatatgttggattaggtcactcggaatgcctttgtcaagattttttttcttttagagtacatagcatatattggttgtatactgctccgtagaataaataagatcatattaatacctgttaacttctttcttttttcttttttcgagtacataacatatattggttgtatactgcaaaaaaaaaaaaaaaaacctgttaacttcgcgtcgccgggcctgaattccgttccggta

SEQ ID NO: 125372 - DNA, 242 bp, Glycine max
  Clone ID: PAT_MRT3847_84220C.1
tggcaatgtaagtgtcgaggagccacccatggcaagctccagggactgttttttagttctccttgccggtcgtgccggtcatttcatcaaaacttgcacaatgtcacaacatagttagcttacttcctggcttgcacggacccgttcctttcttacacgaaactgactacgcgaaagtcgatgaatctgaagcagaagagcacgcaaaactctcctattattgtcatcgagtcaggagaacg

SEQ ID NO: 125373 - DNA, 546 bp, Glycine max
  Clone ID: PAT_MRT3847_84221C.1
attggtcccatcccaggctcaataatacttgggctcgagcacgcctaacgcgttatttgtttgttccaaatcccccccccataaataagtcattggcaagcatcaagttgcaatcaaagtcagatgccataattcttccttttttgcctttctttcagcttttgtcaatacagggttcgatatcaatgccttggaaaagacaagcaaacccctatatcatgtcttgccgtatttcaagtagagaggaagacattgtcaaaagttcaattgatatgcgcttcttttctagtgtcaaatgggtgggggtagtggaccatgatgtaggcgcttttatagtggggcttagtttttgtagtgggctgtgggaccttctaaaaggttagagtgtggtgtgtgtatatttttaatagtagtgaagctgaaatggacaatagttgctttaacaatgctgggctttgccgagtcctgcaaaaaatgatgatgctttttgtttgtttagggcgtgcgtgagttgtttactcacaagtaattggacgacttttccct

SEQ ID NO: 125374 - DNA, 308 bp, Glycine max
  Clone ID: PAT_MRT3847_84222C.1
ggggttgggttttttttttttttttttttttttttttttgtggggaggggcccccccccaatttttgtaaacataaattaaataaaccttgggccgggggttttcaattttttccaatccccccttttttaccaatttattttaaaacccaattaaatgaagcattttttttgaagctaaaatagtttggccaaaattacaggtttggggagcccctaaaaaaccctaaatcctttttttttttggcccataacactggctgggggttaaatgccacaaaagcatcccccttgaaggttccaacccaa

SEQ ID NO: 125375 - DNA, 342 bp, Glycine max
  unsure (1)..(342): unsure at all n locations
  Clone ID: PAT_MRT3847_84223C.1
tcttgcngaagaaaacaacaaaagggggcccaggggggtttttggaccgggttagctgaaaccagttggtgaaaaatgaaggccctggtttcttcagtggcaccattttgggtggcatggaattcccttccgtccaaatggtcccttttccgatggacccctggttttggggcccgtcctccgaaggtgaatggcccaagtggagggctggctgggaaagcccccaccttcttgggattgaggaccatccccgaaaagggggtgaaagcaccaagggattccttccttggcaaccattttttggcggaccccaaaccggtcacccaacaagttacctttaat

SEQ ID NO: 125376 - DNA, 176 bp, Glycine max
  Clone ID: PAT_MRT3847_84224C.1
cgccacctcagtgggtggttatagtatgcttttaaccatggtggccaatgcatataccaccataacaaaggtattacatcaatataccaaagaaaaaatggtgttttcttgggggggtactttgggtgcgccagtgggcttaccaagacttaaatactgggggggagcggccaaaa

SEQ ID NO: 125377 - DNA, 1631 bp, Glycine max
  Clone ID: PAT_MRT3847_84225C.1
gtgcttcataacacaggtgacagccatctatctgcttttacggtagatgatgaaatgaacacaaaccatgctccaaatggcacatcaccaacatttctcagcaactggtcacctccaaggtacctgtggagggggttgtcagttttaatcctggcagggcaggtgattgtcaagactctaaagggaaagattcattggaggaacactcttcaacaactggagagagttggtcctaaatcagttggagtgtgtcttttaacttcagcttttgtgggcatggccttcacgattcaatttgtaagagagttcaccaggttgggattgaatagatcggtaggtggggttttagctctggctttctcaagggagctaagtcctgtggttacagcaattgtggttgcagggcgcattggaagtgcttttgcagctgagttaggaactatgcaggtttctgagcaaactgatacattaagagttcttggttcagaccctgttgattatctggtgacaccaagagtgttagccacttgtattgcgttaccccttttgaccctgttgtgttttacattagggatggcatctagtgcccttcttgctgatggtgtttatggggtgagcatcaacattatcttggattcagctcagcgagctctcagatcatgggatattattagtgcaatgatcaagtcacaggtttttggtgctatcatatctattgtgagttgtgcatggggagtaacaactttgggaggtgctaaaggtgttggagaatcaacaacgtcagctgtggttatttctcttgtcggcgtgttcattgctgattttgctctttcttatgttttcttccaaggagcaggagatcagctaaagaattgcatttaagcaactaatgttgtctctgcaattttgctcatatgtacaaagtgaatggtatgaattttctacaagtgctgtgataaaatatttagaatttggatcaggtgcattggtcttgttcttttctaagttatggattgcaagacttattatttgtacccatttttgtatgacttggtgtccttcaaacatggtaaaggtgtttatttttccttcaaatgtgcattattctaataattcagtaagctacaatgacctgatattttgttttgttaaagaggctataatgttattatccagctgatggccaatttgtaacgagcttagggtgcctactgcatttgtttcatgaaaaacccaagtaggaatgaaggcccctcagtgaactgatggagttccaactctaggaattgacctgatgagcaagtctatatcctctcgtttatgtgatgatctgatggcttcaaaaccattagcaagcatacggattatcctagataatcttgtaacaatgatgagtccttcctcactttttaaccactagatgctgagctgccttagaatcttattcaataataactttgggaaatttcatctccatagccatggtaataccaaagaaaccccaaaactccggcagagtgaaagcaagaactgggtttgcaggaaaacagttggcaaactactgtttctagtaataccaccagtctacaagccatatagtccccttttccatcaatatttaattgcaaccg

SEQ ID NO: 125378 - DNA, 124 bp, Glycine max
  Clone ID: PAT_MRT3847_84226C.1
ccgcgcgaattagtttgggactgaggacaagcttgggaaggctaacacacattaatactgcggcggaaagcttccagcggcttgttggttcccaaacacggggcttcgggcctggacgcccagg

SEQ ID NO: 125379 - DNA, 299 bp, Glycine max
  unsure (1)..(299): unsure at all n locations
  Clone ID: PAT_MRT3847_84227C.1
caaaccaannaagaagccaccagcgaacaagccaccagagnacaagccaccagcgaacaaaccaccgngaaataagccaaaaccaccggnagacaagccgaaaccaccggnnnacaagccaccagagaagaagccaccagacaagaaaccaccggagggaaaggacccnccagnagaggacaacacccaaagccaaagcaagcaangaggncgaaaancgacgcaagaaagaagaggaaccgcatggaagagacgagcatagtgatttacaacttcgtagcnttgcatattcttgactc

SEQ ID NO: 125380 - DNA, 370 bp, Glycine max
  unsure (1)..(370): unsure at all n locations
  Clone ID: PAT_MRT3847_84228C.1
gtcactataaacctgttaatccagttcttgtgccaacttatgctaatcactattactcaaatcatggggattgtacaaaaaacatgggggggcgtgattcataaacatanaacttttactagacaccatcttgtctatcaaaccctccatttaattcctcttccaaattacactacttcttttactattcacatcacatttaataatcaccttgcatttacaactcatccaacgtttggcaagtcttcacaatattccacttatgtttccaaatctttcgatactcccatctttcacctcaattgttaatatctttcaccactccttcatgccttttaacttcctcttaattgccccacactttccactc

SEQ ID NO: 125381 - DNA, 925 bp, Glycine max
  Clone ID: PAT_MRT3847_84229C.1
ccggctcgaggcagaacatgttttttgttccagctgaaaacagagcaaacttttggtatgcaatggattatggcatgtttcgcttctgcatagctgacactgaacatgattggagggaaggatctgaacaatacaaattcattgagcattgtcttgcaacagtagacaggcagaaacaaccctggttgatttttgctgctcaccgtgtgcttggatattcctctgatttttggtatggtgtggagggttcatttgaagagccaatgggaagagagagtttgcagagactttggcagaaatataaagtggatattgcattttatggccatgtccataactacgaaaggacatgccccatttatcagaatcaatgtgtgaatgatgaaaggtctcactattccggtgttgtgaatggaacaattcatgttgttgctggaggagcaggaagccacttgtcaaatttcagccaagtaacccctaagtggagtctttacagagactacgattttgggtttgtcaagttgacagcattcagtcattcatctctcctctttgaatacaagaaaagcagtgatggaaaggtctacgattcttttaccatttcaagggattacaaagatgtcttagcctgtgtgcatgatagctgtgaagcaaccacttcagcaacttgaactgcttctttgtacacatgcacgttctagtagcttttcttttctggtctttcttttcttgaaaaaaaaaatgtagccataacaaatgttatggcttaaacatttataatttttaagtaccctcaagtaaaagttattagttacactttattcaaggagtaagcatggtctgtacaattcttattgttcatgttagacttatagactatatagctgcaatagtacaatatataccaaattaataccatactaat

SEQ ID NO: 125382 - DNA, 147 bp, Glycine max
  Clone ID: PAT_MRT3847_8422C.1
acagaactggagtgagcaagttgagcactcagtcacgtagggtagaatcgtgtcgtgttgattggtgttttttgcggtttaggcgattggaaagatttcattggataattgaggaaacacaatgagtggtccacctcatgatgatga

SEQ ID NO: 125383 - DNA, 473 bp, Glycine max
  Clone ID: PAT_MRT3847_84230C.1
tacggctgcgagaagacgacagaagggttccatattgatcaatgtcttcatctttcctacgttcaaatacatcctctacatttttggatgagctggcagcatcacttgatcgaacatttaaatcattgtcctgattcttgtccccaaataacttagcaaaaagtaggtccttcgcccacacaatacagtgaacaaactgccataaaataaagagatgaaagcttagaactcattaaatagaatattgaagcaaatatcaaaattcacacatcaaaatgataatcatttgataatgtgaaaggaaaatagcttgagtctatcagttttatccatttgcctaaaatataactaatataacagccttcaatattatgttaaaaggtatctacctagtagcatccatcaagatacaacaatgcatcataaaatattccattcaatgaaatccaaataatcatgaacctacaaatacc

SEQ ID NO: 125384 - DNA, 388 bp, Glycine max
  Clone ID: PAT_MRT3847_84231C.1
gattcctgatgatgctcccgcctttctttttggtttattattattatggtttcactacaatatctcttttatgtttatatacactattagttttatgtatgagtagttggtttgctcatcttgaagcatatggaatagtttgacttgactttgatgatattgcagtgaaacactcttatctttttgtgaaaattggtgtatgacttggttttgaattgaatgcatgattgtgatgagcttatgttttctttcatgagtttagcaagtgtgtatgttagacaaagaaagaacaagaatgtgaacttgcaattagaaatgttagtcagtagacaaattgattgagaaagaaaaacttgaaccataacccggtaagagtgtgatcttaaac

SEQ ID NO: 125385 - DNA, 2797 bp, Glycine max
  unsure (1)..(2797): unsure at all n locations
  Clone ID: PAT_MRT3847_84232C.1
caaaatatgatttctgagtacagatttcaagataaagaacgatatttcaaaaaatgaatccccccaccccctcaagggaactactgcatacacatgaatgaatttgtttgcttgcaagctttgtgatgatcttgagttgcaaatgtatgctaatacaatgccttttccgtccgatctcgctcctctctctctctctctctcacacacacacacacacacacacacacacacaccaaacactctcaagttttctctcagatttggtactttagggttaactaggaacgaactgaaactgttggactttcaattcgaactaaggcaaaaccaaaactcatttcatgtaattcattttctctctccccccgaacactcaagttttatctctcagcctcagtttgctgctagaggttgcatatttggggtttcacacgtgcgcaatttgaaggtattattggaggagagagtgtaaatgaagaaaccaacaaccgacgcaattagtatggggaaaaggagcctggagggtggagaagatgaccagcctgaacgaaagaggcctgctcttgccagtgtaattgtggaagctctgaaggtggacagtttgcagaagctttgctcatctttagaacccattcttcgtagagttgtcagtgaagaagtggagcgtgctttggcaaagttaggtcctgcaagacttagtggaaggtctcctcctaaaatgattgaaggccctgatggtagaagcttgcagctgaaatttaggtcccggttgtctcttcccctattcacaggaggaaaagtggaaggcgagcagggggctccaatacatgttgttctgattgatgccaatagtggaagcattgtaacatctggacctgaatcctgtgttaaacttgatgttgttgtccttgaaggtgattttaacaatgaagatgatgaagattggactcaggaggattttgaaagccatgtggtaaaagaacgtgaaggaaagagacctttgttaactggggacctgcaagtgacactcaaggaaggagttgggacattaggggaactgacgtttacagataattccagctggataaggagtcggaaattcaggcttggcttgaaggttgcatcaggtttttgcgagtccttacgcattcgtgaagctaagacagtggctttcacagttaaagatcatagaggagaactatataagaagcattatccaccagcattgactgatgaagtgtggagattggagaagataggcaaggatgggtcattccataagaagctgaataatgcaggaatagtcacagttgaagaatttcttcggcttgtggttaaagatcaacaaaaattgcggaatatccttgggagtggtatgtcaaacaagatgtgggaggctcttttagaccatgcaaaaacatgtgttctaagtgggaagctctatgtttattatccagaagatgcaagaaatgttggcattatttttaacaacatctatgagctgcgtggccttatatcaggagaccaattctattctgctgattctctcactgatagccagaaggtttatgtagattcattggtgaagaaagcatatgaaaattgggatcaggttgtggattatgatggcaaatcactcgtgaatgctaaaatttcttctgaaaatgaacttcaggtggagtcaattgattatggtagtggtttagatcatcaactgcaactgccggcccttccagtgtctgttccttctgaacagcaaatcaattcagggatgcctgttggaggttacaacgataataatatagtaacacgatatccaacccagtcattgattccaaactccagctcccggaatcagttcgatagctcattatatgtgtcgaatgaccaattaatcagcaatgctcaccaaacccaaagcactagtaatgatcatggcaccgttgggttagctcttggtcctcctcaatcatcgacatcagggttccatgctggcagctcttctgctataaatccttttgatgattggtcccacaacagggacaagggggctgatgaattcttttcggaagaagaaatccgcttcagaagtcacgagatgctagagaatgaagatatgcagcagttgcttcgcctcttcagcatgggaggtcatggctccatgagtgctgaggatggcttttcattcccatcattcatgccatctcccagtataccgaactatgatgaggatcgctctcgcccaggcagagctgttgtgggatggctgaagatcaaggcagcaatgaggtggggcttctttatcaggaagatagccgctgagaagcgggcacagatagaggagttagatgaataagttgtatggacaatggttgcaggcttaacagttagccataagataatactgatattctgcagatttagttgtctttatcagtgccaaccaaattgtgcagtccatggtgttaatattcttgatctatgtatctgtgtatctgatttgacagcagcacgtttgtcccagtattctgtacagtttgttgaagcttaggaaaaaccgtgattgtcaatttgtttttctttttcacgtttatgctcctttctttccattggctttgggtttttagggattctgtgtttacgcaacccccctcatatttgagacgataactaagattggtcatctcactgtatattttgagctacttgattttctatttatattacgagttattatcttgttatccaaaaaaagaaaaaaaaaaaaaaannnnaagcggccgctctagaggatcct

SEQ ID NO: 125386 - DNA, 547 bp, Glycine max
  Clone ID: PAT_MRT3847_84233C.1
cgcaagctttgttttcaggctccagcctattatgatttctgagtacagatttcaagataaaaaacgatatttcaaaaaatgaatccccccaccccctcaagggaactactgcatacacatgaatgaatttgtttgcttgcaagctttgtgatgatcttgagttgcaaatgtatgctaatacaatgccttttcaggttacaacgataataatatagtaacacgatatccaacccagtcattgattccaaactccagctcccggaatcagttcgatagctcattatatgtgtcgaatgaccaattaatcagcaatgctcaccaaacccaaagcactagtaatgatcatggcaccgttgggttagctcttggtcctcctcaatcatcgacatcagggttccatgctggcagctcttctgctataaatccttttgatgattggtcccacaacggacagggggctgatgaattcttcgagagaaacgcttcaatccttttgatgattggtcccacaacagggacaagggggctgatgaattcttttcggaag

SEQ ID NO: 125387 - DNA, 346 bp, Glycine max
  Clone ID: PAT_MRT3847_84234C.1
cagctcgacctttacaactttttttttcttttacttcgttacggacttttttttctttgggttttcggaagtttgctgctagaggttgcatatttggggtttcacacgtgcgcaatttgaaggtattattggaggagagagtgtaaatgaagaaaccaacaaccgacgcaattagtatggggaaaaggagcctggagggtggagaagatgaccagcctgaacgaaagaggcctgctcttgccagtgtaattgtggaagctctgaaggtggacagtttgcaaaagctttgctcatggttagaacccattcttcgtagagttgtcaatgaagaaatggagcgtgcttt

SEQ ID NO: 125388 - DNA, 1044 bp, Glycine max
  Clone ID: PAT_MRT3847_84235C.1
atactaatctatcattttattttatttataaaaaaattatcaaattacaaataaaaattttgccctcccttcccttcccttcccttccaaatccaaactcctaaacatatcaaaggctaaagcaattggattaagcataaattgatggcttggttcaaacttaaatttagagaaataatagcctcccaagaagccaaaagacattagcgatcatttctcctaaataaataaaaccaaacaccgactaagcaatgatatcaacctatgtttagcgatctcaaataccaccattgcccaagagggaaaaatcccacgataacaaaccagaagttgcccatcttagttggctcatatttgttcagaattaagcacttggattcatcaaaaacatttctccgaaacatgcttttatatacctatagtgtagaggcaattcaaaccccaacttcgttaatctttgaattgcaattcctacattccaagaatatcagctgcactaccaatccccctatagcacctagccgtaagtacaacacagcagtgagagggtttcattattagcgctgccaccattcaccatgcaaagtaaaccaccaattccatccttacactattacaccctcttccctaaactaataaaaaaaaactaaactatttaagtagtcctaaaagtccaataaagcatgccaagtaatcttccaaatattaacataaccttctaaattagagtacagtgacggacattcagccctccatacattccttaaacactaatttcattcattactttaaggactactaaggagagacacagggtaataatagtttgaggacttaattgatggtttattcattcttcgcaagcaaatgaacacagaatcattgcgaaatcattgtttctcttccctctcccgattccactgctcgatcctcgcacggcgctcctcgctcccttccctggccggactcccatgcctcctccgtccgccaccgtccctctctctatactccctctccctgctcctcctcccacgagaatccctc

SEQ ID NO: 125389 - DNA, 557 bp, Glycine max
  unsure (1)..(557): unsure at all n locations
  Clone ID: PAT_MRT3847_84236C.1
tcgtctggctatcagtgagnaagttcatgtagattcattggtgaagaaaggcatatgaaaattgccatcataatccacaacctgatcccaattttcatatgctttcttcaccaatgaatctacatatgaaaattgggatcaggttgtggattatgatggcaaatcactcgtgaatgctaaagagtcttctgattttttttttcatgtggagtcaattgattatggtagtggtttagatcatcaactgcaactgccggtccttccagtgtctgttccttctgaacagcaaatcaattcagggatacctgttggaggttacaacgataataatatagtaacacgatatccaacccagtcattgattccaaactccagctcccggaatcagttcgatagctcattatatgtgtcgaatgaccaattaatcagcaatgctcaccaaacccaaagcactagtaatgatcatggcaccgttgggttagctcttggtcctcctcaatcatcgacatcagggttccatgctggcagctcttctgctataaaaccttttgatgatt

SEQ ID NO: 125390 - DNA, 618 bp, Glycine max
  Clone ID: PAT_MRT3847_84237C.1
tccggaattccggctcaccccggctcgagcgagggctcgaaggaggtgcttgttgcgttgtggggcacgccctaagcggaagcggttaatcactctgaaccgaaccgaaactaaaccctattcatttcggaatcgcagaacattcgaaccagagaaacaagagaagagaacgatgactatatggaactacgtcgtcacggctcacaagcccaccaacgtcacccactcctgcgtcggcaatttcaccagtcctcaagacctcaatctcatcatcgcgaaatgcacgcgcatcgagattcacctgctttctccccaaggcttgcagcctatgttggatgtgccgatatatggaagaattgcaacacttgaactcttccgccctcatggtgaagcgcaggattatctttttattgcaactgaaagatacaaattctgtgttcttcaatgggattccgagactggtgagcttgttacacgggcaatgggggatgtttctgaccggataggacgttccacagataatggtcagattggcattattgatcctgattgtaggttgattggtactcacttgtatgatggtttgtttaaaggttattccttcgacaataaaggaca

SEQ ID NO: 125391 - DNA, 941 bp, Glycine max
  Clone ID: PAT_MRT3847_84238C.1
tttacgcgtgggcggacgcgtgggcttgaagggtgcattaggtttttgcgagtccatacgcattcgtgaagctaagacagtggctttcatagttaaagatcatagaggagaatgtagggttatgcttctacatcttttagtttttctctagcatcagggctctccctgctcctacactgtaatagcatcttttaaattttatattttgacctttttctcagtatataagaagcattatccacctgcattgactgatgaagtgtggagattggagaagataggcaaggatgggtcatttcataagaagctgaatagtgcaggaatagtcacagttgaagactttcttcggcttttggttaaagatcaacagagaagggggaatgtaagtttagtttttgcgtcttaatcttgaagttaggtcacgagatgaatcagaaagactataggcagcagtctattcgcatgggcagcatgggaggtcatggctccatgagtgctgaggatggcttttcattcccatcattcatgccatctcccagtataccgaactatgatgaggatcgctctcgcccaggcaaagctgttgtgggatggctgaagatcaaggcagcaatgaggtggggcttttttatcaggaagatagccgctgagaagcgggcacagatagaggagttagatgaataagttgtatggacaatggttgcaggcttaacagttagccataagataatactgatattctgcagatttagttgtctttatcagtgccaaccaaattgtgcagtccatggtgttaatattcttgatctatgtatctgtgtatctgatttgacagcagcacgtttgtcccagtattctgtacagtttgttgaagcttaggaaaaaccgtattgtcaaaaaaaaaaaaaaaaaaaaaaaaaaaaaaaaaaaaaaggggcggc

SEQ ID NO: 125392 - DNA, 188 bp, Glycine max
  unsure (1)..(188): unsure at all n locations
  Clone ID: PAT_MRT3847_84239C.1
cttgtttcatgactctttggtacacttaacanccagatgccaaattatnatgaattgtgtcattaggcagagaaagttggatccggatttcatgcagatagggaaaacacacattcaccaaacaattctaattaattgattgcgtgaatgtgtgttttccctatctgcatgaaatcaattaattagaa

SEQ ID NO: 125393 - DNA, 180 bp, Glycine max
  unsure (1)..(180): unsure at all n locations
  Clone ID: PAT_MRT3847_8423C.1
ncattccnatttccgngtgaangaatttngncgtcnngnnantgaaaagccattacnaagttgaaattttttccaatttcccagnttctnttngctggaacgggaaacgtttaatgacttttggactcgttnncttagcttngacnaatgcattactcacctttaggatgatactgtttc

SEQ ID NO: 125394 - DNA, 415 bp, Glycine max
  Clone ID: PAT_MRT3847_84240C.1
ggctcgagtctcatctcattttctcgctcctctctctctctctctctctcacacacacacacaccaaacactctcaagttttctctcagatttggtactttagggtattgttgaaggagagagtgtaaatgaataaaccaacaagcgacgcaattaatatggggaaaaggagcctggagggtggagaagatgatcagcccgaacgaaagaggcctgctcttgccagtgtaattgtggaagctctcaaggtggacagtttgcagaagctttgctcatctttagaacccattcttcgtagagttgtcagtgaagaagtgccgcgtgctttggcaaagttaggtcctgcaagacttagtggaaggtctccttctaaaatgattgaaggccctgatggtagaagcttacagctgaaatt

SEQ ID NO: 125395 - DNA, 344 bp, Glycine max
  Clone ID: PAT_MRT3847_84241C.1
ggggcacttataacctaaaaaccagctttgaattattttttttgggttttttgaaataaaaatatataccgggtttataattatggaatggttgggggggccccaaaaccaattaacttttggcgtttaccatttcctcccaaaagatgctttttttttgaagaaaaatataatccataacccaaagggttttttggaaaactcaactttgtttaatgggtgccaattctatttgtttttggataaaattttaccatttattttttggcaacaagggaggaacccccctccaccttaacattctttggaggggaagaaaaaaggcgggcatttaaccgccttaa

SEQ ID NO: 125396 - DNA, 378 bp, Glycine max
  unsure (1)..(378): unsure at all n locations
  Clone ID: PAT_MRT3847_84242C.1
ccacgctcccagaagagacggagggggtgctatctaataattttcacatttatgtgtaattgtgattttactttattgtggtaaatttctaaggggtccattgcgtaagagatctcgggcagtgagtggacataaccgtgacgtgagtaatcatcagtaatggggagaaagtgtctttcctttcccagagagctaacatcagaatgtgcacaaatatcagtgtgcgcaatttcaagaggcggagtgcgtcttntggctcatttctttgggtgtgttatttgtgttcccttgagacaatccacacaaatatttagagccgtgaaatctagagcagggggagggtcattctttattaagctttctatcttttctctaaaa

SEQ ID NO: 125397 - DNA, 982 bp, Glycine max
  Clone ID: PAT_MRT3847_84243C.1
gcaaaattaaaagaaaaaattatacaaatattattaataataattcgaacacctgtgcatgcatattgcaactacttttttctcttgtacccttgatcgatggggatgattcggatgctaaaaaggtataaacggcataaatgaattgggccatatatattaggccattagcatagtcctatcatcctttattcttttgtcaaaaagaatagtcctttcagcctgattttttaagcaaagcaaacttgccatccaatgaacatttctttgaacacctaagtaaaagcaaagccatttgtgacattcgtataagaggcaaacaaatatatacttgaaattatttacaatagcatacatctaaatctgatgtatattttggttagatatttcaaaaggttaatgtaacatcccaatttttcgtaaataaatttaaaaagttttttagtaaaaaaataaataaataaataaatatagagcaaataataggctgagtaccctaggtataaatagttatgttaagtcagctgcctccttttggcctcattttcgtttttccccttctcctctcaaaaccctttctttttcccgcagctcaccaaaccagtctcagaaaaataacgatctcgaaaccgttcaccgttggatcgtcgtgaaatttgagtatcatgttcgcaaccaaattccaaacattctcaccgttgtgaatttcaaaatcatatctgagcttagaggaaaacccttcgcattgtagcgttttaatttcccgcagaaacccaaaaactgtctcggtaaaactacgatcccggtttcgttagccgttggatttccatgaaagttggatatgttgttcgaaattcaattccacacccttccaccgttgggatttgcgaaataatattcgtggaggaagaaaaatgaatcgcatgaagacagtacaagtggaggttttaatctcttctccgtctctttgacgtttgggaat

SEQ ID NO: 125398 - DNA, 329 bp, Glycine max
  Clone ID: PAT_MRT3847_84244C.1
cccacgcgtccgcccacgcgtgcgtgcggacgcaaggagacatcagaacggggctcgcgtgcggtcgttgctcgagatcactattaaccgctcaatgaaaatgtatgtccttgtggagcgcgttggtacaatttgggcagcatggcaatgccatgcgtacgatatgttggctttccgaatgaacactgggtgtcgggccagtactccagaggtgacatgcgcaaggcggaggcttgctgtggtagcacacaacctctttgggtctcacaccattaatgaggagtgcaccgtaacaacacacgttttcattcgtggaaaacaatataaac

SEQ ID NO: 125399 - DNA, 443 bp, Glycine max
  unsure (1)..(443): unsure at all n locations
  Clone ID: PAT_MRT3847_84245C.1
tggatcctctagagcggccgctnnnnttttttttttttttttttttttttcgccattttttaaataaggacctcgtattttatcgtgtgggataacaccaacaacgggtgatctttctttgaaaaacacccatcgacgtatatttaattatttaatctggttggacacattatcttcattaacacaaaaatgccttattaaaaaaaacaaaacctttatattcatatattcactgctgacacgttaatctttgaagccctaatgttttggtaacacgctgcttcaagaatgttaacacccaattattgcactgattttccccttcccacttgcacttacacataacaattattattttcatcctaaggggaacgttttgtcttcaagctattcaagagcttcttcttttaatatctttagttcaaaaaataaacaacaccttt

SEQ ID NO: 125400 - DNA, 235 bp, Glycine max
  Clone ID: PAT_MRT3847_84246C.1
aacatctgaaaactttgtcaatgccactgttgaacaacgctacccatgaggcagattctttgaccctttgagcttggccggtactatccacgatggagtttaccttcccgataccgaaaagctctaaagattgaaattggctgagatacagcatgccaagattgctatgttggccatgctgattttctactttgaggctggtcaagggaagaccccccttggtgctctcgggttg

SEQ ID NO: 125401 - DNA, 1035 bp, Glycine max
  unsure (1)..(1035): unsure at all n locations
  Clone ID: PAT_MRT3847_84247C.1
ggcaaaacgctgctttggttcttaaggagatgcatgttgaggctttggtgaaatgtgtaggagtttttgaggctttgattaacatgattaaggagcctgttgggagtggttccaccaaggcctgtttgtcaacgattttcttggttagtaatacttcagttagaggtgtgacttgtcaaaggtttgtggaattgggtttggttgatgcggtgttggaggttcttgttgatgcggagagaggggtgtgtgagaaggctttgggggtgttggattgcgtttgtgattgcaagcaaggggtgcagatggcaaaggctaatgctttgactttgcctcttgtgattaagaagcttttgagggtgtctgagttgagttcaagctttgcggtttcggttctttggaaacttttttgtgacaagaatgaagaaggggtgttgattgaggcgcttcaaatgggagtgtttcataaactacttgttttgttgcaagtgggttgtggtgagggaaccaaagagaaggctacggagttgttgaagttgttgaatggttgtaggagcaaagccgagtgtgttgattcgtccttggatttcaagcatttgaagaagcccttctaatttgatctggctaggatatgagatttcattccactttttttttgtataggtcatattggtagaaacagaatatactcttgtacaaagacacacacacagagtctcatatacggaggatacaaattggtatctctaacactcaattgaagttttgaaattcattttttttaatggaaattttagatttgagacatacggacctgtaattaacaaattcaaaatttacatagaagaaaatgttattacttaccgnggattgttatgtattgtttgattattagatcaaattgtacaatttttaaaatgaaaagaccaatatnttgaagataaaaaataccaaaccaaaatttgttctttaagaattaaaagcgaacccatattaagaaaaattagtacatacttaaaatctttagaactgtttaca

SEQ ID NO: 125402 - DNA, 203 bp, Glycine max
  Clone ID: PAT_MRT3847_84248C.1
tacagctgtgagaagacaacagatgtgctagttccttgtgattgatacaatagctctgtactcacacggtgcacatactcacgaagatgagaagctcttgggtatcgtgggaatccaatttgagagcccagtccaaacttgttttaatgagaagggagttgactacatacacttgcatcataattattccagccagagtgatt

SEQ ID NO: 125403 - DNA, 370 bp, Glycine max
  Clone ID: PAT_MRT3847_84249C.1
ggtaatcatcaagatttagtcacacttaaaattctttttccctctaaaaatattgatcctaaaagtaaaattaaataagcatacctttaatatattagaagattaatattttcctaagtataattatcatggcaatttcaaatacttttcaattttgaactgttataccttgaactagttaaatttacaccatggcccaagaatgccaagatagtgaaaactacctaacctgcttcacaaccaccaacggcctccttcacgtatcaaaatggtattgatgtcaagaccatgaagtcaaacaaactagaattgcctgctaattaatctacacaaagtatgtagtgactcacaacacacaaagtggaataaa

SEQ ID NO: 125404 - DNA, 268 bp, Glycine max
  Clone ID: PAT_MRT3847_8424C.1
cgacgaagctcgaatgcgctgcggatattgaaactaataggattaaaaaatcctaactttgacccccttatttgcaacttaaaaattgcggcacgcggaggctttccactttgggcagggaggtaaaaaacctccctttaaaatcacggtttaaccctttgaataaaaataaaaaaaccggccttaaccataggccattggtccccctcttttgtttttcccccaaggcgaccatcccactttgtcaaccttttatttattaaaacaa

SEQ ID NO: 125405 - DNA, 409 bp, Glycine max
  Clone ID: PAT_MRT3847_84250C.1
tgttctttgggtaggaaaaaacctagtatgcacaaatgctacatgggacatgagcataaggatgcagcacattctaaaagttgtagtatgcaacactttcacagaagtgttatctggagccagaaagttggttgtgggagccacccccaaaaccacaccaccttgatttggcaagttgaggtgatgcagctgcttcacttaagtgattgtggatatttaaaaattaacagaagttgttcataatatatcaaatcatcactaaaatagtatttaatgagaattaaatcataacaacattaaaaacttaaagtattccatttaacaatactggaacacaagttaataacaagagtcaagtaataatataaaggaaaaaaataaagtacagcaagaaagggaaaagtatggt

SEQ ID NO: 125406 - DNA, 398 bp, Glycine max
  Clone ID: PAT_MRT3847_84251C.1
ctcaactctctagttgttgttgctgcatttttcattctctaggcttagtcattagatacaaagagaaggaaaaaaaaggctattatggcaggacgaggagctccaactaaagcaaatgaaccacagtcacattcaccaaaggatcacgcaccaaatattaattactgcattactagttctcttccatggactgaggccatacttctagactcttaacattttgtctgcatgcttgccacaactgtgtacgattcccaccgctattgctgcccagatggcaagtggcaatactgacaaggccacagttatcacacccccgctgtgtgcagctagcattaacacatcgtcgcaaacaatgtctggaactctattgcctgcagtaataggagggtcttaca

SEQ ID NO: 125407 - DNA, 216 bp, Glycine max
  Clone ID: PAT_MRT3847_84252C.1
gttgaaattgatctccttcctcagacaccaccgactagggctccgagcaattcatgggcctagcggtctaatgtatgacgtgtagattacggtcaccaggaggctgcactcatatgagggagagatccaagaccgtacgaggtactaactacgaggttcatcggagatgaatatggagatggcaaaagactcgaagtgatacgtgactgctgggag

SEQ ID NO: 125408 - DNA, 278 bp, Glycine max
  Clone ID: PAT_MRT3847_84253C.1
cggcggatggggactgtcactatgactataactctctaagatgaggagtggataactagagagaagacataaattgaaggtatgcattgcacctataagaagagggtccgtatagactattgttgttaatttcgatggaaccttgtgattcaagggggcctgtctatatgattcacgattgagtacgctacatacctacgggatgtaagatctgagtggaagctctataaaacgcatcggacggaacatgacaagaatgtgaataggaaaatcatacg

SEQ ID NO: 125409 - DNA, 265 bp, Glycine max
  Clone ID: PAT_MRT3847_84254C.1
aggtctgcggccgcgcctttttttctttttttggctattcagaatgccttggcattgattcagctgaggatctttgaggtgtaccacggctccctccaacctatggggtcgtggtcacaatcctactccatcgactgaagaagataggttcatcattgcttaaattcactgagaccttatggctggttggttgctctatctaaaatgggttagcgaccttcggcgcaattagagggtaacgctcacggttctactgggatctgtt

SEQ ID NO: 125410 - DNA, 536 bp, Glycine max
  Clone ID: PAT_MRT3847_84255C.1
gtaaatagggggaaattggaacgcataaatgaacctccagtattacctatccagcaagcaaagaaaaggcgccgaaaagatgtaccgaagaatcctggagaacatattgatagtcatgtatcaaataaacatgtaaaagtgggcaagactgctgctggaaagactgcatcgttacctgtgaaaaatacgattagttcctcccataatttgggtgtacctggtgaacattatgaagacatgacatttcagaatcaattggatgtgtctggaattagtttgaaaaggaaaactgctgacacaagaccaatgttggatcctcctgtttgttcgaaagtatcaactaatgctcctgctgctgcagaagatgctgaaaaacagaagactagagtacttcaatctaagaacacaagtgataaatataaagatgcaagtggcttgcttgatacttctcgtcagaagtaccatgaaaaaagtgcatctgcaaaatccaaatcccagcctggaaaaatctcaattagtgttgacaatctagaaaa

SEQ ID NO: 125411 - DNA, 106 bp, Glycine max
  Clone ID: PAT_MRT3847_84256C.1
cgcaggtaacatgtcgcatatctatctcctctgcttctcttaatatgactcactctggcatctctcacccacacgtaaacaagaacaattcttcattgaatgaagt

SEQ ID NO: 125412 - DNA, 315 bp, Glycine max
  Clone ID: PAT_MRT3847_84257C.1
gtgcactgcttttcatgacaatgaagagacatttttgaaaaaatacttatatgaaattgccagaagacatccttacttttatgccccggaactccttttctttgctaaaaggtataaagctgcttttacagaatgttgccaagctgctgataaagctgcctgcctgttgccaaagctcgatgaacttcgggatgaagggaaggcttcgtctgccaaacagagactcaagtgtgccagtctccaaaaatttggagaaagagctttcaaagcatgggcagtagctcgcctgagccagagatttcccaaagctgagtt

SEQ ID NO: 125413 - DNA, 365 bp, Glycine max
  Clone ID: PAT_MRT3847_84258C.1
tgaccacccccgtattacaacgggccacccagcaaagtggcgggggcttaagcgggaccgtttgcagatcaagctcaaagatgatccatgtctgccgaagacaggtttcatgacatccttggctcagcaggccataagaaggacaaagctagttatatgcatggcactcaccaatccagtcgatccatctctgctaaacccatcaatcatacatgccaaaagttaggcgcaaccgctctggacgaagaccaaaatctcattagcattcgccaatttgatgtgaaaaaaaccctcaaaagataatgcaaactagaagtacaccacgttatgagcactatcgaggtggcttcgactatcaaaaccga

SEQ ID NO: 125414 - DNA, 136 bp, Glycine max
  Clone ID: PAT_MRT3847_84259C.1
gccgaggtttatacccaaatatgcactttttctcccccttgtgttgatgtatacatatgctggaaaactcagtggaacccgtaaatgtagattatggctaatgtctaatatttcattctagttaaaaaaaaacaaa

SEQ ID NO: 125415 - DNA, 168 bp, Glycine max
  Clone ID: PAT_MRT3847_8425C.1
cccgcgtccggtgtgaactggctactggctgtcatgccttgattcatcttcttccagtgagtgtctacactacggatagagctttggttacaccacaggtaaaagggctggaatggagcccttgaggttgttcttgttcatgtgcagaaagctgcttgtttttgtgtt

SEQ ID NO: 125416 - DNA, 435 bp, Glycine max
  Clone ID: PAT_MRT3847_84260C.1
cacaagatgacatgagggctgtaatgcgctacttgcatgagacaatatggaaaggtgtgccatagtaacgggctcaggtctatacaggtctgaagaacattgcaattaatgaacgtggccgatatagtgcttcagtaatgcagtgctgtacttggatggaacgataccgcgatggccattctatgacaacccctgaaggtcaagggatgggtgtaagctggcgtataatgatggctgctaatatgtacttttattacaacgaggatcacatgtgggagttgtgatatgaggcgttgtaatgacgagctacgtgtgccagctcatgatctccataggtcctcatagagaggtgcaaaacatgctattgagctttggaaacagattcctacaagtgagccatatcgcgttatacttggtgatgtcagatacaaacta

SEQ ID NO: 125417 - DNA, 251 bp, Glycine max
  Clone ID: PAT_MRT3847_84261C.1
ggtttcttgcattcaattttttggcaggagaacaaagaggaatcttggaacaagttgatgacttgacttttgctcaagttaatagagaaaataaatatgattcatttaatgatttttggttcaacataggataagatgtctatagtaatacttatgagaatgcgatatcaaatcatgtattctgagtaaagataatttgctttcaaaaaaaaaaaaaaaaaaaaaaaaaaaaaaaaaaaaaaaaaaaaaaa

SEQ ID NO: 125418 - DNA, 284 bp, Glycine max
  Clone ID: PAT_MRT3847_84262C.1
cctatcatactctcatccacaaaaatcaattacatatactctatcaaacaacataataccacattgtcaactaatatccattaaccttaaataatcctcctttctcacctatttccatattcttctcccccctcaccatcatcacataaatcaacactcaattcaaaattttctaaaccctactatactataaatataccaatccttttccccctgaaacctccttcttcccctctcctgttccaacccttcctcttaccctatacctttcccactttcttcct

SEQ ID NO: 125419 - DNA, 1329 bp, Glycine max
  unsure (1)..(1329): unsure at all n locations
  Clone ID: PAT_MRT3847_84263C.1
tggtacgacctcgcggtttcggtccggaattcccggctcgaccccgcgtccgggaagacggaaagggaagccgaagcaatctctgagcaacaaattagggtttcaacattgaatagtccctttttcttccccaaagagaaagtcttggtttagatgagttggtctcaacaatgggttctgattccaatttgggagggtcgccctcagcatcttcgcccagtgccaaacgcaccagagatcccgaagaggaagtttacctcgacaatcttcgctctcacaagcgttacctaagcgagataatggcatccagtcttaacgggttgacagttggagactcacttcctgataatctcatggattctccagcaaggtctgaaagcatgttctctttcagagatgatatgtcttttttgcaatattcaccgatgtcagaagattcagatgacttaaggttttgcgagacccctgtgcacagttgctcatctcaactcgacagtcttcccagtagtccagtttctccacacaggtaccaaagaccacagaatgcatcatcttcagcaccttcttcaagttcgaatgcttctcatgtctccacctttacttgcccccagcctcgtcagcgagggtcagattctgaaggccgcttcccatcatccccaagtgatatatgccactcagctgacttgagaagagctgcacttctaagatctgtgcagatgagaacacagcctcctggccctgcatctttggacctgccttttgtttctaaccaagagtctgctcctaacatagatcctgaggaaagatcttgctcatatatgaaatctctggttgacgagagagagtattgagagttcatcaatgggtattccgtaaccccgatttcaaccttggtcatggtattacgccgtgcaggtcttaatgtgtttggaaggttaacttgctatattggagaattgtctcagtatcactatccagcgtctcctagtacgagatggttgcttgtgttagtcttggtcttgtttatgggattttgtcccccctgccgctcccctcccttctccccgcaccgtcctccgccccccagcccaaccttaggagaaatatcagtcttggtcttgtttacgggattttgtggtcccgctatagcccattgtctcctccacctgctctctagtaaattatgcgtagtcctttttttttgtcaaaggagaatcatggaatttcattcattaaaaatagagttgtaganacannntggtgtaatatggaaaattttgggactagcataacatagagcagcttttgcaagcaattgagctacagtag

SEQ ID NO: 125420 - DNA, 217 bp, Glycine max
  unsure (1)..(217): unsure at all n locations
  Clone ID: PAT_MRT3847_84264C.1
ctcccttttatactgttcctgaggaaggagactgtcattgaggcgggggaaacccatacatcaggtgaactcaaccactgagtcttctaagacgcctgctattcttgcagatgggacctatgccaccccaagtgctgctctggaaaccgccatgtnaccacccacccttgtacagggatctctgtccttaattgggaacttgaaatcactaattttt

SEQ ID NO: 125421 - DNA, 155 bp, Glycine max
  Clone ID: PAT_MRT3847_84265C.1
caagaactactggatgaatgctgcctctgatcggacatgactttcgttgatgcatgctacaccagttagcgcagagagaactgcattggtgccctcgacctacaactctgtctgagaggcacattccagaagatttttgatcatcacctatgact

SEQ ID NO: 125422 - DNA, 516 bp, Glycine max
  Clone ID: PAT_MRT3847_84266C.1
gctattagcactcataatatctgcacagcagcggtttaaggatgctgaaactatagttgattttgctttagatgattctggggggatggatcaacttgaacttctaagattgaaagcagtgcttcaaatttctcagcagcaacccaaggaagcaatagagacatataggatcttgctagcactaattcaagcaaaaaaggagcttttgcttcaagataaaaacattgatcaagaacaagcattcaggcatgaggtgtgtagtactttccaaggaagaactctaacatcccttgtatagactactgattctaaagttgattgaaaagaagcaatactcttgtctactggaagctgctaaaaaaacaatggttacacctagactcccccctcctatccttccccttttcaaaaagagaaatgctaccaaacacactctttatcattagttgaaatttattgagaatacattattttgtgggttccacatcttatttaaggaatccctcttttgatttt

SEQ ID NO: 125423 - DNA, 278 bp, Glycine max
  unsure (1)..(278): unsure at all n locations
  Clone ID: PAT_MRT3847_84267C.1
gctcgccaaacgcccctctctctcctccaatggccgaccagctcaccgacgaccagatcgccgagttcaaggaggccttcagcctcttcgacaaggacggnnatggttgtattactactaaggaanttgggactgtgatgcggtnnagggcaaaccccctactgnggcagnnctgnaggatatccattactgaggttnatnctgangncaatggaaccatcgtttnccagattcctcatcctgntgncccccnaagtgaaanncccgctccggggggg

SEQ ID NO: 125424 - DNA, 127 bp, Glycine max
  Clone ID: PAT_MRT3847_84268C.1
ccacgcgtccggtcacttaatccagaaccaccatgcatcctctcgaacctcatgattttggataacatactaatggtgattctaccaaggttgagtggacatgaaagcgccaattgggagaagtggg

SEQ ID NO: 125425 - DNA, 319 bp, Glycine max
  Clone ID: PAT_MRT3847_84269C.1
tcgaggctatggaatgcgtgatactcatcgcttgatgactcaggagatagtgacagtgctgtcatacagcgtctagttgccctagaggcattcgaccctgcttcattctctgcccatcacgcttgcctttttcaagcattttgtgtggcggacttctaaatctatagcgtcattgagcgcagatgagattgcctagtcccacgtctagccaatgctgacgaaagagcatcacatgcctctccagagtcaactggcctccacttgccatcatgcgatactacagagatcctggctgaaccaccatcactgatcgcagccg

SEQ ID NO: 125426 - DNA, 549 bp, Glycine max
  Clone ID: PAT_MRT3847_8426C.1
gtgatttattatttatcacaaatttctttaattttgggtattttgtgttgtttttgagtattcatatatgtagtatatatttcctttggtcctatatgtatgaaacaaatatgtaattcatcaaaactaataaaaataattaaatttgttaattgtaattaataatgtcataaatttaaatttattccaaaaatactcagaattattatcatgagaaatgactgaatgtctcattaatagacttcaaaataaattgaaagatataaaagaaaattgacaattaatatatttgaaagtttataattaggatttaggaccaaaagaatgttctcatttgtttataaaggaccagaggtagtactatttagttgtatttatttaaaatagttgtcattctgagcccttttgcttgtaactctgccactaaacaagattaatagaaacaagctttgacatattacatacagcaaaggctttgtatctattattgctccagtgagatcattgaaagagttgtactatattctatggctaattgattatgccaat

SEQ ID NO: 125427 - DNA, 449 bp, Glycine max
  unsure (1)..(449): unsure at all n locations
  Clone ID: PAT_MRT3847_84270C.1
gatcatgcctcaagggaggagagggaaggtttcaacttttctgttcttccatctccacctaagagccaaggggaagaagcttctttttttcctttntacatcctatcaatggtgctagtgntgatagcaccccttccacaccanttccacantctgggcanataagcaattcttgcttgattgagactcaggacccatcccaacagcctttaattcaaggcattgggagaaaaagacactttataggagttaggcagagaccgtggggnttatgggctgccgaattccgcgaccctaaaaaggctgcttgagtgtggcttggctcgtttgacactgcatangctgctgctgctgcttctgntgctgctgctntgaagttcataggctcttangccaatctcaatttcccagaacacgttcttgttcctcctcctccatttcntccttcc

SEQ ID NO: 125428 - DNA, 213 bp, Glycine max
  Clone ID: PAT_MRT3847_84271C.1
agggaggatcgttcccaggcacattcaacttgcggtttggagcgaccaagagtttagccagctgattggatcttttaccatttcccacgggggtgttctggctaacattcaccaaaatttgttgcccaaaaaagtcgcttgccagggggaaacccaaatttgatctgctagtcaggagttttaaatataaaagccttggtttcccatgtagtt

SEQ ID NO: 125429 - DNA, 173 bp, Glycine max
  Clone ID: PAT_MRT3847_84272C.1
catccaaaactttatattattaatataacccgcgattttttaaaaagagcccgatccatacatttgtcaatataaaaaactatcccaccatttccaataagcctcacaaccttttaaaaaatcaaaacccaaggtaaatctaattcctccccatggtaaaatacaccccaaaa

SEQ ID NO: 125430 - DNA, 142 bp, Glycine max
  Clone ID: PAT_MRT3847_84273C.1
atgttgcaaacctcccactgcttgtgggtactattatgtaaaccccatactgtggacaaaccctgttatccctatggctgattcatattgctacttgtggagcaatgacctaaatcatttgtgctaccatagtgatgcttgt

SEQ ID NO: 125431 - DNA, 251 bp, Glycine max
  unsure (1)..(251): unsure at all n locations
  Clone ID: PAT_MRT3847_84274C.1
ctcgatccttcttaatcttaatgtgcataaatagatttagggatctgcatatgtantgttgctcaaacttaagtttttcgctagcttgcagtaaccccaatacatatatatatctggcaagtttcatcttcatggaatgtatctagtaaagtaaagtaaaaaaatgtcagtgaaacccatcacaatgtgcatagcaagagaaaaacactttttctttgtaaaattatctcttaacaatatttttataatgt

SEQ ID NO: 125432 - DNA, 111 bp, Glycine max
  Clone ID: PAT_MRT3847_84275C.1
ccaccactgaaataacttccattcactactataacatggcttcttctaccagcatctcttccttcctaacatcatccccttcagggcccttcaacataccatcatctcctt

SEQ ID NO: 125433 - DNA, 638 bp, Glycine max
  Clone ID: PAT_MRT3847_84276C.1
cattattgcttctcagaattaattgatgaggtgtaattagtaattacatgcaagtctatgccagctaaacaaagtaatcatcgttcatgtatgggtgaatcatgaaggaacagctgaataaattatttgtatttttcattaaaaaaaaaaaaaaaaaaaaaaaaaaaaaaaaaaaaaaaaaaaaaaaaaaaaaaaaaaaaaaaaaaaaaaaaaaaaaaaaaaaaaaaaaaaaaaaaaaaataaaaaaaaaaaaaaaaaaaaaaaaaaaaaaaaaaaaaaaaaagggggggccctttttagggaaccaaatttaatgccccggggtgggaaaataaaaattttttttatggggccccaaaattaaaatcccgggcccgggttttaaaaccgtgggatggggaaaacccggggggtacccaatttaaagccttggggaaaaaacccttttttgccggtggggggaaaaaaaaaaaggtgcccactaatttgtttttccaaaattggcccccctctttttggttaattgcccccccccttaaccgcgcaattaaaacgcgggggggggggggggtcccccccagagtgcacccattaaattttttccaaagccccataatgcccccccgtctctttttacc

SEQ ID NO: 125434 - DNA, 618 bp, Glycine max
  Clone ID: PAT_MRT3847_84277C.1
taagcgcagaaaacatggctcctaagctttcagaagaagaacgagctgctaaacttaagcagatgcaattagctgctcagctgcatgaagagcagagatggaaacgtataaagaaggctgaggagtcggatgcaaaggaagcaatccagaatgataatgccggtggcaagaatttcttggatactgctcagaaaagtgtatatggtgcagctgaaggggggagtgcatcaatagccgagagtgtccgtcgtcggacatattattctcaaggaagatctggtggtgaaagcaatgcttttcggcgatgaatgctggatggttctatcactatatcatttgtctccagacccctcttgcatgtgctttcttccttggaccaacaaattgttccttcggtctataatatgtgaaaacctgtttaattttagctagataatatgttaagaattcatagttcaaccttcatgattcgaaatttctaatgttctcttgtgattttaaggtgtcatgatgggaaatgtttaaaggtatgctgtggcgtctacgcatactgttgatttctgcttgggtagtgcttgtatgatggatatttgaataaaacatcaatatagttttttg

SEQ ID NO: 125435 - DNA, 325 bp, Glycine max
  Clone ID: PAT_MRT3847_84278C.1
ggtttcacttgaaactagccctaaacctggacacaatcaatccatcacagatattgcaacaaacctcatatccacatattcatcaataaacacaaaacccatttacctaaaagaaaaagaaaacttgttaacacacaccacaaggtcgtatttgtagggggacaacaccactttaacttccattatatggcacaatatacctattccatccttaaaaagaagggttcagctaaaaatctcggtctcaattctcaataaaaaaatataaaaaaaaaaccttctttgtcccttcatacaccggattattcccataaccccttccctt

SEQ ID NO: 125436 - DNA, 642 bp, Glycine max
  Clone ID: PAT_MRT3847_84279C.1
ccacgcgtccgaaaaaaaaaaaaaaaaaaaaaaaaaaaaaaaaaaaaaaaaaaaaaaaaaaaaaaaaaaaaaaaaaaaaaaaaaaaaaaaaaaaaaaaaaaaaaaaaaaaaaaaaaaaaaaaaaaaaaaaaaaaaaaaaaaaaaggggggccccttttaaagaaccaaattttaaaaccccgggctggcaaagaaaaaattttttttttggggcccccaaaattaaatccctgggccgggttttaaaaacgggggaaggggaaaaacccgggggtacccaaattaaatccctttgaaaaaaacccccttttccccagggggggaaaaaaaaaaaaggccccccccaatcccctttccaaaaattggcccaccctaaagggaaaagggaacccccccttaaccggccaataaaccccggggggggggggggttcccccaaggggaacccttacatttgccaggccctaagcccccccccttttcgttttttccctttctttttcgcccaggttcgcggtttttccccggaaagtttaaaatgggggccccctttaagggccccaataaagggtttaacggcccccccccccaaaaaaatttgttaagggggaggggtcccgaaggggccccccccccgaaaaa

SEQ ID NO: 125437 - DNA, 452 bp, Glycine max
  Clone ID: PAT_MRT3847_8427C.1
gtgaaaatggagtggcccccgacaggtcactggcccctgctgggtcttccagtctcagacagctctctgctatgaataagctaatgctgatggctctgggagtgattgctgaacgtacatcacgataggagatggccgtgttgagagaaatcgcccaggctatggatactgacaacagtggcgcattcactgccgatgaactgaaagctagtctaagaagatatggctctacccttagggagatatataaacgcgaccttatggaagcggctgatgtggacatacggggcaccatacactgtcgggagtggactgctgaacagttcatctcaacgaactagagcgtgtagaacatatcattgcaagattccaatattttgacaaggatgggagtggctacattacaggtgatgaactgtaacacgcccgggccgaacacaacatgactgacg

SEQ ID NO: 125438 - DNA, 231 bp, Glycine max
  unsure (1)..(231): unsure at all n locations
  Clone ID: PAT_MRT3847_84280C.1
gttctatattttcatcaacatggggagggagattctcatgaccactnttggatcctacatagttattcctttgttcataaattgtatnagattgtcactattatggaaatcacaatctcggtagatccaaacaaataacatagctgattgttatactactaaatatccaaaatagcaacgatgtttagctaaatttgccaaatgcttaggtttcttacaattgcccaaatc

SEQ ID NO: 125439 - DNA, 205 bp, Glycine max
  Clone ID: PAT_MRT3847_84281C.1
gggggccagttcaacaacaaaaacaagggcaacttttaaaatacatgggaaagccctagcaaaagtctgagggctaatgcaaagtctttcaaaaaacaacatttccgtaacaacccttgaaacacaaaaaggaaagggcctaacccaagggtgatttgccagaccagtgaacttgtttttgattggttccacctttcaccggcca

SEQ ID NO: 125440 - DNA, 485 bp, Glycine max
  Clone ID: PAT_MRT3847_84282C.1
ctctcgctcttcaatggccgtatcctctattcgaatcgccgtcgtcggtgatgtggtaaagtatccggttcccactgtcgttacagttccaattttcctaacacaactttcacttaacatgttttctaattttggaacgattccaattacctgattttggggggttttctgaagcatgattgctggaaccttgaacaagattcgaaagcacttgagctcttgcagccagatttggtgctgtttacaggcaagtttcattgttactgatcaacctatcacattacggtgattaatcttaaatgcatttaagtgcctttgctttctcattgcctattttaattggtatggaaatagctggtgtacacctatgaaaaatcagtgtccatgttgaaaattgaatgccatggcattgatctgtttatgatttgcattaatagccagagacctgaacaaatcagcatgtcagtgtgcgccaagtttatgcc

SEQ ID NO: 125441 - DNA, 356 bp, Glycine max
  Clone ID: PAT_MRT3847_84283C.1
cccacgcgtgcgctgacgcatgttcgaaacaatcatatgtcgtctgttctgtcccgcgggggcaggggacctatcttggtcgaggagcaacctcaaaaacattcatcaacgttcactattaatccatccatcattaagtaagaaaataatgttcgatttttttatcttaaatctgcttctgatccatcatggatgagccaacttcctgcgatgcccttcacaaacaggcaccaaaacttgaagctcagtttgatgagcacatcaatccttatcgtaaaatggcttctacccatgtgtctacaaaagctgcctctccacaaagtgatctatagtctcttattgagcctttactcaaa

SEQ ID NO: 125442 - DNA, 983 bp, Glycine max
  unsure (1)..(983): unsure at all n locations
  Clone ID: PAT_MRT3847_84284C.1
ggctcgagatctcttgcaacactacaattttgcttacatgggagccaagttaacaaaaaggataagacttggcatgctggagaatatcttgacctttgaaactgcttggtttgatgaggaacaaaactccagtggagcattatgctcaaggttaagcaatgaggcttccatggttaagtcccttgtagcagacagactctctttactagttcaaacaacttctgctgtcacaattgcaatgatcataggccttgccgtggcttggaagctagctcttgttatgatagcagtgcagccactcacaatcctttgtttttatacaagaaaagtgttgctctccacactctcaacaaaatttgtcaaggcacagaatcgaagtacacaaattgcagtggaggcagtttataaccacagaattgtgacttcatttgggagcattacgaaagtgctatggctatttgatgaggcgcaagaggcgccgaggaaggaggcgaggaagaagtcttggctagctggcataggaatgggttctgctcagtgtcttacgttcatgtcatgggctttggatttctggtatggtggtactttggtggaaaacagagaaatatcagctggggatgtgttcaaaacattttttgtgttggtgagcactggcaaggtcatagctgatgctggaagcatgacttctgaccttgccaagagttcaacagcagtggcatctgtctttgaaattcttgaccggaaatcgctaattcccaaggctggacataacactaacggcatcaagttggaaaagatgagtggaaaaatagagttgaagaatgttgattttgcatatccaagcagggcagggaccccaattttgcgcaagttttgcttggaggtgaagccaggaaaaatgttggacttgttggaaaaagtgggtgtggaaaatcaacagtgattgccttaattcnaagatcnatgatgttaaganaagttca

SEQ ID NO: 125443 - DNA, 1400 bp, Glycine max
  Clone ID: PAT_MRT3847_84285C.1
ctgtttcctgttaatttgcacagatattatcttgggagttctgtgcaaggtgccatgaggaacttcttcctcgaaggttggttgcaccacaggtatgattctgcattcttgaatgcttttcacttctgcagccactctttgttttgaatagatgatggggctatttggtagaatatttctgtgaagtagatccttatttattgcctggttttaatcaaaagttgggactaacctggagttgtctactttgtatcttcagcatatttccgacggaaattctgcatgtgcacattgttgtataattgactccttgcatgcatgtattcttccatcgtatttcttgtgattaggggcacaaaggaaatcaagctctacagcagcagcagatgatccagcatctgcggcaggaaatgtcaaatcacaatgggggactgcaatcacagtctcttggtggacataatgcaaatgggaatatttcaaagaacacaatgggttttgggggccatactccatctttaagcggaggttctgccaatgttccaggaaacaatagacccatttcaaggaataatagcttcaaaacagcttcaaatagtgattcttctgcggccggtggcaacaatggattcaaccagagaacatctgatatgcaacaaaatctacatttgcaagacgtggctcaggatattggcaatgagttcttggataaccccttctttaacagcgatcttgatgacaacatgggtttcagctggaaggcatgactagcacaacttggccatgtaattggcatatcttgttgaagtgtttatcttattatctttgtacaggacactttaaatttatgggtttttttatttattttcctccttggttttccctgtcattttcttgatggaatttgtttggactcggactcgagtaggtgtttagagattttatttgagtgtttttgtcctgcaagtgtaacctattggacaattaaatgaacaattagctttctatacggcacttaaaaaaaaaaaaaaaaaaaaaaaaaaaaaaaaaaaaaaaaaaaaaaaaaaaaaaaaaaaaaaaaaaaaaaaaaaaaaaaaaaaaaaaaaaaaaaaaaaaaaaaaaaaaaaaaaaaaaaaaaaaaaaaaaaaaaaaaagggggggccccctttaaaggaaccaaatttaaagccccgggggggggagggaataattttttttttggggcccccaaattaaattccgggggccgggttttccaccggggggggggggaaaccccggggggtcccccaataaaacggctggggaaaaaccccccttttgcccgggggggaaaaaaaagagaggcccgccccaaacccccttcccaaaaatttggcccccttaagggggaaggggccccc

SEQ ID NO: 125444 - DNA, 553 bp, Glycine max
  Clone ID: PAT_MRT3847_84286C.1
attttattactgttcgagcttcgcttcactcgtcgcttcgctcgcgagtcgaatcgtcccgaacctcctaacttgttatcaaccctaaccgtttctgaccttttccccccaccacgccaatgcgttttttcaacacaaccccctttccaaaacccttagggtttattatggaacccaagcatcagtatcgaaactccccgaatacgagatgccatcggtaacatggggcgtaatccagggtcgcaaggagaactcgtttcgcgagtaatcatcttcgattacctcaagtgtttgggaatcatccccgaccaactgcacgacctcgagcttccctccaccgtcgacgtcatgcgcgagcgcgtcgagtttctccaaaaattaggtctcaccgtcgacgacatttacaattacccttttaatgttggggtccagtgtcagaaaaaacatgatccccgtcttggggtacttggaaaaaattgggatcgcaaggcccaagcttggtggatttgttaagaattacccgcaggtattgcatgctagtgtcattgttgag

SEQ ID NO: 125445 - DNA, 466 bp, Glycine max
  Clone ID: PAT_MRT3847_84287C.1
aaaaacaaaaaagggggccaatattataataaaaaaaaaaaaggaaaggggggggacaaaaaacagaaaggcccccccccccattaacaaaacccccccccaacaaccccccccggttaacaaaccccattcattaaaaaaaccccctacccccacaggggggggaaaccaatttcccaacaaacccaaccctaaaaaaaaaaaaaaaaacccccataaaatcccaaacccaaaaacccgggaccccaaaaccgcaaaaaacccccaaaacccaaaaaagggggggccaaaccccccatattcaacggggggaaaaacccattattaaaaatgggcccaacaaagggccccgatgttgctggtgccccaaacccccccacaggggggggattcaacccggcaacgatctcattcaaaaaccctacccggggactaagcccacccccccggcccctaaccccgggtt

SEQ ID NO: 125446 - DNA, 123 bp, Glycine max
  Clone ID: PAT_MRT3847_84288C.1
atcaaaccactgcctccatctacagccaatcaacttctcaccaaaaaattaagtcacatacatcctcccatctgcctaccgcatccggtctctcctacataaccatcatacatatacactaca

SEQ ID NO: 125447 - DNA, 255 bp, Glycine max
  Clone ID: PAT_MRT3847_84289C.1
ctgcctcttcaatgatgcagaaacgtgcatgtggaaagtctatggggctactgatgacccttaaagacggtacctggcgtgatgcatgtgatggcctcggcatttccttgttgctgacatcaatccctggatttcagtatacggtgttgtagcagctgagtcaacgatcactgagtgaatatacaccccaatgctgctacatgctcatctgagcatcgctttccgcgtatatggtcattcctttacgtgcaattt

SEQ ID NO: 125448 - DNA, 441 bp, Glycine max
  Clone ID: PAT_MRT3847_8428C.1
cggacgcgtgggttctaatctgcagagtgcatgagcattggatctggaaacgcgtggaagaagaagaaatggctcgcgcaggagggataacaaacgcagtgaacgtgggaatcgcagtgcaagccgatggggagaaccgagaattcatctctcacattactgtcaacggtcgatgcctgttggacttcctcgtccaattcggtacacacgcatttccttttcccactctgcagaacgacccatcacggtgtcgttatatctatccatgaagcaacaccacgactttgaccttcacatgattgggtatccctgggtgctggagcacactgaatcacgccgaatgcacctgacagtttgaattattattctgccccgttgacatttaatgcgtgttttatagaggctacgacgaatagcaagttggcgtctttaaatgagaag

SEQ ID NO: 125449 - DNA, 390 bp, Glycine max
  Clone ID: PAT_MRT3847_84290C.1
catcatattaaatatatatgtaccgaaagaacacatacggggacacataaaaaatggggaatttccataaaaaaatacataaaaaacataacatgattgagtattatggaccgaacacatagagaaaatttttccatcatgataataagaacccagtataatagcaaaattcccttgacaagagtggtggaacccctattaggtaaggagggaccggttccgcccttgagtggcttcaccacttcccatgtaaaggcagggccatttttcccaaagggtccatatgaagtagtctttcaagaacctggcattgccaccccttttgagatcaaggatgatagaaaccatgccagccctgaaataaaaacttactttcacaacgctgaggat

SEQ ID NO: 125450 - DNA, 457 bp, Glycine max
  Clone ID: PAT_MRT3847_84291C.1
catgactcttcctccatccttatcggagccgccctcactctccgactcattctcgccgttaaacccagccctagccatggatagtcttcaagccacttacaaagacgaagaagatgaagaagacgagccgcagcctcaaccaccaccaaccaccgccgattcacctgaagcccctcccgccaccaccagcacaccctccgacaccccaaccgaacccccgaacgacgcccgatcggagcccgagccctccgaagatctctccgaggacgaggccgcctccgacggctccaagaaatcccccaaatccggccgcgaagaaggcgacgcctccgacgaggacccaccgccgaagaagcagaagcagctctcctctctgacggaggcaacgaaggaggacttggtagcgccgcaggatggcaccaacaacgcggcggcgacgccggcaacaaatggcgcg

SEQ ID NO: 125451 - DNA, 301 bp, Glycine max
  Clone ID: PAT_MRT3847_84292C.1
ggctcgagcccaaaccctgggtctctttgttgatggatgctttgaaaagcaacaaaagtacggtgtcctttggcaagacggtttgaacaataaaacacgctcgaactagatgtttatgcaaatacctgtgcaaaaagagacggtaagatccttagaccacgagagcattaaatacccctatagcacgagggtagtcccagaacatctgcaagacaatactagttgataaattcaaaagattctttgctcgctacacaagaccgggtgaatatatcaaagagtagtgctaaacaatgctggt

SEQ ID NO: 125452 - DNA, 242 bp, Glycine max
  Clone ID: PAT_MRT3847_84293C.1
ggctcgaggtacaagaaataggtgatgagctatttcatcacttggcgacaatgaacgacgacgttgactatgctgacttacgatccttgctgagccagacgggaggctcctatgacgacaggataacggacgagcaataatcgagagagcagaagccgagagcaagagagatcacagccataacgaccgagtgatagcaggtgatccgaacttaagcgttgaatgaaaatgggtggtaggta

SEQ ID NO: 125453 - DNA, 815 bp, Glycine max
  Clone ID: PAT_MRT3847_84294C.1
aggttagtcacatatatccctcttgatatactcaatttgcaatccgctacgtcctgagtgggaaggcttgggataatcttttggagaacaagactgccttcactacaaagaaagactatggcaaagaagagagagaagcacagtgggcaactgctcagaggactcttcatggtcttcagccacctgaaacaaccaaccttttcaatgacaagaacagttacagggagctttcagagattgctgagcaagctaagagacgtgccgaggttgcaaggctcagggagcttcatactctgaaaggacatgttgaatcagtagtgaagctgaagggacttgacattgatacaatccaacagcattatacagtttaaggaatttggacaaccttcaagcagaacacactttggtgcttatccaagaacaagaacaacaaatgtaatgaagacctaagttaatccgtctttagattaggatgaaggtccttttgtcagtcaaaatctgaatggtttactcttctattccataccaaataacgtggttgataggatttacttttcgtcttgttttgagaatgttaatgatatctaggtcactttaaggctctatatatatatattttttttctgatgaaaaaactcaatatatttccgatcttgattaatgttgctcaataatgagttcaatcaaaaaaaaaaaaaaaagagaaaaaaaaaaaaaaaaaaaaaaaaaaaaaaaaaggggggggcggccaactaggaagctggggaccccggaattaatttccgaacgggaccctgaagggtacccacttttcc

SEQ ID NO: 125454 - DNA, 1510 bp, Glycine max
  Clone ID: PAT_MRT3847_84295C.1
gttggtaatgagaaatgaggatgattggtatcagttaagttagctttatctggaactgctggttctcacttctcatactctcgaagcagagaagttaacaaccaatggccaccatcattgcttcttcctcatccactgtgctcttctctgcatcctcttcctacctcctcccattttcacacccttctacttcgcgcctttctttctcttcttccctttcctcctcctcctcttctctatcaatttctccttcttttttatcatacacttcttcaaattctacacactttgccactcatgctgccttcagcatcagtgccagcgccgccgagaagaagaaggtgctcatcgtcaataccaacagcggcggtcatgccatcattggcttttactttgcaaaggagcttcttggtgctggccactctgtcaccatactcactgttggcgatgaaggctcagacaagatgaagaaacctcctttcaacagattctcagaaattgtgagtgctggagggcgcacagtgtggggaaatccagcacaagtagggagtgttgtaggaggggaagtgtttgatgtggtcttggacaacaatggcaaggatcttgggactgtgaggccggtgattgattgggctaagagttcaggtgtcaagcaattcctgttcatcagcagtgctggaatctacaaaccaacagatgaacctccacatgttgaaggggatgttgttaaagcagatgctggtcatgttgaagtggagaaatacattgaagaaacttatggaagttgggcagtgttccggccacagtacatgattgggtctggcaacaacaaagactgtgaggagtggttttttgacaggattgttcgggacagacctgtgccaattcctggctcgggactgcaactcagtaacatagctcatgttagggacttatcttcaatgcttactcttgctgttgagaatccagaagctgcaaatcagaccattttcaactgtgtgagtgaccgtgcagtgactctagacggaatagccaaactatgtgctcaagctgcagggcgcccggttaacattgtgcattatgatccaaaagctgttggagttgatgcaaagaaggctttccctttccgcacctatcacttctatgcagaacctagagcagccaaagctaaattgggatggcaatcaaccacaaacctccctgaagacctaaaagaacggtttgaggagtacgtaaagattgggagagataagaaatccatccagttcgagctagatgataagatattggaggcattgaaggttccggtgtcagtgtgatccatttatatccaaaacaattatcagacaagactttaagattttttggtcgctcaattcaaatgatgtgcattgaagaaagttacttctctccttgttaaaataaaacaaaataaacttatgatgcttaagtagctcagttaggatatcatgactaaaatattccaaattcaaactataaattaagccct

SEQ ID NO: 125455 - DNA, 654 bp, Glycine max
  Clone ID: PAT_MRT3847_84296C.1
ccggtccggattcccgggtcgacccacgcgtccgcccacgtcgttcgcccacgcgtccgctctgttgatgtctatcgagcggccgttgacgattccgaacgagcgaccttcttcgtgtggctcgcgaagagactgacatcatgggtgaggaaaagactcacatcaacattggcaagattggacctgctgactatgggaagtacactaccactggtcatgagatctacaagcttggaaggattgacaagcatgcgattgagaggaacaagaaggaggctgctgatatgaacaagatggcattgaagtatgcctgggtgctagacaagctcaccgctgatcgcgatagaggaatgaccattgccatcgcttcgtgcggagctgaaaccaccaaccactaccgtacagactttgatgccaacaggaatactgactccatcaagaacatgagtactggtaccttccatgctgacagcgctggccttatcattgactccaccactggtggtggacaaactggtgtgcataatgatggacagactcccgagcatgctcttcttgctatcacccttggtgacaagcagatgatctgttgctgtaacaacatggatgccactacccagaaatactctaaggctaggtatgactacatggaga

SEQ ID NO: 125456 - DNA, 2199 bp, Glycine max
  Clone ID: PAT_MRT3847_84297C.1
attaacattctattctatttctatgtcctttttcttttgcatacgattccgaattactactatttgatcaaaatatttcatattttttaataaaagaaaaaatactccatttttcaattggtttccggttgtcttactcttgcattgagatgagatgcacccgcagtgcttcttgatatatattatttgaattctgattatgttttcttgagttataatcttgtcaatcatcacttgaaatcatcttaagtatcaattttaaaataattcttccaatacacactcgaattaaaatctattatttcctttatcaaagagttatactcacgtaacttatttgttagttgctgcccaaaatcttcagtagcagtagcactgggcgaattctactttataaccctgaaaaaatgaaggagctaagtatatcatcatcatgaattcgtgatgttaataataataataataataatatgtaacttaagataaagttggttaatggtgttatgtaattggagaaataactaggcagtgtcccatttaattattactatacacaccctctttctcctcctcctccttcttcttcttctccttctttctctttttcattctttctttcaacatgggtggcatcagcctcgaagaaataaaaaacgagaacgtcgatctggaacggattccaatagaggaagtgtttgagcagctgaaatgttcaagagcaggtctaacatcagaggaaggggccaatcggctccaagtctttggaccaaacaaattggaagagaaaaaagagagcaagtttttgaagttcttgggctttatgtggaaccccttgtcttgggtcatggaagctgctgccataatggccattgctttggcaaacggaggaggaaggccaccggattggcaggactttgtcggaattattgcactgctagtgatcaactctgaatcagtttattgatgaaaaccatgctaatctgcggcttcttatggcggctcgcaagagacattcatggaatgggatggggttgggctggtgtaatctggctctacagtttagtcacatatatccctcttgatatactcaaatttgcaatccgctacgtcctgagtgggaaggcttgggataatcttttggagaacaagactgccttcactacaaagaaagactatggcaaagaagagagagaagcacagtgggcaactgcacagaggactcttcatggtcttcagccacctgaaacaaccaaccttttcaatgacaagaacagttacagggagctgtcagagattgctgagcaagctaagagacgtgccgaggttgcaaggctcagggagcttcatactctgaaaggacatgttgagtcagtggtgaagctgaagggacttgacattgatacaatccaacaacattatacagtttaaggagtttagataattcatgcagaacccgctttggtgcttgtccaagaacaagaacaacaaatataatgaagaccgaagttaatccgtctataaattaggatgaaggtccttttgtcaaaatctgaatggtttactcttctattccatctatgccagtagctggaggagatgctatgctctttaggtaccaaataacgtggttgataggatttacttgcatcttattttgggaatgttaatgataccaaggtcactaaagctctatatatttttttgtctgatgaacaaaactcaatatattttcaatcttgattaatgttgctcaataatgagttcaatctccatgttttttttttaccttcgttcatgtccagcctaaaaaaatgtgagtggtagaagcccgatgtatacctccccccttaaattaaatagaaaaaattttttcattaatgagagaaaaaaaaaaaaaaaaaaaaaaaaaaaaaaaaaaaaaaaaaaaaaggaaaccgtgtgtgtttgagaaaaaacacacacaaatgttgtactatgattcatgtcttatttgtatgtaagtgtcgtagattaatgaatgctgcattcatgaatgatactgtatatcttgcttggtgtcaatggataataattgttaacaaatggtattaaaatcacacaaatagtttgatttccggtttttggtctgaatgagtcaataaggcatgtattttatttgcttatgtaatttttcagctataaatggtctcctgtattaat

SEQ ID NO: 125457 - DNA, 285 bp, Glycine max
  Clone ID: PAT_MRT3847_84298C.1
ttgagggatgcggcatgaatggagacctcgggcagaaggtgtctgtcactgctgaccctacaacaaaatactcaaaccctatttatgatgtgcaaccctctgtggacaccgctcaacactcagccccagatcactcaccatataaatacactaactcagtcctgcacgtcttttgtgggaagaaaaaggagacgaagaacacatctaataccctggcaaatttaaatgaataaaaacaccgcactagaaactgacaaaccgtgtgtggaccagataaaatgcctt

SEQ ID NO: 125458 - DNA, 417 bp, Glycine max
  Clone ID: PAT_MRT3847_84299C.1
gcctcgagcaaatgctctgtgttgtgctgtgtacttgtgttaattgtgttgttgatgtaggaaatataagtgaatagacgaatgatgacgacagtctgctatgtgtgcattggtgcttgtggcactggttgcggttgaagcgatgcccatggctgaggctgcttggacttgcaacccaacacatgcgactccttgacttccggcaattaattcaggacctgcaccttctagtgctcgttgccagaaggctgaggagcaatagccatgcttctgtggctacctcagaaaccctagcttgaagccatctgttctctctcctaatgccctcagagccgttagatcatgtggtatcgcctatgcgactcgcgaagcacctattatctatatatatgagaagtgcgaacagtatatatctat

SEQ ID NO: 125459 - DNA, 302 bp, Glycine max
  Clone ID: PAT_MRT3847_8429C.1
acatgggggcactcgtgattttgttgatcgggatatctagagactgcgtgatgaaaatgaaagtcctcgtgttcttcgttgctacaattttggtcgcatggcattgccatacgttcgacatgtaccatatgcgaatgaacactgactatggtgcccgctctacgtacgtgaactgcgcaagttggaggcttgttgtggaagtacactacatctttggctctgagaccattcctggagagtgccttggacctgcacaggtatacatgcatggctaacagtacacatcagactgcaaaacagtt

SEQ ID NO: 125460 - DNA, 220 bp, Glycine max
  Clone ID: PAT_MRT3847_842C.1
ctaacataggatccggggggtgccaaattgtgcttcctgacgacccgataacccggcactcttgggaaccccgatgacgagggggaccacgcccgcccactcttgacatgaaagtggagcatgagcgaagaacaaatccaaaacgcaagacactcttttcaaactcccagggggccgaaagggcaaggaaaccgactcaactgaccaacacaccatgaag

SEQ ID NO: 125461 - DNA, 873 bp, Glycine max
  Clone ID: PAT_MRT3847_84300C.1
ataaccatgaaaaaaatccccctgccccaagtaccttataaaaagccctggctcgtttctggtctaagcccttaaaaaacaagttcttgcctcctaatggaacgcttgctgcagtgatgagaatggacgttaaaaaagcagtgaagaacgccctggaagcattgaaaatcctgcagaaagccctgaaagacaagaaattttttggaggagagagcataggattggtagacattgctgccaatttcattgggtattgggttgccatattgcaagagattgcagggttggagttgctcaccattgagaaatttcccaagttatataaatggagtcaagagtttatcaatcaccctgtgatcaaggagggcctgcctcctagagatgaattgtttgctttcttccaagcttctgctaaaaagtagagccgttttagaggtaggattcctaataagttagcatgattttgttgggaaataatgataatcttgttgtgagtaaaagattgttctgttttaaatttaattgactgtggtattggttgagggtattggctattttaattttaactataaaaaactggtgttctgtgttgttgcctgatttctcaacaaaattgaaccaagctaagaagttgcccgaatgggtgtgcagtataggattttggtgcaagaggaatgagtgttgtgcttaaacctttcttcattattaatgttcctatctcccccatctatggtgtctggtgggaataagacacaagtcaaacatcattagatattgtatctgctctttcatgatcatttatgattgttcacaaaaggtttctccaaggatcagaaaacactaggtgaatacattgtccaataagttcccaat

SEQ ID NO: 125462 - DNA, 246 bp, Glycine max
  unsure (1)..(246): unsure at all n locations
  Clone ID: PAT_MRT3847_84301C.1
cccncgcnttttttttttttttaccgaacccccaactcatttctagggggctagcatgtacaccaagaactcttcaccccaaattttccgaacattgaatattgaccctgaaaactctactccattatcccggctatcaaaaacaaccccgtgccccttgagaacacacaacggcgccatctatgggaagaaaagactacccttcctcccaccaaaacaaagacggccagctgctcgatagaccgc

SEQ ID NO: 125463 - DNA, 240 bp, Glycine max
  Clone ID: PAT_MRT3847_84302C.1
ctcgaacccttgagcttccacgcagccagcaaaaatctcttgaatccttgagcttccacgcagcaagctcgatctctcgaacttccaccgccaccctccgtcaacaagtttgccttcccttgtgaagagctccgtcgaagtgcatcatctctctctcacttgtggcatcgtgtgtctcattgggcagaaaccctaggccccaatcccgtgaaggataagaaggaataatgaagaagaaga

SEQ ID NO: 125464 - DNA, 552 bp, Glycine max
  Clone ID: PAT_MRT3847_84303C.1
gccctctgtgacaagacttgccctgaacatcaggccctgggtggcctcagcccctgccacttcgacagggggaacatctagacctacggccttgcctcgggagacaacagccgaggttccactacttgcgacggaggctctagcctactacttcgacacgctccgtgggttagacctgaaccttccggagccgctgaccgagtactggtcgcccatggggtgtgagtttccgggatgatgatggaaggcggcgaacaggacgcggaaagcccgttgccggtgaccgtcaagaggccccgtttgattaccggggaagatgatgaaaccgaggaaatttgttcgcagtaattttattggaaatggattgatattgaattggatgctgggatatcccgaatatgatcgtgatttcgaaccaggtggcggaaatttaattttatgttatttttatagtatataagtggtattgggatgtcgcgctggtactccgtacatacaaattatgatcatcgctttgggactgttgtttgtcttggatacaatctaacaatt

SEQ ID NO: 125465 - DNA, 275 bp, Glycine max
  Clone ID: PAT_MRT3847_84304C.1
gctattactaatggagcccttcatgtctcaccaaaaaggtggaactgcagtgcttcttcttgttgcttccgtttcagggaatgcagatgcaggtggaaacgaattgtcagaagctgctccaccagtgagtttgttatttccaatgatgaaaactatagcaacaagcaagttgttagtctcactccccgcctttatgactatgtcctaaaaaatgttcgagaaccagtgattctaaggcaattgcgacaggagaccgcctctatgcgtggaaggtc

SEQ ID NO: 125466 - DNA, 154 bp, Glycine max
  Clone ID: PAT_MRT3847_84305C.1
ccccccctctagaagtcagtggtgggaagctgctcgtgggtgtggctgataaagacaacctcgcaaacaaggccagtgattccaccaccgatgagaggcccggcccaatagatccagtggatggtacaggttcagcttacgacagcaggcccat

SEQ ID NO: 125467 - DNA, 648 bp, Glycine max
  Clone ID: PAT_MRT3847_84306C.1
ccacgcgtccgatgcaatgcaatcttgattctttcttccttcgattttgttttccgttaaaaatcattctcttccattcagctctgttccgaattccgctcaagaacaaattgcatgcatgtttgggaactcagaaaaagaaagcaaagaaaatatattagcgttcacatccacctgaagtgttagctcttcaggatctatacagaacctttaactacccaccgatgctcaaaggatggaatggtagcgatccttgtggggagtcttggacaggagttgcttgttctggaccatcagtcatacagctgtagtgcacaaagttcactgattatatttcctatttagatcatagttaatgtcactaataactgttagtaattcgctctgtctacacgcacaaaatttcaaggattaaacctcactgggtatctgggaagtatgctatataatctacctaacttgaagcaactgtgagagtttgtatggcattagcctcttatctggatttattgtcaagatctgatatttatttatttccatgttatggtttctgcagtgatgtcaattcaaataacatcgtgggcgaaataccattcggtctaacccccaatgtcgtacatatgaatttaaaccacatgcaaattacta

SEQ ID NO: 125468 - DNA, 326 bp, Glycine max
  Clone ID: PAT_MRT3847_84307C.1
acgacgcgttcggagttgtgatcaactacgttacttctctcttagatttcttcatcgggcaactgcacctggatgacttccttcgataatgaactttgacaaaatcaaactttgatgttcttgcttgtctaaattacatctctgtcgttcgacgaatagtattacactattgtctgggaatgccgatcttttgctcttttctgaattacgcttctctgaaaagaagtttatcattaacacgcgtggtcgaatatgatcatccgatttattagggtactatttctcactctacatattagatctcgatatccgatgggtatgcccca

SEQ ID NO: 125469 - DNA, 403 bp, Glycine max
  Clone ID: PAT_MRT3847_84308C.1
acgacagaagggctctcaagtataacattaactggttctgaactaagttctgcaaccaaatacaattcaagcaaattagctcagtatcaaacaaagatcattatcaaaatttaagcgaaaacctcatattaaaacaatcgtatttctaacaaagttggatcctaaagtaatgtccgggagtcagattttggaagggaaaaaagaaaggaatatcttcatttctgtttaaaatccgattcaaatattttgtatttatagaatagctggttgtaggcaagtcatatctgatgtatagccaaatcctatctgatttggaggaacaaaatatcgtctaattatgtgcatttattgtactaagcttgtataaatcaaactctgtaatgccattcgaacacatggactc

SEQ ID NO: 125470 - DNA, 294 bp, Glycine max
  unsure (1)..(294): unsure at all n locations
  Clone ID: PAT_MRT3847_84309C.1
cgcaatttcatgcttctgcttccctctgatcttcttcaagaagatcccaggagtatctggtgggaggcttctacagtggttgctggtccaccatctattgaaattcctgctggaagtgtgctgagatctgcattgtcaggtggcctatcttgtgccctgncatgtgcattactgcatccagttgatacaattaagactcgagtacaagcattaacaatgtccttccctgaaataatttctaagcttccagatattggaaggcggtgtttatacaagttctctattccttcaatt

SEQ ID NO: 125471 - DNA, 840 bp, Glycine max
  unsure (1)..(840): unsure at all n locations
  Clone ID: PAT_MRT3847_8430C.1
ataacagctttctcgtctcgtatcacagtagtagtatctatctcatcattcccacttcccaatatggaatgctgcataatctccaggctcaagacccaacccatatggttcgcgcttctctttattgtgggattgttaacgattctcaaattggcattcgttgttctcagatgggtctacgtcaatttcctcagaccaccgaagaatctcaaaaagtacggatcttgggccgtggttactggacccaccgacggcattggaaagagcttcgccttcgggctcgctcgcaagggcttgaacctcgtccctgtcggaagaaaccccgacaagctcaaagacgtgtcggattccatcgcggcgaggttcggaaaaaccgaggttaagaccgtcgtggttgatttcttcggggatctggacgagggcgtcaagaagatcagcgaagcgattcaagggttggaagttggagtgctcgttaacaatgtgggtgtttcgtacccttacgcgagattcttccatgaagtggacgaggggcttcttaacaaccttattaagcttaacgttgttggaactactaaggtaacgcaagctgttcttcccgggatgctgaagagaaagaagggtgcgattgttaacatgggttctggagctgctattgttattccttcggatcctctttatgctgtttatgctgccaccaaagcgtacatcgatcagttttcgagatgtctctatgttgaatacnagaggagtgggaattgacgtttcagtgtcagggttccattatatgtgggcaaccnagatgggcatcatcaggaaatcttcattctttgtccatcacag

SEQ ID NO: 125472 - DNA, 487 bp, Glycine max
  unsure (1)..(487): unsure at all n locations
  Clone ID: PAT_MRT3847_84310C.1
aaaacaaaaaagggggggggggggtttttatttttttaaaaacaaacttaatcatacctcccctaaaaaaaaacaaggggggataaacaaacccgggttcaaaaaccttaaaaaaaaagcggaccccttggccccaaaaaaacaattgttagtccccacaagcccttttccaagcttttacctaaaaacaaaaccccctaaccggattttcctttggaaaaaaaccctttcccccctgaaacccaaaaggccaaacttttaaaaggggtttttaagggttgaaaaacataccccaagttaataatccttttgccccccaaacagggggaaaagggcaaaaaaaaaaaccccatttttaaaaggcccaatttatgctgaaccctgcaaaaattagggggggggcaaaaccaaaggttccccttggcttcccccttaaanttnttgggccaccttttttttttgaaaaccaaaaacattgggggcaatt

SEQ ID NO: 125473 - DNA, 319 bp, Glycine max
  Clone ID: PAT_MRT3847_84311C.1
gtacgcctgcatggaccgctgctgcattgccggttccgacccacgcgtcccgggaagactacactcgtacgcgcagttggatgaattgcatacagatcaatgggcgcttccatctgggctccgtcactggcgctgcaccagcgatgacttgaactgttgcatcccatgtgatacgcgctatctatcctgggactgcgtcgtgactcatagctttggtttggggggccatgcacagaaagacctcgcccgatcagtagcaaaagatatatatgaccacgggacgcctgatatagatcttgatctagatgcgccacccttc

SEQ ID NO: 125474 - DNA, 484 bp, Glycine max
  Clone ID: PAT_MRT3847_84312C.1
cgagaagtgtgtttgatcccacttccagtctttacaattaatttttttttcgtcgcgtctcgccattatgcgtgccgacaccacactcattgcctctcttctggcggcctcggccgccgcccagcacaacttgactggttacaccaacaacacctccgtcgacaactcctacaacaagaagattgtcgccgacctcgaggctgaggttgccgctctcaagcaccagctcgaggaggcccaggccgagacctgcgatgtcacccccgtggctggaggctccactggcacctctcccgccggctctggctctgctgttgcccctgccgacgctgctaccacctcttccgagcccgactggtacaccggcgaggacgactctgagtcttccgacaagcctgctgctgagaagcccgctggctacaccggccagaccaaccccgtcgcttctgacaagcctgctggctacactggccagaccaaccct

SEQ ID NO: 125475 - DNA, 993 bp, Glycine max
  Clone ID: PAT_MRT3847_84313C.1
tacggctgcgagaagacgacagaagggggtcaataacaaagctctctacataacggaaggggacaggggagtggggtttgattgcttttgtttgtgtgaggcaattacagagtgagaatcgatgggggagaaagggtgtgtgagcttagaaggaaagaaggtgatattggtcccttacatggaggcccacgtgcccaaatatcacgaatggatgaaggacccttctctccttcaagccactggctcagagcctctcaccctccaacaggagtacaccatgcaactctcctggtcccaagaccctaacaaagagacctttattgtattggacaaggacttggttgttggcgatttctctcacggggaaccccaccctgaagccatggttggagatgtaaatattttcatgaatgatttggatgatcctcacgtggcagagattgaaataatgatagctgaaccaaagagccgtaggaaaggacttgcgaaggagtctgttctgatgatgatgacctttgcaattgagaagttaggaattaatatctttcgggttaaaattggggaatcaaatggagcatccctcgacctgttccaaaaattggggtttgtgcaaacttcatatagcagcatcttcaaggaggtcaccttggagttgcaaataacacagcccaagaaagaggcgatgcttggtttaattggtactgtaatcaaacatacctaaacctagcaatatctcacttcgagttatttagtggtaatagaatgatcttatctgtttttattccttgtttttatgacgtgcggctaaaagctggcctaattatacaaaattctgacatcattcatctaactattattatctcttctaagtgtaataatttgaaattaaaagtaatagatctgtatttgtttctaagtgtaataatttgaaattaaaagtaatatatctgtatttgtaataccttttttgctatgatcctatttcctctaaaa

SEQ ID NO: 125476 - DNA, 459 bp, Glycine max
  Clone ID: PAT_MRT3847_84314C.1
ggggaccatagcaaaaaaggtattacaaatacagatctattacttttaatttcaaattattacacttagaagagataataatagttagatgaatgatgtcagaattttgtataattaggccagcttttagccgcacgtcataaaaacaaggaataaaaacagataagatcattctattaccactaaataactcgaagtgagatattgctaggtttaggtatgtttgattacagtaccaattaaaccaagcatcgcctctttcttgggctgtgttatttgcaactccaaggtgacctcattttagccttgaggacaaggcagtttctgcaccagggagcattgataggctagtccaacatgatgggattgagtctgttgagactgaaggctcatggcctccttgaagatgctgctatatgaagtttgcacaaaccccaatttttggaacaggtcgaggga

SEQ ID NO: 125477 - DNA, 1146 bp, Glycine max
  Clone ID: PAT_MRT3847_84315C.1
ccttcctttattctctcctcttaaacctttcacttcaagcttcaagttttcaagctacccacccactgctcatactcacacccaatgaagatccagtgcgacgtgtgcaacaaacacgaggcctccgtcttctgcacagccgacgaagccgccctctgcgacggctgcgaccaccgtgtccaccatgccaacaaactcgcctccaaacaccaacgcttctctcttctccgcccttctcataaacaacaccctctctgcgatatttgccaggagagaagagccttcacgttctgtcagcaagacagagcgattctctgcaaagagtgtgacgtgtcaattcactctgccaacgaacacacccttaagcacgataggttccttctcactggtgttaaactcgcagcttctgccatgcttcgttcatcacaaactacctctgattcaaactcaaccccttctcttcttaacgtttcacatcaaactactccacttcatcttcaccaccaccaccaccaccaacaacaacaacaacaaggttgctgttgaaggaactggttcaacgagtgctagcagcatatcagagtatttgatagagactcttcctgggtggcaagttgaggactttctcgattcatattttgttccctttggtttctgtaagaatgatgaagtgttgccacggttggatgctgacgtggaggggcatatgggttcgttttcaaccgagaacatggggatctgggttcctcaagcgccaccacctcttgtgtgttcttcacaaatggatcgggtgatagttcaaagtgagaccaacatcaaaggtagcagcatatcgaggttgaaggatgatactttcactgttccacagattagtcctccctccaattccaagagagccagatttctatggtagaaacaatcctctttgttttgttttgttttgtgccttctctctttttgttaccctggtttgtagcttactcttgcccttgttttcgatttggttctgtttgactttttttcttcttctttttcttggttctcctccctctttccctaccgggctgtgctttgaagtattgataaatttgtgcacctactagtgattgtaaatataaaccttttcaaatacatgttttttttgac

SEQ ID NO: 125478 - DNA, 1322 bp, Glycine max
  Clone ID: PAT_MRT3847_84316C.1
ggatggctcatttatcatagtagtgcttcctcctttaccatttgaccatatttatccatctcaatcacttcccactttttatgagcattggccaacccccacgcttcctttattctccctctcaagcttcaagctactcacaccaatgaagatccagtgcgacgtttgcaacaaacacgaggcctccgtcttctgcaccgccgatgaagccgccctctgcgacggctgcgaccaccgtgtccaccatgccaacaaactcgcctccaaacaccaacgcttctctcttctccgcccttctcctaaacaacaccctctctgcgatatttgccaggagagaagagcctttacattctgtcagcaagacagagcgattctctgcaaagagtgtgacgtgtcaattcactctgccaacgaacacacccttaagcacgataggttccttctcaccggtgttaaactttctgcttctgctatgcttcgttcgtcagaaactacctctgattcaaactcaaacccttctcttcttaacttttcacaccaaacaacattactacctccatcttccaccaccaccaccaccaccagcaacaacaacaacaacaaggttgctgttgaaggaactggttcaactagtgctagcagcatatcggagtatttgatagagactcttcctgggtggcaagttgaagactttcttgattcatattctgttccctttggtttctgtaagaatgatgaagtgttgccacggtttgatggtgaaatggaggggcatctgagttctttctcaaccgagaacatggggatctgggttcctcaagcgccaccaactcttatgtgttcttcacaaatggatcgggtgatagttcacggtgagaccaatatcaaaggtagcagcagatcaaggttgaaggatgataatttcactgttccacagattagtcctccttccaattccaagagagccagatttctgtggtagaaacaaataaacaaacaaacaagcctcagtttccattctcttgaggcagaattaacaaccctctttgttttgttttgtcccttttctctttttcttaccctggcttgtagtttactctgcccatgttttcaatttggttcagtttgacttttttttttccctttttcttgtttctcctccctctttccctactgggctgtgttttgataaatttgtgcacctttctactagtgattgtaaatataaaccttttcaaatgcatgttgttttttgacacatgtttagaagagaaacaacagagtatgagcttaatagatatgttgagtaaaattcccccccc

SEQ ID NO: 125479 - DNA, 236 bp, Glycine max
  Clone ID: PAT_MRT3847_84317C.1
gtgcaacagataccaagcacaatgtgaatgcatgtgatccattgactagatgcaaggcaattcacgatttccaaatattcatactagcaataccgcaaactcattatgtgaggccgcaaaaaaaatgttcacacaaggtcaaatctagctcagcctatgcatgcatatacgaagctttattttatggccgatgcgggcatatatgcgatctttacgaccttctgagatttatatga

SEQ ID NO: 125480 - DNA, 295 bp, Glycine max
  unsure (1)..(295): unsure at all n locations
  Clone ID: PAT_MRT3847_84318C.1
tgggcgtttttcnccccgattattttcccccaaaaaaccaagcgcaggagtttttttaaaaatcatctttttttctacattcacataagataaagaataaaaagatctgcaactattaggaacactacgtaagtcggtgcatatactatctagaaaaggaaatgatgattaaagatacaacgtgcatatactaaattaaactcttatggtttatatatagtttcatagaatcactcatgcagttggattaaaagcattcatagcatttccacattaatcttttttggcatgtatt

SEQ ID NO: 125481 - DNA, 1095 bp, Glycine max
  Clone ID: PAT_MRT3847_84319C.1
gcaagaatgtaaagacttttatttaaatgtgattgttttctttctcttgtctctggtttcctttgtcttttcagtgtgtgaggcatgctaagtattgccgagtgtttgcataatatttttcaaccacaaaaatgatttacaaagagtcctattcatagatttttggctcttaacaatcaagaaaccttatgcaagcacatctaaatgcccaggatcgattatctaagatctttacatctgagttgatttgagaaacactctcaataactgctggtaactattttctgacttggaattttcaaattcttgtttccaaattttcatctacttgacactttatcactcttcatcatcaaacttgacttcctggtcgtgcattcaatctcaaagtagaccaacagtttcatgcccacacacacacaaaaaaaaaatcattgcttttacacctttttttcaatctaaatatcatttgaaagaacttccaaatcttcgttgagtccaaacatttccgacagagagctccaaatggaagaaatccaaccagaagaatgttttagttttggccttggaacaattgatgcttcatcagttaaatacggcactatataagttttcatgtcactacgagagatatctagatgatctcctgatacgttaacaaatttaactttcccagcttcgtcaagagctctcaaacctatccaatcatcaatgtagagctcagtctgttgaactggtacaacgggatgaagggctccatttggataatagccaaaccaagctgtttcctttggtattacaattgtatcctgttcaaacattatgagaatcaaattctgtaagctagcaaatcgctgcctgtaggtggaattcctcttattaactatttcattattaagctttggaaggaacttacaacccctaatgtagccagctatatcccgcgtgcggataaaggaacagattatgtttcctttgatctgatttgtaagccatagaagcacttgatgggttcgcaactatgggtattttaacatagccactgggagccagattttgctgggcaaaccggctgtagatccctaattggagtac

SEQ ID NO: 125482 - DNA, 1487 bp, Glycine max
  Clone ID: PAT_MRT3847_8431C.1
cccgcttaaatctggtggttttccgctcatctacctcaccccaccgtctctctctctctcataaattcaatgctctcatcgttttccctcataaaccgctttctcgtgttgtaacacactcatcactcatcatattcattcacacttcccactttccaatatggaatgctgcataatcgccaggctcaagacccaacctttatggttcgcgctgctcttcgttgtcggattgttaacgattctcaaattggctttcgttgttttcagatgggtctacgtcaatttcctccgaccaccgaagaatctcaaaaagtacggatcttgggcagtggttactggacccactgacggcattggaaagagcttcgctttcgagctcgctcgcaagggcctgaacctcgtccttgtcggaaggaaccccgacaagctcaaagacgtgtcggattcgatcgcggcgaagttcagaagaaccgaggttaagaccgtcgtggttgacttctccggggatctggacgagggcgtgaagaagattagcgaagcgattgaagggttggaagttggagtgctcgttaacaatgtgggagtttcgtatccttacgcgaggttcttccacgaagtggacgaggggcttctcaacaaccttattaaggttaacgttgttggaaccactaaggtcacgcaagctgttctgccagggatgctcaggagaaagaagggggcgattgttaacattggttctggagctgctattgttattccttctgatcctctttatgctgtttatgccgccaccaaagcgtacatcgaccagttttcgagatgtctctatgttgaatacaagaagagtgggattgacgttcagtgtcagattccattatatgtggcaaccaagatggcatcaatcaggaaatcttcattctttgttccatcaacagatggctatgccaaagcaggtgtgaaatggataggctatgagcctcgttgcacaccatactggccgcatactcttctttgggctgtggcattctcattgcccgagtttgttgttgatgcttggcgcctgtggttttgcttgggtattcgaaagaggggacagcgcaaagagtccatgaagaaggaataaaaggatgcttggttctgatgtgtaggccaatagacgctactcatctgataatatatatgcagattgttagctgattaaggattccaagtacctgctgtgttcctgattttcatcttactgttattactcttttgttagtatcagttgtgtggcatattcttttcactcacctgttttgggtgtttctgttcactgttttagtagtgtgttgaactgatatcatatattggcatatcgcttaacccggttttatctggtgtaactcctcctttctctcttattttgagcttttaggaagccctaaaaattcaagcgaaaattttgagcaggaaattaaactgaataaaagattgattagagtgtg

SEQ ID NO: 125483 - DNA, 376 bp, Glycine max
  Clone ID: PAT_MRT3847_84320C.1
cctaccgagtcgtgtgagctacctgatctactggagcgttccgagttatatacctcaccagacacttgctagtcagctgcttgatcacccgcgcaacatggacaaccttggtacctcccccaccgacaccgagaagtccatcgaggtcaacgatgcgctcttctgcgagcacggcctcgaagtctgcaagacgtgcgagtttgacggacgagaggacaacgacgcaatgatgggcctcgaccccaagccgcgaggcccgctcgagatgcccgcatactacaagaacaccaaggacggtcagatcatgtgcaaggcgcacgccaactcgaactgcaagtcatgcttcggctggaagaagatgatcgtcaagcttcag

SEQ ID NO: 125484 - DNA, 434 bp, Glycine max
  Clone ID: PAT_MRT3847_84321C.1
tccaacttacacagtaagtcacccttaatttctagcattttaaccccacccccaagaaagcaagaaaagaagatgttctaaatttctttgattaatcaaatttggatgaaaccaatttcattaagattgtaatacaataaaaaaatgtaaaacaaggtttaatatatttcctagtctttgtaaatatggaacattttaattttaatctttaatttttttattgattttgatttttatatatttttaaaaatccagaatcatctctatcactatttgttaatgtgatatacattatcatgtcacatggagttattttagagtagtcatatttggcgtaacatgtctatatatagatacatatcatgtcatcattatatataatgataaagacttttgataagaaatttttttatgaaaactaaaattaataattt

SEQ ID NO: 125485 - DNA, 1265 bp, Glycine max
  Clone ID: PAT_MRT3847_84322C.1
ccaccccaaacccaaccttcaattcaatatcatcagagagtgttgtttgtttcccccttcttcctccttcatcagcatagcattgttgtctcccctacaccataaaccctaaatccacgatgttgacttcagcatcctcatcatcctccatcttctccttcacccctaaaaccctaaccatacccccacagcaacctcgcttcaccgtccgggcccactccaaaccccccattctccccaacctcaaaaccctcgccggcgccgcggtcttcgccgccgtcgcgctccaattcccctccaccgcacgtgcctcccctccgcctcctctcgaaaccgaccaccgcctcaacgtcgaggagtccctctcccctctctccgacctcctcgaaaccaacgccgaggccctcgccgcgctcaagtccctcctccagcagaagctcgagctcggcgaggacgacgaggcgctcgccgtcatcacccccctccttgccgcgcgtcgctacgaccacgaggtccacgccccggagccgcgctccttcgaggcgctcgtcgagaacgcactgctgatggaccggtgcggcgagggcgaggcagcgaaacggcgcctggacgaggcgctgttcgtggccgagctggacaagaaggcgaaggaagccagggacgtgaagctgatcatggcgcagatcacgtttctgcagaagaacgtggatgaagcgttagggatttataatcagctcacgaaagaggatccaagggatttcaggccttatttttgtagaggcatgatttatagcttgcttgatagaaatgaagaagctaaggagcagtttgcaaaatacagggaattgagtccaaagaagtttgaggttgatgggtatttgagaacccctttgtcaaggatgaagctgtttagcactgatgagagttgagaaatagtaataataaatttgcggcaattggaataaggatgcaaaaaccgagttaaattcttttgcattagctatctatgctatattgctatgccactcttgaaaagatgggtgggtgtaaaagttgtttgtattaatagagagaatgatagagaaataatgattattgttgagttctggtgaattgaactcagtaacagtggggctgcttttgcctttaactttttgttctcacatgtaatttcctcttagttattattctctgctattattggaatagctaccagtgttttctgatatttgtcaagattccgaatgttcggttttgcgttttat

SEQ ID NO: 125486 - DNA, 744 bp, Glycine max
  Clone ID: PAT_MRT3847_84323C.1
ggagatatattcgtagcacgtgtttaggctttgagaaatatgcgttagcattactgttagtaataaatcattatgattactttggggggttattgatttctttgactcatttattttgcattactgtttctaaaactacccctctgacgtcattttgccaacttgtaaacaccctacttttagtccttattctatacttatgtaattttggtcattaaaattattttattgcacatttagttttcgaagtttttaaaattaagctattttggtccattattagtttgtcattatttttttaacatgaattattgatgtgaccttgatatgctaacgtgataaataatgcgacatgtcaatttttatccttaatgtcacatcaatacattctcaatttcatgcaagggtgataaaaaaaatcaaaattgatgaaaaatcgagctatccaactctactaccactcaataaggctgaaaccaaagacacttcacaattgggtatggtccaaaaatattaatgttcgatattgagtgttttaggctcaaaaccgactgatgatttacgtgtcatgttaacatattagtatcacgtcatcattaacatgtcatatcaataattttttctaaaaaattgacaatcggcaaacaatagatcaaaattgttaaattttaaaaatatggagattaaatgtgcaataaaaaaaatttagagaccaaaattgcacaattgtgaaattatagagac

SEQ ID NO: 125487 - DNA, 163 bp, Glycine max
  unsure (1)..(163): unsure at all n locations
  Clone ID: PAT_MRT3847_84324C.1
caaggacaaagtttgatgttgcggaatgagaaaaagctaattatcatatacgtagaatcccgcggaaattcatgtatgttaggtaacatcaactttccacctgacagnacacataatgaaatgaaatcaaatgagaaaataatacacgtccaaaatgaagaaa

SEQ ID NO: 125488 - DNA, 241 bp, Glycine max
  Clone ID: PAT_MRT3847_84325C.1
tattcggctcgagactgtctgggaagctgattggtcatgacagcatcgaaggtatcaaccctaggatacatcgacgctgacgctccgatactccatgagctgccacttgcgatggttggcagacttgaagcttggaacaggttctgtgctcatatagatgcaacaatgtatcctgagggtcactccaaaaaaggaacgggttgagccatatacgtatcgactaaagagaacagtcggtatt

SEQ ID NO: 125489 - DNA, 374 bp, Glycine max
  Clone ID: PAT_MRT3847_84326C.1
agaatacgacacaaggtgtccttttggtatagaccacacaaaggttctggagggcagggggcctcttaagggacaatacaccatgaaccttataatttgttctaaagaagaataattaattattaaacaaaatcattggtaggtggtactaataattatgcacttataagtaactcattcatcatttccgttccagtacaagaacttgatctactattttattctacgcaactcatccttcttatactgctcatatttcaactagatcctaccctttgcatcttcaatttccaccattttaattgtgaaaaatcatgaatatgtttcaactgttgccaaaaggatgacccacacaaagctgcttaaagttggag

SEQ ID NO: 125490 - DNA, 407 bp, Glycine max
  unsure (1)..(407): unsure at all n locations
  Clone ID: PAT_MRT3847_84327C.1
ttcgtatatgtgacagancccaatgcagaccacacaaggtgtcaatgaagcgccaggcatgggatggaggcgagctatcaatagatcagtcagggggcgcgaccatgtctgaaatgcacacccagcatgataatgagagacaatgatgctaaaatgctggtggaaacagggcgcatattcattgctaatgaacatcttttcaaaaatcagactgagagagagcgatgacaaattgctgcatctataaagagatactggcgtgtgcaagatccagacaagccccaaatgagggacaacagggaacaatggaatgattcaaatcccactaggaaagagatcccacaatcagcttgggaccctttccagctgggacagtgagagaaactattgcccaaataagtaaatct

SEQ ID NO: 125491 - DNA, 420 bp, Glycine max
  Clone ID: PAT_MRT3847_84328C.1
gttatgccttccatttccacaggctccagggtcatccccaacataactttgtatccaccaatcactcaaacttcattgttaaccccattctgtgctgttgctcctcattattttgtctctgctagcaaagtatgaatccaaataaccttagaaacaatctatgaagaagaagatgaaaaggaaacaagctttgagacacctgcatcttcttcaaccaccaatcttccttatgcaagcaaggatttgttcattccaaatccacaagcctctgctttggtttggtccaaaattccagtgtaaatatattattatatatatgtacgtagtggttatatttaggttctaattatctatatgttttaacttgaattaggggtgactacataggtaggtaatcaattacatatgtaactttcagtt

SEQ ID NO: 125492 - DNA, 361 bp, Glycine max
  Clone ID: PAT_MRT3847_84329C.1
ggctcgaggtatcactccctgcacataatcaactgtccaaaacaatatgcaacgggggagcaatctgaggacatacgcctttgtctccgccgtctgaatgagcaccgactaggccaatacctacgattccagagacacatggatagtgtgcaccgctgccctaaccgacctctcaaggcaagtcacaaaatgccgcttgttcgaatcgacaccagatactccggtcaccgaagtactaatctagaaatggaaacagcacatggcccatagcaccgggaactacaccgataatagcaccgactccaccgacccggtgcttactcatacccccgcacgcaacggaaccaaaaacagctacaac

SEQ ID NO: 125493 - DNA, 389 bp, Glycine max
  Clone ID: PAT_MRT3847_8432C.1
aactggttcttggttgggatattttgtatttttattgttggttaaaggcgcaacgcttttagatggtacttggtaaacacactaatttttttcatattaaaaagaagaaaaacttgggacctttcaagcctggtaaagaaaaaaaagggcaaatcttaagccttgtttaatttcctcctcactatgtttaaaataagggggtcagaacccacttatttaactctggggttgaatggccataccacctttaaaggccagatttcactatgatgggggaggcgggcccaccaagttgtgtttatttattacaggcgcccaagggtgaaaaagggtgcttctcttttaggtgtaaaatgggccaaggacaactaacttttggtttagggggt

SEQ ID NO: 125494 - DNA, 200 bp, Glycine max
  unsure (1)..(200): unsure at all n locations
  Clone ID: PAT_MRT3847_84330C.1
gtcgcatgcacgcgtacgtaagctcggaattcggctcgagaaattaccanaaggnanaggttnatnnnntngtaaatnncnncatanncnnngnatatggntcncatcttgagccaaatnggtntngnngnnnaccnnanggncgtnggagnctaccnagaaaaggccacnnngntcgacgnaactncccncgnnattgt

SEQ ID NO: 125495 - DNA, 871 bp, Glycine max
  Clone ID: PAT_MRT3847_84331C.1
tgttactcaacgccaattgcgatctcaaggtgtgcgatttcggtctcgcacggtcagccgcctcgacagaagataatcagggcttcatgaccgaatacgtcgcaacgcgatggtatcgcgcgcccgagatcatgcttacgttcaaggagtacacaaaagccatcgacgtctggtctgtcgggtgcattctcgccgagatgttgagcggcaagccattgtttcccggcaaggactaccaccaccagctcacgctcatcctcgacgtcttgggtacacccaccatggaagactactacggcatcaagtctcgacgagccagagagtacatccgcagtctgccgttcaagaaaaaagtcaactggaaaatgatgttcccaaagacaacagacctcgcgctcgatctgctcgaaaagctactggcgttcaacccacagaaacggatcacggtcgaagaggctttgaaacacccttacctcgagccgtaccatgatccagaggacgagccgactgccgatccgattccagaagagtttttcgactttgataagaacaaggatgatctgagcaaggatcaattgaagcaattgatctttgatgagattatgcggtgaaacggcttgactgtccagaggtgtcgagtactaccatgcatggagcacaagagaggggttctattgtatcaccaaagagagaaagagaaatgtgtcactgtacggcggattcagtagctcggtagtccgggtcacctttgtttgtcgacaacgacagaagattcaccctctccggttgtatctgtgcttccgatactttgtcgatggtagagctactcgaaaacctctaagaaaaggatcctatcttctccgataacaaa

SEQ ID NO: 125496 - DNA, 1140 bp, Glycine max
  Clone ID: PAT_MRT3847_84332C.1
cttgcactgcacattgcacaacaaggattcatcttgcaaaaagccaccacacttcgcctttttccctgttcattcgacagtaacctcaacactctattggggtctgatagagatggggtcttgctgtggtgaaagtgcagataacatgcaagtgataggtgcggataaggaccacatatggagcaagaaagtggaagcagatgagggtctgaatctgaacactgtggggtgcctcagagggagattactggctgagagacaagcttcaagggtggccaagatggaagcagaatcaatggggaacaagtttgttgagttggaaaaattgcttagagaagagatcaaattaagagataaagctgaaagaaggcttaaacttttaaagaagaaggttggatctttcaattgcatgccctccaagacagggcaattggagcattctgattcgtcggagaaatgtgaaaattcttgtggatcatcctcaattagttcactttctaaacattctgaagcaaacgaaataaagcatgatgcaaaaattccagctttgccagaaaatgtagatcacagtgacaatgtttcagaagcctctacacttattcagacccacaatagtccatccagtacaaaagattgtgattctcagaatactgataatttcagtactaattcagaacagggttgttcttccccacaaattctgagacagaatccgaatctgagctctgggaatttgaagaatgatgaaagcaggctttccaccttaagctcaaggtcatcagtgacagagaatgagagtcatcgcgccgatttctatgataattctctggcattagttcccgtgaccgtgacagctacatcacaagccaccaataatcccaaaccaattaatgtgagtgtccttgaagctctagatgcactgaggcacgcccgagaaaggcttcaaagttcgatgagatcaaggcaaatgattcatgttggcccaatttaagctccaacatcgagttactagtaatgctcgactattgccatgtttatgtattataggctgtgatggtgatgctttagcatcagaatgggcgggagcctcatcatccattaacctagaggtcctcaaatttataagattggtagcagatg

SEQ ID NO: 125497 - DNA, 179 bp, Glycine max
  Clone ID: PAT_MRT3847_84333C.1
cttgggctggattacctcttttaaagcttgcccaaaggttgagagatccttaagggaccaggtccaccacttttttaccaggcttggaacccttgccgtttgtggggtaaaaaattttttccaccgattgcgtgggttaagtcatgcgatgcatcattactgttagcgacggtgagcga

SEQ ID NO: 125498 - DNA, 368 bp, Glycine max
  Clone ID: PAT_MRT3847_84334C.1
ctctaataaattttaactctaaaccatggctattaccatggtgcgactctacttcatgctctgcatcacaatcacacaccaaacgattatgtaacccctaacacactcaattaccaatacccattacaacagtacctaccagcttgtcaaatctacctacactcgctcagcctcacgcttacactgacaaactcatcataactccgaagtccctctcccaatttcttcaggaagcgactacacgctttccttaaacttacgctcacacacttctcaattcataaccctttacatggacacatgcagcgacctcctctgggatccatgcactaccttataatgcattctatgcgaaggcaaattcaacg

SEQ ID NO: 125499 - DNA, 451 bp, Glycine max
  Clone ID: PAT_MRT3847_84335C.1
gccttgtcaatttaggcttccattattgaagacatttaatgacaacggtgctagtaaaattgaacaatccttgatgagggtttgcaatgaatgggttagatatagtctttgtattagccaaagcgcacctgatccaaaacttaatatcataccgaattagatttctggcaaaacgtcaaattcatattgtacattactgtttttagttttacttttgcaatagtcatcatggacttttgcacaattgatgttgaattttttattttattggcaatttaaaacacaaattggcacgtctattttttttgtatattataattagttttctttcttttgtttctgttcttcaagagggcggaaaagttttctgctggggatggaacaaatatggacaggttcttatatcacactacccttatacaaatacttttttatttcatgttttaaacta

SEQ ID NO: 125500 - DNA, 711 bp, Glycine max
  unsure (1)..(711): unsure at all n locations
  Clone ID: PAT_MRT3847_84336C.1
ccacgcgtccgcgaagtgaaaacctctctgattaaggtatgcttggtggtgctggtggctgtgcggctagttgaagttgaagctttaaggtatgttctccagaagcaaaagccacaccctctcccacctcaaggcgagatccatatcaagcctgaaagtagtgtggcgcaaggacccagaactcgaccgagccatagagttggacaagcgatacaagcaatgcgcccgcgtcgtcaaagaagtcctcaacgaaccaggccaggtcatccctctccgctacctcgaaaagcgccgcgaaaggatgcgcctcaagctcaaagccgaaacctttctcaaccaaaaccccggcctcttcgacgtctactacgaccgcatcaaacccaaaaccgaaccggtccgcttcctccgccccaccgaccgcctccgccgattcctccaccaggagcgacgcgttttcctcgacaacgagcccttcatcgtgtccaagttgtgtaaactgttaatgatgtcgaaaaacaggttgtcagtgctgacaagctacttcacgtgagaagggagttcggcttcccaacgatttcttggttgatttggttcctaggtatccggaatattttaggntaaccgggntctcctggggagggganaatcgttcttgaagttggttaattggaacccccgagtttgcaaaatcctgtattgagggaagggctg

SEQ ID NO: 125501 - DNA, 581 bp, Glycine max
  Clone ID: PAT_MRT3847_84337C.1
cggacgcgtgggcggacgcgtgggcggacgcgtgggtcaaattgtagaccagagatgaaactagctagattttttagaatcaatgtggttctggtttattttcagatcatcttgtattttccattatgtttaagtctcttatattttgtttggcggatgcattttatcaaacaattacccattaattaaaaaatgtttcagtatgatagtttggcagctgcaagaattttatttttatttttttatcaaaaaatattaattgttaattattttttttgttagtagaagaatcgaacgtttcttcccccttcatcattagacaaaccttataattccttgataggaagaatattgtctataaatttgatttaggttgctataaattccaacttctaagactgggaactgaacctgtgaatttgcatattatggttatcatgtttccattttcatcttcaatttctagaaaatctgaatttaaatctgcttgatctagcaggggcaccgatgttgaagattggaaatttctcccgtaatatgagtccggccacattagaataatgcatctagcaagacaacct

SEQ ID NO: 125502 - DNA, 1146 bp, Glycine max
  unsure (1)..(1146): unsure at all n locations
  Clone ID: PAT_MRT3847_84338C.1
gatgaaggtcttggtcttgtttctttcgtttctttgtttctctttctctagctagctaagtccgttcgtgatcgaaaagagaaaaagatcatggaagaaagtctagtaaaaaaacatgaagaagatagagtagtaagatggggtgtttatagtgaagaaatgagaaggatctgtgaaatagcagggcctatggtggcagtggtttcttcccaatatttgttgcaagttgtgtcaaccatgatagttggtcatttaggtgaactctatctctctagcgcagacttagccatttccctatcaggggtcactggcttcagcctacatatgggaatggctagtggactggaaacaatttgtggacaggcttatggagctcaacaatatcaaagaattggaatgcaaacatacactgctatattctctctcatattggtttctattcccgtgtctatcctttggatcaacatggaaagcatactagttttcataggccaggaccctctaatttcgcatgaagcagggaagttcacaatttggcttgttccagcactttttgcatatgcaattcttcagccgttagttcgatatttccaagtccaaagtttgcttcttcccatgtttgcaagttcttgtgtcacactcattattcatgtacctctttgttgggaaatgttattcttcttgtgttatacatatgatactcttgcatatgtgcaaaacacttcaatatggtctcttgggagctgtcctggggtgtgcgggagttccttcgctgcgcgtgcccttccccgcgcacccatttctatggagctgttcaaaggaatgtgggagttctttcgttttgctatcccttcggcagtaatggtttggtgattattcttcctgttcaatcaatattttacatattcatgttatcagataacaaaaagtttccttgtccaacaaattttctataatgtattgtattgtttttccaaaactagtatttaacataatttttgtattcatgttgatgatggtagccttgaatggtggtcatatgagctgcttgtattgctgtcagggctgttaccaaatccccaacttgaaacttcagttctatctgtttggtatgtatgctccattattttggttttctttatannc

SEQ ID NO: 125503 - DNA, 487 bp, Glycine max
  unsure (1)..(487): unsure at all n locations
  Clone ID: PAT_MRT3847_84339C.1
ggcacgacatctactatgcaccatgtttccccaacaacccaccgttgaggacctcacctcgaccgccatggagcataagatcgccgagcagccggccctggccaacggcaagaccaacggccacaccaacggagccaccggccacatcaacggcaacggcaccagcaccctcccggccctggacgcctccaagttgaccatcacccgggccgaccccaacgcccgcgccgtcccggacgaggtcgncgncttgcgccgccaacgagaccatctgcaccgaccacatgatcaccgtcagctggaacgccgccacgggctgggcgacgcccgagctcaagccgtacggcccgctctccctcatgccgacggcctcggtcctgcactacgcgaccgagtgcttcgaggggctcaaggcgtaccggggccacgacggcgggcttcggctcttccgccggacctcaacgccagcgcatgtcatgtcacgctc

SEQ ID NO: 125504 - DNA, 176 bp, Glycine max
  Clone ID: PAT_MRT3847_8433C.1
taaagggggaatttaagggagggaacaatacaataagatctgggggtagtgctcacactatagaggactacactataaggtatacattgaggactcatatgttactcaccaatcataatggacactcaaactcaagccatggaatctacttggtggacttcgaaatttacctattc

SEQ ID NO: 125505 - DNA, 2085 bp, Glycine max
  Clone ID: PAT_MRT3847_84340C.1
ccacgcgtccgaagcaaactatatatgttgtttttgcagattttgttgcactgctaattctatatattgcctctttaactagtagggtacctgtacctcatccacccatcttcaacttgtgataaatttctcctacctccattctgatatctcaactcaataataatagcacaccatggttgcttccctctcaaccctggttcttctattgtgtgttatttccacggtagcttggtactcatgcctctacttcctcaaactcaacaacaacactcagaagaagacccttccaccgggcccaccgggcctccctatcttcgggaaccttctatctcttgacccggacctccacacttacttcgccggactggcccagatccacggcccaattctcaagctccgactcgggagcaagctcagcatcgtcataacctcaccggccatggctcgcgaggtgctcaaagagaatgacaccgttttcgccaaccgcgacgtccccgccgccggcaggtcagcaacctacggcggctccgacatagcgtggaccccgtacggaccggagtggcggatgctgcggaaggtgtgcgtgctcaagatgctgagcaacgccacgctggataccgtgtacgacctgcgccgcaacgagatgcgcaaaacggtgtcttatttgtacggtcgagtggggagtgcggtgaatataggggaacaggtgtttctgacggtgatgaatgtgataacgaatatgatgtggggaggggtggtggaaggggcggagagagaaagcatgggggcggagttcagggagctggtggcggagataacgcagctcttggggaagccgaacgtgtcggatttttttcccgggttggcccggttcgatttgcaaggtgtggagaaacagatgcacgctttggtggcccggttcgatgggatgtttgaacggatgattgatcggagaaagaaggtggaagggcaagacggggaaagcagagaaatgaaggattttctgcagtttttgttgaagttaaaggacgaagccggtgactccaagacgccacttaccatcatccacgttaaggcactgctcatggatatggttacgggtggaactgatacatcttccaacacaattgaatttgcaatggcagaaatgatgcacaatccagaaataatgaagagagtccaagaggagttggaagtcgtagtaggaaaagataacatggtagaagagtcccacattcataagttgtcctacttgcaagctgtgatgaaagaaactctaaggttacatcctgtgcttccacttctaatccctcattgccctagtgaaaccaccaatgtgggaggctacagaattccaaaggggtctcaagtgttcctgaatgtttgggctattcatagggatccttccatttgggagaacccacttaaattcgatcctacaaggttcttagatgcaaaatgggatttcagtggcaatgacttcaattattttccctttggatctggaagaagaatttgtgcaggaatagcaatggctgagaggacggttttgtattttcttgccacacttctgcacttatttgattggacaatacctcaaggagaaaaattagatgtgtcggagaaatttggtattgttctcaaaaagaaaattcctcttgttgccatccccaccccacgattatccaacccagatctttataattgaatgcaatatttatgtactaatgatgggaatatatctgtaatcaatactcaacagttcctaatccccaatgctacatatttctacttctatgttatttccgtggttcaagtttaggcattgagcaataaacaaggcctttataatttgtttcaaaaaaaaaactacattaattatgtgtaccagtaccagcataaggtgttagatataagtcgttgtcattgtacatcaaaaaatatggatttgttataaaaaaaattatcctgggttggatcattcattatgggtagcatgttgagtggtttttgccggggagtactagttgtaaatttagtattccattataattttataaagaataaaattttcattaaaaa

SEQ ID NO: 125506 - DNA, 404 bp, Glycine max
  Clone ID: PAT_MRT3847_84341C.1
aataaaaaatacttatatttaagattttttttttatatttaggtctaaagagagtatcaatcaacaaaatagctaggtaaattgtttaatggatcttccaaattcagggcaacgacttttttttaccaacctattgctacaaataatttaattagagattagagaaataaaacctacttttctgtagtaattacaatcacaaaacttcaacagctgtacaatgcatattgggaagcttcaacatttctgtcttaaaattattattttctagcatcagatccactgttagcagtgatgctctaggctttggttttggcatcaccacctcggaataccccatcattgaattaagtgatgaagtagttgttgaggtgttccttttgcatgaacctagccacttagct

SEQ ID NO: 125507 - DNA, 653 bp, Glycine max
  Clone ID: PAT_MRT3847_84342C.1
gcttacaaaacataattttgcacgagacatgttcaaatgtacactacattgtcttgtgaatgactataagttggcaaaatttgccacaaatttacagaattatcaactttgtataagggaaactagtgaatcacaaactaagttatgtacttacctaaagtcagaatggttttccattattgtggtgaaacaaatggacctccatagaaactatattacattcactgttcacttcgcctgattttcatgaagaacatttgaattatcaatatggcaatcagcaggtttcttaaagtaccttaaagtcagaatggctctccatttttgtggtcaggcaaaaagatctccccagaaactatagtaagtgaacactggtcacttttcctgattttcctaaagaacaattgaataatgtcatcaacatgtttattaggcttcacccttgttaatactctgatcatctccttgcgcatgctcctcaactggttcatcaccaagccccaaagacacaacttcatcacctgatttgtgggcaccattttctccatgatcttcaccatctttttccatcatgctcaccctgcatcttattcatactttgatcaaccctttgtgctggcaccttagctgcaacatcaccatgtttcaaagac

SEQ ID NO: 125508 - DNA, 801 bp, Glycine max
  Clone ID: PAT_MRT3847_84343C.1
ccacgcgtccgcccacgcgtccgcccacgcgtccgcggaatagggggcgtgtctgggtggtggtgtgattcccttaccccattgaaggtgatagtggagtcgctaaggattatggcgtggaacaaagtgatgttcgcatccatcatggtcctcaccaccctccctctgtccaccctgctaatctcccaatccatctacacccaccccctcacatcccaaatccagcacctcgaggccctcgcacgcttcacctccacacgcttcgagtcccgccacgtctggcaagaatcccgccacgaagccctctccctcctccgcatcaaggccctcttctccctcccctcctacctcctctccctcgccgccgccctcgcagccgtccactctaccctcctctccctccacaccaccccctccctccactccgccgccgccgccttccgcctccactccgcgcgcctcctcgccaccaccatcttcgtctacgccatcctcttcgccttctcccccctcccgcgcttcctcgccttcctctccccctcccccgccaccaggctcctcctactcgcctccgcctccgccctcgaggtctacctcatggccgtcatgagcgtcgccctcgtcgtctccgtcgccgaagagaggttcggctgggatgccattcgggttggatccgctctcatggagggaagccgggtccgtggttgggtcctgtcgggcctgttcgttttaggttcgagcctgatcgggtcaaagctggaacacttgatggacggtcaggattcgatcgcggttaaagat

SEQ ID NO: 125509 - DNA, 193 bp, Glycine max
  Clone ID: PAT_MRT3847_84344C.1
ctacatccttgatcgccacagtcattttctatcatcatcactttcgatgagaactgtgcttgtgctatataacttaagagttctccagattattatagtgtatacgcagctatatcgtataaggaaatcgacttagattgtgaagtgtgacctctatgatatgcattgaattgatatcgctgtacatcgcttg

SEQ ID NO: 125510 - DNA, 522 bp, Glycine max
  Clone ID: PAT_MRT3847_84345C.1
gctgcccgaaaaagtgaattggaaactctggatgtggatgatgacatgcttcctcagaatggtatagtaaaggaagaatctaatatgtgtgaggataagccaagtggatatccaatgaatttgttgaagcaagcaaagggaaggccatctgctgggacccttattgtttgcccgactagtgtcctgcgtcaatgggctgaggagttgcgtagcaaggtaaatggtcaggcaactctctctgtgctagtataccatggaagcaatcgaacaaaagatccttatgaggtggccaagcatgatgttgtcctaacaacttattccattgtcagcatggaggtccctaagcagcctccagctgacaaagatgacgaggaaaaggaaatttttgaagatcatgctacaccaagtaggaaaagaaaaagcccttctaattctagtaaaagtggcaagaagaaattggatggcacaaatcttgaaactgttgctcggccacttgcaaaggtgtcatgggttagggttgtc

SEQ ID NO: 125511 - DNA, 754 bp, Glycine max
  Clone ID: PAT_MRT3847_84346C.1
tccttccgttgaccaaggagacattttgaagtggctggactccaagaaagcaaattcggtggtgtacgtttgttttggaagcatagccaacttcagtgaaactcagctgagagaaatagcgagggggcttgaggattcggggcaacaattcatatgggttgtgaggagaagcgacaaagacgacaaggggtggcttccagaggggtttgagacaagaacgacaagtgaagggagaggagtgattatatggggttgggcaccccaagtgctaattctggaccatcaagctgtgggagcctttgtcacacactgtggatggaattccacgctcgaagcagtgtcggcgggggtccccatgctcacctggcccgtctctgcagagcaattctacaatgaaaagtttgtgaccgatatacttcaaatcggggtccctgttggtgttaaaaaatggaatagaattgtgggggacaacataaccagtaacgcgcttcagaaggcactccatcgtataatgataggggaagaagcagagcctatgagaaacagagcacacaaactggcgcaaatggcaacaacggcgctccaacacaatggatcatcttactgccacttcactcatttgatacaacaccttcgctccattgcaagccttcaaaattaactccccatccctttaccctcgcaatcaactttgcctaataactacttcacatctcaatgcaaataaattgaattgaattcgtgatattcttcc

SEQ ID NO: 125512 - DNA, 129 bp, Glycine max
  Clone ID: PAT_MRT3847_84347C.1
cccacgcgtccgcacacctacttactgtctttctctctctgacgggttccgctgctctctgtcaagttgcaagaaatgccaattactacacgcaaaggcatgcgttacatgccaagactagatgcagca

SEQ ID NO: 125513 - DNA, 239 bp, Glycine max
  Clone ID: PAT_MRT3847_84348C.1
acccgtccgaacacgtccgagaggactacaaaaggggaaccacaagctacggagaggggtatctaatagggaccgctgataactctaaatactacaaatagaccacatcaatccccttcttctaacctttagagatgtcatcctgatctttctatatcgctggcataacataatttgtgtccactttcttgaacctttacataaaacttctcaactatgatgcgtcatattcaaatcta

SEQ ID NO: 125514 - DNA, 280 bp, Glycine max
  unsure (1)..(280): unsure at all n locations
  Clone ID: PAT_MRT3847_84349C.1
gcnnggtnnntnacntcnnngtttctcnncncgntctanacgtncantncttgtnggtcactnttnnntnctcagnntnnnctcntantnggggcgnattgggncncatcancnttncgattcnntgtttcngtaaccatattgcantcatgtgagctccncngntnccnctagttagggtgctccttgatnggntatgtntngnaatttgctttntggtgatgacgacagttnngtccttanccagnnccatatgnnntgcnaacntanaananaanaa

SEQ ID NO: 125515 - DNA, 1231 bp, Glycine max
  Clone ID: PAT_MRT3847_8434C.1
ggccaacctttttttttagtattttttttctataaaacctaacctcagcctcaattatcaccttctttgccatagccctttcttttctctactcttcccccattttttcttctttaatccctcgcctatatcttcagaaaattagatctgcttcagatctagggtttcccttttccaaatcacgagtccgttgagtttgattttgtggatgaaagcatagggatagggcttttgcaaacctctccaatgtttctcgaaattatatgaccatgcgtcgaattcgtatgctgcactccttctccgtcgtgttcctctactggttctacgttttctcatgaactccctctcaaatccgtaattaattagatcgatctccttccgtagttaatccttgtctctttttcaataattaattagatctgcgtctcctatttcctttttttgttttgttctgttatcaaaatcaaataaaaaatctccttctcggaaatggcgtcgtcaatccaacaacaacgctcgactgcaacaagttctggatctgaaggaggaggagatccgcaaatgatcgacgagaggaagcggaagaggatgctgtcgaaccgcgagtcggcgcggcgatcgcggatgaggaagcagaaacagctggaggatttgaccgatgaagttagcagattgcaaggcgcgaacaagaagctggcggagaacataaaggcaaaggaagaagcatgcgtggagaccgaaaccgcgaacagcattttgagggctcagacaatggaactggccgatcgattgcgcttctttaactccatccttgagatcgctgaagaggtcgagggattatccgttgagattcccgagattccagatcctctcctcaagccctggcagattcctcatcccatacaaccgattatggcccccgcaaacatgtttctgcgttgataatttcttttgctctttctcgtttggggattttagtttaattagtgtggtaacttttctctgttatgtgtattattactattagtgttatctgtttgtgtcaaaaatatcgtgtggtccgcaatgcattgggttcctgagagagatgaatgtgaggtcaggtacagggtgttgatggctggtagtggcagtgtccctttgtgcgtcttgtaatcgtttttaaatagtcgtgttttattttaatcaaaagcaatcatcttcaatggtggttgttttatttttatttata

SEQ ID NO: 125516 - DNA, 2354 bp, Glycine max
  Clone ID: PAT_MRT3847_84350C.1
cggacgcgtgggcggacgcgtgggctcgagccgttttctctctcttttcatcagcttcgcgaattcgccaaatcagaaaacctctctctctctctctctctctctcacccttcccagtgatcaattcaacgatgttagagcagttgctgatattcacgcgcggagggctcatcctctggacctgcaaccacctcagcaacgccctgaggggatctccgatcgacacgttgatccgatcctgcctcctggaggagcgatccggtgcggcctccttcaactacgacgcacctggagccgcatactctctcaaatggaccttccacaacgacctaggcctcgtctttgtcgccgtctatcaacgcgtcctccacctcttgtacgtcgacgatttgctcgccgccgtcaagcgcgagttctcgcgcctctaccacccccaaaaaaccgcctaccgagattttgacgagatctttcagcagctccagatcgaggccgagtctcgctccgagaatttcaaaaaacccaaccctgtccccgcgctggctcccaataggaaacaaaacggcacgtggcaggggcaggggttagggcaaaacgccggatcagaaaaaaaaagtgatggagatgggaagaaagggcgtaaattggagaatgataatttttctgtagctaattctaattctaatgctaatgttaaccatagtggtggtaagagtagtgtgaataataatattgggaaagagaatgagagttccaatgttggggcttttgatgtaaataggcttcagaagcttaaaggaaaaaaagggaatgggaacgggaagaagaaagatgctcttgttgttgctgctgccaagggagagcccaaaaaggtggataagccaaacagggtttgggatcaaccggcgccgcaaaccaaactggactttactgatcacgtggatggagatggggatagaagcgctgactttttggctaaggagcaaggagagagtatgatggataaagaagagattcttagcagtgatagtgaggttgaagatgatgatgatgatactggaaaggataacatgcctgtggctaaaaagaagggttggttttcctcgatgttccagagtattgcaggaaaggctaatttggagaagtcagacctggaaccagctttgaaagctctgaaggacaggctcatgaccaagaatgtggccgaggaaatagctgagaaactatgtgagtcagtggcagcaagtcttgaaggcaaaaagctagcttcgtttacaaggatatcttcaacagtgcatacagcaatggaagaagcacttgttcgtattttaacccctaggcgttccattgacatattgagggatgttcatgctgccaaggagcaaaggaagccatatgttgttgtgtttgttggagttaatggagttggaaaatctactaatctagctaaggttgcttactggcttctgcaacacaacgtcagtgtcatgatggctgcttgtgatacatttcgatctggagctgttgagcagctgcggacccatgcacgcagacttcagattcctatatttgagaagggttatgaaaaagatcctgccattgtagcaaaagaagcaattcaggaagctgcgcgcaatggttcagatgtggttctagttgatacagctggccgtatgcaggataatgaaccattgatgagagcactgtcaaagctcgtctacctcaacaatcctgaccttatcttatttgttggagaagcactggttggtaatgatgcagttgatcagctttcgaaattcaaccagaaattagccgacctctcaacatctcccacacccagattgatcgatgggatcttgctcacgaagtttgacactatcgatgataaggtgggagctgcactctcaatggtttacgtatctggagctccagtaatgtttgtgggctgcggacagtcctatactgacctcaagaaactcaacgtcaagtcaattgcgaagactctccttaaatgagggaacaacataaacctgtcatgaatgtttctgtttgatgagtaacttgattatccccgtagatccccattacatcgtaagacaacattgacgcaatttggtttgtttaatttatattggtaagcttctttcctctgttcaccatgagaataactcgtaaggtgtaactcttatcatgtgtagtacatttaattttcctcaccttactaagtgaataatccatgcgaatcgttcaaatatttattgcgacaaatgcatcgatatctttaaattatgttcgagatttttgcaaaatgaaacacatataagatttagctcgaccttcaaaaaaaaaaaactcgc

SEQ ID NO: 125517 - DNA, 261 bp, Glycine max
  unsure (1)..(261): unsure at all n locations
  Clone ID: PAT_MRT3847_84351C.1
atcagtgttcattcaaangggngcgngaccgcagataaaggaccttcagggcattcacaaaataggccgctcagaaacgcgtcctcctggaaggacaaactaatttagccccgtgcatacacaattcataacgaaaaacatgaatgcccccaatctcaggaacccccacattagcattccacaccttctccctttgaaaacattacacaagggaagggccccccctaattagaagcatggcgtggctaattctgttccccc

SEQ ID NO: 125518 - DNA, 296 bp, Glycine max
  Clone ID: PAT_MRT3847_84352C.1
aaaatgggatgctcatgtgttcgttgagatatctccaagcaatagtatttaaattaatgtccgcgacatgatagctgcttcccttatgctagcttatgttacccatgactcaaagtggcatgtgctccatctcatcttaaaaagtggattccgtgcgtatttcacaaatgatggggcctgccccatgtagtaggtagcccgccgaacaggcaatggcaggaacagaaacactcaaggcgcagagtgcggagagtacttatctgacttcattgaaggagacccgaaggggtgtaaca

SEQ ID NO: 125519 - DNA, 1006 bp, Glycine max
  Clone ID: PAT_MRT3847_84353C.1
gtgttaaggaagccatatgttgttgtgtttgttggagttaatggagttggaaaatctactaatctagctaaggttgcttactggcttctgcaacacaacgtcagtgtcatgatggctgcttgtgatacatttcgatctggagctgttgagcagctgcggacccatgcacgcagacttcagcatgttgtattataatttccctttccagattcctatatttgagaagggttatgaaaaagatcctgccattgtagcaaaagaagcaattcaggaagctgcgcgcaatggttcagatgtggttctagttgatacagctggccgtatgcaggataatgaaccattgatgagagcactgtcaaagctcgtctacctcaacaatcctgaccttatcttatttgttggagaagcactggttggtaatgatgcagttgatcagcttgcgaaattcaaccaggcacatactagatatttttgtccaactacaattttgttttgctcagtttttcctatatctcagttattcaacccagaaattagccgacctctcaacatctcccacacccagattgatagatgggatcttgctcaccaagtttgacactattgatgataaggtatgtgagttaaaaaattgcaagaaagttcaagcatttcaatcttcttgaatagttacctcgcctagtaggaggataaggctttgttgttgctggagctgcactttcaatggtttacgtatctggagctccagtaatgtttgtgggctgcggacagtcctatactgacctcaagaaactcaacgccaagtcgattgcgaagactctccttaaatgagggaacaacataaacccgtcatgaatgtttctgtttgatgaggaacttgattatccccgtagatccccattacatcgtaagacaaaacattggacgcaaattggtttgtttaatttatatgggaggtaaatagtcattttgaaagatgaaaatataaaatgtagtctctaagtat

SEQ ID NO: 125520 - DNA, 485 bp, Glycine max
  Clone ID: PAT_MRT3847_84354C.1
cccacgcgtccgcggacgcgtgggcgcgaattcgccaaatcagaaaacctgtctctctctctctctcacccttcccagtgatcaattcaacgatgttagagcagtcgctgatattcacgcgcggagggctcatcctctggacctgcaaccacctgagcaacgccctgaggggatctccgatcgacacgttgatccgatcctgcctcctggaggagcgatccggtgcggtctccttcaactacgacgcacctggagccgaatactctctcaaatggaccttccacaacgacctagggctcgtctttgtggccgtctatcaacgcgtcctgcacctcttgtacgtggacgatttgctcgccggcgtcaagcgcgagttctcgcgcctataccacccccaaaaaaccgcctaccgagattttgacgagatctctcagcagctccagatcgaggccgagtctcgctccgagaatttcaaaaaacccaac

SEQ ID NO: 125521 - DNA, 555 bp, Glycine max
  Clone ID: PAT_MRT3847_84355C.1
ccgcgtacgtaagctcggaattcggctcgagcggctcgagcggctcgagaaaaaggtggataagccaaacagggtttgggatcaaccggcgccgcagaccaaactggactttactgatcacgtggatggagatggggatagaagcgctgactttttggctaaggagcaaggagagagtatgatggataaagaagagattcttagcagtgatagtgaggttgaagatgatgatgatgatactggaaaggataacatgcctgtggctaaaaagaagggttggttttcctcgatgttccagagtattgcaggaaaggctaatttggagaagtcagacctggaaccagctttgaaagctctgaaggacaggctcatgaccaagaatgtggccgaggaaatagctgagaaactatgtgagtcagtggcagcaagtcttgaaggcaaaaagctagcttcgtttacaaggatatcttcaacagtgcatacagcaatggaagaagcacttgttcgtattttaacccctaggcgttccattgacatattgagggatgttcatgc

SEQ ID NO: 125522 - DNA, 422 bp, Glycine max
  Clone ID: PAT_MRT3847_84356C.1
gaagggggttctggtgtgtgatggttggtggttgtaactcgacctggtgttttcgtggtgcggaggtggaggctgtttatgatgtactctgaaaatgtgtcgcggcggagtgacttgttgaggtggaagctcctgtgagtgcgggaacggttggggaggctgtaagaggaacccagactagggctacactgagtaaaccactaccgagacataggctatgggagcggaacgtgttaaggttaaattggagggagcggaaatgggggtgctccgttgagaacaaaggttgcaaatgaggaccaaactgttcctgcaacccttgcaatggcaagtgaggtgttggaagagcaagctttaagctgagatggcccttatttgggaataatgataaactattaatgtgtagctaaaaccttttgttt

SEQ ID NO: 125523 - DNA, 310 bp, Glycine max
  Clone ID: PAT_MRT3847_84357C.1
gcctatcatatagtaaaacccagcccatgacccctaacaggggccctctcagccctcctaatgacctccggcctagccatgtgatttcacttccactccataacgctcctcatactaggcctactaaccaacacactaaccatataccaatgatggcgcgatgtaacacgagaaagcacataccaaggccaccacacaccacctgtccaaaaaggccttcgatacgggataatcctatttattacctcagaagtttttttcttcgcaggttttttctgagccttttaccactccagcctagcccctaccc

SEQ ID NO: 125524 - DNA, 1496 bp, Glycine max
  Clone ID: PAT_MRT3847_84358C.1
ccacgccgtccgcaacaaacaacctttgtcattctaactaataaccactgcatttttctcatacttgttgctctcttccactacgtgtagtggttggtaacaacaatggaagacaatgccttcctgctcttgttctatgttggccgtcgcaactggaagcttctcatgtctcctttactgctcgtgcttttgcttctctctccacttgcttcccccttcagtgaagaaggacaagcactaatggcgatgaaggcttcgttcggcaatatggcagacactctccttgactgggatgacgcgcataatgacgacttttgttcttggcgtggagttttctgtgacaatgtcagccttactgtggtttctctgaacctctccagcttgaaccttggtggagagatatcaccagccattggtgacttgggaaacctgcaatccatagacttgcaagggagtaaactaaccgggcaaatcccagatgaaattggaaactgtgcagcactcgttcatctggatttgtccgataatcagctttacggtgatatacctttctccttgtcaaagctgaagcaactcgagttcttaaatttaaagagcaaccaattgactggtcctatcccttcaactttaacccaaattccaaacctaaagactcttgatcctgctcgaaataggctgactggagcgtccgcaagaatactctattggaatgaagtcttgcagtaccttgggttgcgtgggaacatgttgagtggtactttgtcccgtgatatctgtcaattaactggtttgtggtattttgatgtgagaggtaataatttgactggtactatacctgacaacattgtgaactgtacaagttttgaaatcagggacatatcgtataatcagattactggggagattccatttaatattggatttctgcaagttgctactttgtcacttcaaggaaatagactaactgggaagattccagaagtgattggtttaatgcaagcccttgcaatattggatttgagtgagaatgagttagtgggctcgattccccccattcttggtaatctgactttcactggcaaattgtaccttcatggaaacatgcttacgggtcctatacctcctgaacttggcaatatgtccaaactgagctacctgcaattgaatgataacggcctagtgggtaatattccaaatgaatttgggaagctagaacatctttttgaattgaatctcgcgaacaatcatcttgatggaactatcccacataacataagctcctgcactgccttaaatcaatttaatgtgcatggtaatcagttaaagcggttctattccattgagcttccgcagcctagagagtttgacatgcttaaacctctcatcaaacaacttcaaggggattataccagttgagttggggcatatcattaatctagatacattggatctatctagcaataatttttcagggcatgtgccagcatctgttggtt

SEQ ID NO: 125525 - DNA, 552 bp, Glycine max
  unsure (1)..(552): unsure at all n locations
  Clone ID: PAT_MRT3847_84359C.1
ccttactcgcggcagaggaagatcagatggcgcagtctctggagctgttgctgattcagttcctgatgcccgacaacgacgctcgccgtcaggccgaggaccaaattaagcgcctcgccaaggacccccaggtggttcccgccctggttcagcacatgcgcaccgtcaaaacccccaacgtccgccagctcgccgccgtcctcctccggcgagtggcccgatttgttgccctttctcttccaatgcagtcagagttcgcaggatgaccatcgcgaagtggcattaattctcttcagttctttaaccgaaacaattgggaatgctttccggccgtattttgcaaatctgcaagctcttttgctcaagtgcttgcaggatgagaccagcaaccgggttagaagtgctgccctcaaggccggggatcttttctggaatcactcatgacgaggatgaagtgattaagtttcgtgaagtcattccaagcatcttgaatgtatcgcggcagtgccttgcctcangagaagaagatgtgcatacttgcttttgaaattt

SEQ ID NO: 125526 - DNA, 172 bp, Glycine max
  unsure (1)..(172): unsure at all n locations
  Clone ID: PAT_MRT3847_8435C.1
ggggccacaggcacaacacacgacacacacagagcggnagcggcgacaccaagaccggagaaagaanggcgaaaacgacgccgangcagcacgcaacacggcnccacgacggaacccnagcgcncaaccaggcgaagaaancgaaggaggaaaagaaggaggngacccacaa

SEQ ID NO: 125527 - DNA, 849 bp, Glycine max
  unsure (1)..(849): unsure at all n locations
  Clone ID: PAT_MRT3847_84360C.1
cggcgcgtccggttgcggcagggcagacataaatataaaagcttccctttccttccgacctgaaagccacgcgtccaccctgactcgcggcagaggaagatcagatggcgcagtctctggagctgttgctgattcagttcctgatgcccgacaacgacgctcgccgtcaggccgaggaccaaattaagcgcctcgccaaggacccccaggtggttcccgccctggttcagcacatgcgcaccgccaaaacccccaacgtccgccagctcgccgccgtcctcctccgcaagaagatcaccggccactgggccaagctctctccccaactcaaacagctcgttaagcagtccctcattgaaaccatcaccatggagcacagtccccctgttaggaaagccagtgccaacgttgtcagtatcgttgccaagtacgccgttccctccggcgagtggcccgatttgttgccctttctcttccaatgcagtcagagttcgcaggatgaccatcgcgaagtggcattaattctcttcagttctttaaccgaaacaattgggaatgctttccggccgtattttgcaaatctgcaagctcttctgctcaagtgcttgcaggatgagaccagcaaccgggttagagttgctgccctcaaggccgtgggatcttttctggaattcactcatgacgaggatgaagtgatttaagttttcgtgagttcattccaagcatcttgaatgtatcgnacggcagtgccttgcctcaggagaagaaagatgttgccatacttgcttttgaaatttttgatgagctgatagaatctnctgtacctcttctttgnagattcagtgaaat

SEQ ID NO: 125528 - DNA, 407 bp, Glycine max
  Clone ID: PAT_MRT3847_84361C.1
atcaaaaatcaacattattttttttttttttgggaaaccctggcttttagcctctactttatcccacagcacaaaaactggtgtttcttaaattaaaaaccaactcactttttaagagggataaccttttaaggaccttaaaaacaccgaaaataaacctacataaaagtttaaccttttttttaaaaatgcatgacagatacgttgtatataaaaatagcaacaacacccgggatgttatacacatataattgtaagcacaacaaaaacccttgcataatttaagaaaccagaacccccaacaaataggatttatataacatttataaaaaaaggggttttgacaaaaaaaattaaggtgctgccatttttaatgcccacaaagaagagaaaaaatttcaccatta

SEQ ID NO: 125529 - DNA, 358 bp, Glycine max
  Clone ID: PAT_MRT3847_84362C.1
caagactgagtatcgaaacctcgacaggctcttatctcccgacccggctgagatcagatccttgaagatctatggacgggttagatacatcgacggtgactatcttcagatcaactgtcgaaggttgacgatgaagctatccctagcggaatgtcttctacgatatgagaatcttggaatcgcacggtcgacgatgcagacggggtatcactgggatcatcttgttgcagctgaagccactcttacaagggtccacgctgcccaacagaatgatgatgtgcctccaataaacgctgttcctgctactttggaagctgaactgcagattggtcatgaagagagtgctatcctacaagat

SEQ ID NO: 125530 - DNA, 462 bp, Glycine max
  Clone ID: PAT_MRT3847_84363C.1
agagggaatgttctaattaagccttttattttaaaagaaaacaaaaatttaaggtcctttagactcgcaaaaggccttataaatcctcatttagaaaaaaaaaaaaaaaaggcccccttccccaaatttcctaattggaaaggaccccgccaccctaaatccagggtcctttcaataaaaaaaaaaacccaaacccaaaattttggaaaagtcttcaagttttcagcgggggataaaaacctaaaaccgcccaacgggtcccccaacccttccgggaaccctgggttcaaccgggaaattccgacaccggccggcaggggaaccaaattttccaaaattgaggcaaaataaagcctggcaaaaacaaggccaaatacgggccccgggtggaaatggttaaccgttacaaattccaaaaaaaaaacaacccgaaaacaaaaaggggaaacccggggggcccta

SEQ ID NO: 125531 - DNA, 160 bp, Glycine max
  Clone ID: PAT_MRT3847_84364C.1
ggcagcgttctagaagatcaaggtcgtcaacctcatcttcaacatggacggagatgaaatgactatggttatctggaattcagtcatagacaagctcattgtgaccttgttggagttggacatgaagtattatgacatacgcctggcttactgtgatgag

SEQ ID NO: 125532 - DNA, 159 bp, Glycine max
  unsure (1)..(159): unsure at all n locations
  Clone ID: PAT_MRT3847_84365C.1
nngcactagnagcgtagaganctcggaattcggctcgcatgcnnngncaaccaaccnaaactgcncacacaggacaactcnnntgangctcatgaccaananccnngagcaaangaggccatcancacaagccactcaggcttccattgcangatgnct

SEQ ID NO: 125533 - DNA, 2076 bp, Glycine max
  Clone ID: PAT_MRT3847_84366C.1
cctacgcgtcccagacactcagcacttgtctcctacacacattcagtgtctgcctcttagtttttctttgcctcactggctcttgctactttccctcagtaattctagtcatctctgtctttcttcggtcttgaactatcctgtccagaactaaaagcactaacatcttgctgcagcgaaaatgggcttctttctgttaccaaaagcaactccttgcattttgttcttggctctgctgtcttgtacttgctttacttctactgatgtttattatccactcgacccaaatgggaatatcacaatcaaattggatataataagatggaatgcaaaattttatgtgggtgcagtgatggggatatgcttgttgcaacaacttcaaggttcaaataacatattcatatcggtttaacacttgggtaaatgggatggtcattggagaataatgccatgactcagcactaattcaaagtaagcgttggatgatcaggagatggaaacaaaattggtgaaagacagttcaacttgaccttgtaaacatcagaaccttgaaatactttggtgccagctaagattgtcggaaccaccaattacattactttacacagaaggggagccaagcacatggggatgacatggaatgtgacatgcacatactcacaatttctggctcaaaaaactccctcttgttgtgtctcactttcatctttctataatgatacccttgttccctgcctaacatgtgcatgtggctgccaaagtaactcatctcagtcagggacttgtgtagatccagatacaccacatttggcatcagttgttgctggctctgggaagaataacttttcacctttggttcaatgtactcatcatatgtgcccagtccgtatccactggcatgttaagcttaactacaaggagtactggcgtgtgaaggttactattactaattataattacaggatgaattattctgaatggaacatggttgttcaacatccaaactttgacaatctgactcaactgttcagtttcaactacaagtcattgactccttatggttcaataaatgatactgcaatgctatggggagttaagttctataatgattttctcaaccaagctggccctaatggcaatgttcaatcagagctactcttccgaaaggataaagcaacttttacttttgataagggttgggcttttcctcgaagggtctacttcaacggtgacaactgtgtaatgccaccacctgattcttatccgtggttacctaatgctggtgctaggcaagaggtttccttgttttctttagtgatagcatctttggtagccttggtattttatgctcacgcataaagtttcaatctgtggtacacttagccttgtaatagaaaattttcagtcagaccagttttgactcatctgtgatgtcaatttggtatttgaagcatatgggaggatgacatccaagattagatcacgtgtcccatgatttgttacaagaggatttacattggtggtagaatttgctattgttttttgtgtttgttgtaattcaatgatgtatgtatcgttattatattgtaaactgtaattataataaatatacacaacgaaatgtcacgtgaaaatatggacttgatggatcatatgtggatttgaaatggttcacctcgttactatttctctttcttatttttttccttgtttatgtctcgaaaagatgaaatttttattggttttgtgttttttgtttgaggggttgttcagctttccttagacgctttactgtttgcattttctggtggtattcattctatgctgcgtggaccttacgccatgctggttttttaaatgaatgctccagaaagatgtaacctttgttctttgaatatgataaagaaagttggttttgtcctaatgtggaaacttatttttattatgacggataatcttttgatgccaattgtttaagtggaaaatatgctgcttaaattagtttgctgctgtaaagacttagattttaacaaataaataaatgataattgggatcgactaatatttttttaataa

SEQ ID NO: 125534 - DNA, 332 bp, Glycine max
  Clone ID: PAT_MRT3847_84367C.1
accggccggaaaccggagcgacccacgcgccgccataataccccacgggaacacagagccaagggggcggaacagggcgcaccgccaacccaggcacacgccaaaaaccagaccaagagcgcagccaaaccggacaccgaaaagagcacaggccgagacgaccccgcaggggcagacggcgacaacaggaaacaggcgccggcacacccacacggaagaagcccacacccagcccgggaccaccccgcgggccgagagaaaacacaccaaacaaccggccgccaaaagcacaccgcaaaaaggaaccgcaccgggcaagacacccgaggggc

SEQ ID NO: 125535 - DNA, 313 bp, Glycine max
  Clone ID: PAT_MRT3847_84368C.1
attattgaatttagggcaaatttaatagccaaggcactccaaggggggattttactttaaacacccaatccaaaaccacagacaacacagaaccgcccagaaagacccaccaaggattttatttggggggggggccaccaccgaccgaaatcttcaaggcgaaggggacaaggggaagaaccaagtccaaaagggaagagccataaaacactcccctaaattaaagtttccagataatccaatgcaaattgctaagatatatgccagggcaaaaatatccaaaataactgactcaagacacgcctcataaatt

SEQ ID NO: 125536 - DNA, 341 bp, Glycine max
  Clone ID: PAT_MRT3847_84369C.1
cccacgcgtccgactacccggatgtttcaaaaaactaatgtacaaaaatgaatcgcgttaatcacaagcatgactcatggaaaggaaacaccaccacctctaacaccataacatgggcgattaattgcctgaaagggaaattatttcatgacatgggagactccacaggcgtttagtgcacccagatgaactacaagctattgctgccggtgctaataccttgcatgacaaccatgaagacacgaccgacacacatcgtgctcacatgcgcaaggtaatatatgacatggccctgacttctactgagaacgctcatatgcttgtcttgcatgatcaccatg

SEQ ID NO: 125537 - DNA, 419 bp, Glycine max
  Clone ID: PAT_MRT3847_8436C.1
ccggctattggtgtcgagagagagatgcatacaagcttgagacttcacaaaaccggggcgaagctctagggacgactggttgcaaccatgactgcccatctaatggatataactcgatctgtggcaactgcttcaggctgttcttttctgggagagctgtacaggacatggagtgatcagtgtaaggcgacacagatgatcacgagacatactgatgctcatggataggagctacattccaagcacgcagaagacccggatctgaactgggctgaacctgtggaaagaaaatgtcatgctactccatgcagatcatgactcagactattgaatacactgttggaattagtgcatagtgaacgcactagggaagctattgctagacgcatgatgagaaatatgacgcagatgcctatgga

SEQ ID NO: 125538 - DNA, 808 bp, Glycine max
  Clone ID: PAT_MRT3847_84370C.1
tcgtaagctcggaattcggctcgagggagcaagaaggacgggaggtcggggattatggcggcggatgaggcggcgacggcggaggctgcggcggtgatgcggatggagatggagagggagctggaggagaaagtaaagagagcggaggtggcgaagagtgggagtttagtattctgtgcgggtgaggcgcaggtgtatacgctggaccagctcatgaagggttcagctgaacttttagggagagggtgtttgggaaccacttataaggcggttcttgatagccgtctgatggtgacggtgaagcgccttgatgcggggaaaatggcttcgcatgcaactaaggaagtgttcgagcgacacatggaatccgttggtggccttcgacaccccaatttggttcctcttagggcttatttccaggccaagcacgagaggctcataatctacgactttcagcccaatggcagcctcttctccctcatacacggttcgagatcaagcagggcaaggccattgcattggacatcgtgcttaaaaatagcagaggacgtagcacaaggtctggccttcatccaccaggcatggagactggtccatggcaatctcaagtcctccaatgttctccttggaccagattttgaggcatgcattacagattactgcctttctgtgttgacacacccatccatatttgatgaagatggggattcagcagcatacagagctccggagactcgcaaccccaatcatcacccaacccacaaatgcgatgtttatgcgtatgggattttgtgcttgagcttctgac

SEQ ID NO: 125539 - DNA, 2384 bp, Glycine max
  Clone ID: PAT_MRT3847_84371C.1
cggctccggcgcctcggggggtgcttaagcttaagaacaacaaggggagcagcctatataaatcgccaattcttaataaacgtccgaaacatcctacttttctttcttggcgcaattcagacactgtacccattcgtgatcatgtccaaccccaaatcagagtcagtagtgtctgaaccctctgcttcggaaccttcaatacccatttcatatccaataaaaactcttgaggacttggagtctcgctcctatttcgagtcctttcactaccctttcaacaaagcttcttcttcggtcaacaattcttcttcttcttcgttgcccaacaggcgcagattgcttgtgtgccatgacatggctgggggctacttggatgataagtggattcaaggtggcactaaccctgatgcttatgccatctggcattggcatttgatcgatgtctttgtctacttttcacactccctcgttactcttcctcctccttcgtggaccaacgctgctcatcgccatggtgttaaggtgttggggactttcatcactgaatgggatgagggaaaggctgtctgtgatacactgctttcgacaaaggaaactgcacatatgtatgcagaacgtctggcagagcttgctgctgatctaggctttgatgggtggctaataaatatggaagtaaatttggatctcggtcaaatttctaatttgaaagagtttgtagagcacttatcgttgagaatgcattcttctgtgcctggatcattagtgatatggtatgacagtgttacacttgatggtaaattgaattggcaagatcaactaaatgaacataataagcccttctttgatatatgtgatggaatatttgtgaactatacatggaaggaagactatccaaggctctctgctgctgttgccagtgatcggaagtttgatgtgtacatgggcattgatgtatttggaaggaacacatatggtggtggacagtggaatgtaaatgttgctcttgatgtaataagaaagaatgatgtctctgctgcaatatttgctcctggctgggtctatgagacaaagcaaccaccaaattttgagactgctcagaatagttggtggggtcttgtggaaaagtcatggggaatactgcaaaaacttcctggagtactaccattctacactaattttgatcagggacgtggttatcatatttcagtcgatggcgataatgtatcagatgccacttggtgcaacatttcttgccaaggctttcaggaggcatcatatagtggaggaggaaacattacattcaaaggatcccttgaagagcaaacttactatgagagcaaaatctttcaaggagagtttcttctgaccaatttgcctatccactttatttattctgtgaaatctgatggcaattcttcattgggacttaagcttgagttcacttccggcgaccaaagagcatctgtgcttctcacatcccgggcagtgaatcgtttctcaagcaaattcagcaaagtaatcatgacacgtgagcacaagggattatcctctggatgggttataaatgaaggtgtagttgcaatgaatggatacactttaacagaaattcatgcagcgtgctatagatcaaatggcaacgatgaaactgtggcttccccatcagattattttgcacttcttggccatatcacaatcaagacttctgactataagtcagattttcctgtgtcttcttcctggctagttgatggcagctacataaaatggacatcagaccctctgggttcaaagacccttgatcttaaaatttcttggaaactaaaaaatggacagaattttctatttctgaagtacaacgtgtacttggtgaaattatcaaaacaagcagatggtaatccaggtacaacattagaggatgtgaaggagtaccttggagtagcacaagtaaactgtttttatgtttctgacctcgaagttccttctgacacttctagtctcaaatttataatacaagcctgcggtgtagatgggacatttcaagaattggatgagtctccatattatcaattggagggtatgaaccctaaagaactggcttcgagggcagcaaacctccagcaagaagaagaagacacagagcttccttgttgcctatttctggtatcctatcatttcccgccctcatcaaaaacaccttgtcctcaaggtgttgggcgttcaaactacagcttccaaaagcaataccggggtcccaaggagcatggcgggtgaaaaatgggttcaggtggcggttcatggagtgcatggcgtcgtccagacgagcaagggcctcgtcgaggttgcgggaggccatgaggaacaatgatgaaagcaccaattgttag

SEQ ID NO: 125540 - DNA, 340 bp, Glycine max
  Clone ID: PAT_MRT3847_84372C.1
cacgcgaacagtcagctagtaattcggcctccctctttttttcctgcttactgattccaaccatatactactaaaatggcttccttacgtgtgcatatattatcattcttcttcatagcttcgtcactttaatccattagcaatgtccaagccactacaaaacttatggcccccacattgcccaataagggaaattatcctcggggggggaaatatcgcccataccccccagtaacaagaccggccatagcataaggctgccaggaccctttattcgcacacttccccccttgtcaccacctcctaaccctaccaaaagttgagtagtagaattatgtgc

SEQ ID NO: 125541 - DNA, 2261 bp, Glycine max
  Clone ID: PAT_MRT3847_84373C.1
atgtccaaccccaaatcagagtcagtagtgtctgaaccctctgcttcggaaccttcaatacccatttcatatccaataaaaactcttgaggacttggagtctcgctcctatttcgagtcctttcactaccctttcaacaaagcttcttcttcggtcaacaattcttcttcttcttcgttgcccaacaggcgcagattgcttgtgtgccatgacatggctgggggctacttggatgataagtggattcaaggtggcactaaccctgatgcttatgccatctggcattggcatttgatcgatgtctttgtctacttttcacactccctcgttactcttcctcctccttcgtggaccaacgctgctcatcgccatggtgttaaggtgttggggactttcatcactgaatgggatgagggaaaggctgtctgtgatacactgctttcgacaaaggaaactgcacatatgtatgcagaacgtctggcagagcttgctgctgatctaggctttgatgggtggctaataaatatggaagtaaatttggatctcggtcaaatttctaatttgaaagagtttgtagagcacttatcgttgagaatgcattcttctgtgcctggatcattagtgatatggtatgacagtgttacacttgatggtaaattgaattggcaagatcaactaaatgaacataataagcccttctttgatatatgtgatggaatatttgtgaactatacatggaaggaagactatccaaggctctctgctgctgttgccagtgatcggaagtttgatgtgtacatgggcattgatgtatttggaaggaacacatatggtggtggacagtggaatgatatgtgttatttcgcttttcttggtaattatctcaatgttgtttatgtgctttctttattctcatggatgtctcaggtaaatgttgctcttgatgtaataagaaagaatgatgtctctgctgcaatatttgctcctggctgggtctatgagacaaagcaaccaccaaattttgagactgctcagaatagttggtggggtcttgtggaaaagtcatggggaatactgcaaaaacttcctggagtactaccattctacactaattttgatcagggacgtggttatcatatttcagtcgatggcgataatgtatcagatgccacttggtgcaacatttcttgccaaggctttcagccactccttgagtcttctgatccaacaaattctattcaagtttctgtagacttgaaggaggcatcatatagtggaggaggaaacattacattcaaaggatcccttgaagagcaaacttactatgagagcaaaatctttcaaggagagtttcttctgaccaatttgcctatccactttatttattctgtgaaatctgatggcaattcttcattgggacttaagcttgagttcacttccggcgaccaaagagcatctgtgcttctcacatcccgggcagtgaatcgtttctcaagcaaattcagcaaagtaatcatgacacgtgagcacaagggattatcctctggatgggttataaatgaaggtgtagttgcaatgaatggatacactttaacagaaattcatgcagcgtgctatagatcaaatggcaacgatgaaactgtggcttccccatcagattattttgcacttcttggccatatcacaatcaagacttctgactataagtcagattttcctgtgtcttcttcctggctagttgatggcagctacataaaatggacatcagaccctctgggttcaaagacccttgatcttaaaatttcttggaaactaaaaaatggacagaattttctatttctgaagtacaacgtgtacttggtgaaattatcaaaacaagcagatggtaatccaggtacaacattagaggatgtgaaggagtaccttggagtagcacaagtaaactgtttttatgtttctgacctcgaagttccttctgacacttctagtctcaaatttataatacaagcctgcggtgtagatgggacatttcaagaattggatgagtctccatattatcaattggaggttgaagatccctaaattgtcattaaaatgtaacactactctaatgaaggaaggtccctaaattgtcattagagtgtaacattattcctccaataaaggaagatccataaattgtcattagaatgttacattggaattggacaattcacgtttatgtttgcagtaagttatacaactctttaagagataatacc

SEQ ID NO: 125542 - DNA, 1530 bp, Glycine max
  Clone ID: PAT_MRT3847_84374C.1
gcaagaatcagctccaaatcctgcttgtagtggttgctccttcgtaggcaatcatatgaaaacagaaatcgttattagattccttttggataagatttacaattctgttaagagaaattcctctatatatagctatgtaaacaatgaagcgggatataagaaaatgatatttcccttttcttacctctgtgtcttcttcttcttcttcttgctggaggtttgctgccctcgaagccagctttagggttcataccctaacaattggtgctttcatcattgttcctcatggcctcccgcaacctcgacgaggcccttgctcgtctggacgacgccatgcactccatgaaccgccacctgaacccatttttcacccgccatgctcctgtgcctttcccccccacatccaaatccccaccggttcctcatcaagccacttttgctcctgcaacaccctggttcgcaccatctccatttgaggaccctgtcggtgccctgttcaaactcactcagacggggtcagtgctcacatacctactggagtttgaagccttagccagtagaattatcggcttgccgggcaccttcctgttgccttgcttcatctcaggtttgcaaccggagatccgccgtacagttcaggcccatcagcctacgactgtggaccaggccgccggcctcgcgaagctcctggagcagcaaacgtcttcgcggccgcgaaccccacctctggtagctccaccatccgcccctttggttcctcctcacatcgcaaccttgccccctttgctgccatccccgccgcgacccccacaggccccgaccattagctgcctcaccccggaggagttagcctcgcgccatgagcacgggctgtgcctcacaggcgaggagaagctccatggcggccgtcgcgaggtctctagggttcttcccttcatcgtagtgaatgaggaacccacagacccattgggtcctaatataaagcaccctgacccgcaactacccacacccggatccacaggacttgacccaaaacccatacctgacccagatccaaaacccacccctgacccaaggccaaaacccacacacgacccggccgcacaccccacacccaaaccggacccggcccaaattggtctgaaatccttatcgggagatttcacaccgggaattttgcgccttgccggccttctctccggcattcgagtggtcctccttgttgttgggagaagtccccacaccttcttccagcctccactatcgatctctctgagcttaccttgttggactgctccaactctttttcgcgtgatgttccttcctcacggatactttgtggaattgcaggttcgtcggaatgaaccttgggaccccggtattgcttttggaagctgtagtttgaacgcccaacaccttgaggacaaggtgtttttgatgagggcgggaaatgataggataccagaaataggcaacaaggaagctggaacagagaaggcaatggtaacaatcagcaaaccagaggtgtaa

SEQ ID NO: 125543 - DNA, 158 bp, Glycine max
  unsure (1)..(158): unsure at all n locations
  Clone ID: PAT_MRT3847_84375C.1
cggccgctcaagccggcgggcggggtcgtactcgnactgcgagtggagaattccaaaaaagggaggaggaacggncacggcaccacctacaaaggagttaccgtttttcacacaaagaactggcacactatcaccggcaagggattgngcgcggacat

SEQ ID NO: 125544 - DNA, 1509 bp, Glycine max
  Clone ID: PAT_MRT3847_84376C.1
cttaggtccaattccagatacaacattcattaaataaccatagttaggccatgaattgaccctgctaaaaaatagaaccagatatacaaagtcgtcaaaacatatgaagtattagtcattaggatatcaaagattgcatgcgtgaaagttaacgctcgcatgccatcacacaggtatacagggtatggtcgttgtgtagctcgcgatctagctagatagacataaaaatggtaataggtagcacctcaatttcctttattatgtctatctagtatggacataagggaaagaaaaatatagaacaggacacatcatatgtatatatacaggcatcacatgagaaaggagaagctgctcataaaaagggaaaacaatactagtacagataaagaatgctcgtcaagcaaaaaagttaatcatccttgtaatctttgcaaggtctagtttcaaaaccaccaccttccctctcctccaacgtgtaaggcatgtaggtacctaagattttgtcccacataacgaagaatggctgcgagaagttgtacttgttgccatagagctggtgatgtacatcatggtaggctgagttgtttttgaaaaagatgtggaaaaggttcccggggagcaataacccgcagtgatcatccactgttttaatggtggcaaaggagaagaagaagatggaggctcgaggactcatcccagagagtaggaaagataatgccccaccaacagtgtcattcagaagcccctcgatagggtgattgtaaagagctccatacgaatagggtacaatgagtctgtgatgtagagagtggatatgtttgtaaaggaatttgttgtgatgcatgtatctgtgcataaagtattgccatgcgtccattataagcatagcagtaacaaattgccttgctaaaacaagtagagaagtattctggcttgtagtattttggccgtcacttcctgtcagcgcaaacaagagggttgcaaccacagcctgaactagctgttggaggagaacacctttaaccacagcaccctttgacaccaaatttttttcatcctcttcctgcttcgaatgtaaccgataattctcagcaaacaaccccagatcaacgtaaatcccagaataaatccagtaaactactattggcacaaaagtgcctaacatctcatcagaaacccccaaatccatatcccaacaccccagaagaagaaaaaaaactaatttttgtcgtcgatttgatttaacaaccaccacccaccagacctaaaatttgcatcaattccagaagcccaagaaacaagggaatcgggtaccaaatgaagaagccctaatttttaaaaacagaaaaattgaagctctcactcctcttgttcctccaaccccaaatgattaattagttcagcgggcaacaagcatgatagaagcggaccaattaaataatgggtaggtacgtaatcagatttttagggttccaagcagaaggaagattccaaagagagagagag

SEQ ID NO: 125545 - DNA, 325 bp, Glycine max
  Clone ID: PAT_MRT3847_84377C.1
ctcgagccgattcggctcgagctcgagccgtaaagcgttcaaagccacgcttttacgcgctttacccgattttcttgctgctgaattttccactgttcaaggttgaaaatcacatttttatcgatcttcaccttctgggttgctttttttttttcctcacattcttcttcttctttcagttttcgctatggaatcgaaaaaccctgcgaggtttacgccgttgaagcaatagtcgcttgccccataacgccttatctaagaagcttagctccaaaaagatggttaagctgttgatcaaggtgtgatggttaaagtattctgtatt

SEQ ID NO: 125546 - DNA, 666 bp, Glycine max
  Clone ID: PAT_MRT3847_84378C.1
tgcagagtcctgttttcagacgcaatgaatgatgggtgtttccctcgtgtagattataataaacgtgatgatatagttgaattttctggatgcacttcattttgtcaatcttgtaatatccagatatctgaaactggtggaacctcaacttcacagctaacttgtcctcagtgttctaataattataaaggaatttcatcctcccaatctgtccctctagtactttctgctagtgatgataggttggggcctactgccaacggcaatcaattatttgggatggaggatcaccactttgtctccagagcatgtgctaacttcacttatgtcaacaacatatccagttcttgtgttgatggggtaggtagtgcagtaatggaagagccacatgatattctgaagggtacttcaaaattggtccctgtaaataattttggctgtggatcagatgctaagcaaacttgtaatccaacagctgaaaaaacaaatgtgcatacagaaaaggagggctcaggatctctatgttatgaacctccccgctttccaagtttggatattcctttcttcagttgtgatcttgtacaatctgggagtgatatgcagcaaggagtttagtccattgggtatccgccagtttaagatgtcatctatgaactggcttactcc

SEQ ID NO: 125547 - DNA, 364 bp, Glycine max
  Clone ID: PAT_MRT3847_84379C.1
acgcagatttggttattctctatttgtgtgctcaatatggagggaatcttttcgttgattacggggagaccgtaatgtaggggagtcggatcttcctcaactgctgaacaggttatcgaaggaattgatgccagcaacctcactgcaatcatcacaggaagagccagtgtcatatggttggagacagcacgtgttctggcaattttaaaggcccatgtcataattgctgccagaaacatggagtctgcaaaggaagctaaacaactcatacttgaagaagacgaatcatctcgtgtggacataatgaagcgtgacctatgctcattgaaatctttcagaacctttgttgacaactttattactc

SEQ ID NO: 125548 - DNA, 484 bp, Glycine max
  Clone ID: PAT_MRT3847_8437C.1
ggctgcttgaggaagatatatggttattcaaaattcaaatgtgttattttgttatttctgattcttagtttatcaattcatggctatattctttttagcaagaaaggttcacacgatgtctggctcattaggggacaggatacaaattttcctgtttttttgtgttgtatagtgctaagatcccagctagggagaaagcatacaagttagtaggatgcaacaatttttttagtaccagcttctatattttcttttgaagaacatcatcatcctttttggccttgtttttaattatgttgcattttgaagtcagtttttttgctttctctttacaggtagaggacgtttctcatctggcagggctcctagcttcaggggtgaaggtgcaagagggcgtggaaattatggaaatggccgaacctatggccgtggtggtgactttaatggcaggggagaatatggttataggaatggcaatcgggga

SEQ ID NO: 125549 - DNA, 314 bp, Glycine max
  Clone ID: PAT_MRT3847_84380C.1
gtgcgtcatacctaaatataactttaacaccatcaactcacagaggaaggcatacataatcatactaataggaacgggctgacaacctaactcaaaaccaatatggctaacctaaccctaggctaaatgtctagtatttacagagtaatacacagactatagaacctatcagcagtctccagaaaggctaaaccaggttcacaaggaggccaccgggctatgacacccaactagctgtaagacaatacactggtggttctaaggctgagacgccaatgcctgtcaccagaaaaaacttaagaaaagggcttgtt

SEQ ID NO: 125550 - DNA, 472 bp, Glycine max
  Clone ID: PAT_MRT3847_84381C.1
atccttcaattctatggtgtctaccacctatcaagaccaacggactacatgatccattcaagtggtcgaaagcgagaggagacttacagacgattgcctccttcttgggaaatttgatctgtctggaattgctgcaccctcaatgggtgcgcctcaaattgaaatgacctgcgaagttgatgccttcggcatactatatgtgaacgcacaagacaagggcactggtcaatcatactagatctccattactatcaagtatggacgtactagacagataaaaattgttagaatggttcgcaaagcataggagactgcagacgaatacgacaacgtgacagagaggatccacgctcgcaccagtcttgaaacctatgtatacatcatgaagaacgagatcaatgacaccgacacgctcgctgactagttggagtctcatgaacaagagatgatatagactgctgtgaatgaagcc

SEQ ID NO: 125551 - DNA, 437 bp, Glycine max
  Clone ID: PAT_MRT3847_84382C.1
ccgggacactactattcctctgaagcttgctactgatcttccacactgcataccttaggccttgcgaatgcgaagttaatctgccagatggctaaggaaaagggtcagatcaacattgtgggggttggccctggggaccctgaggaggctaccaccattaacgagatgaacaagactgttgtgtagaaagaagctccagcgcatgccatatgagggtagtgcacggacggctctcggaggggaaccagaaaattatgttaacgaaataatctggaaccctaatggatcagtgacgtcatcagagcggatcctacgatacctgtgctatggatacattctttgagatgacagtcttgatgaacagaaccattctgatgtattgctttgccttgaaagttaatgcatgcttcttatcttctgactatgaaaaaaaaaga

SEQ ID NO: 125552 - DNA, 530 bp, Glycine max
  Clone ID: PAT_MRT3847_84383C.1
caccaccgcacctctgtcaaacccgcgccacaaggcgatggtgcttccgccaccactgcgatggtctacctttgccgttaatggaaatacaagacgaagagcaagagagggaaggagaacgatctacgacggtgcgttcgcgtttggcggcttcggtgggtgcgatagattggttttgtgatgcattgtgcgattgctcttcgtttcaggcatcggaagagaaggtggttttcagatgtggctcacggcggcgatgaagatgaggttccaacgaagactgaagttgcttgggacgcagcgaggaatggaggttgttcggtggttcgtcgttatctggcgttttccttttgcgaaggatttcaaacgggttcgtgtttggcttgatttaaaaaaaaaaaaaattgatttggatttgaatctggatctatttcttgaatctaatatcatgaatctggatctgtttcttgaatcttatgtttttttttttttatcaatttctcaaatctaaaataaattcaacattatcttca

SEQ ID NO: 125553 - DNA, 1935 bp, Glycine max
  Clone ID: PAT_MRT3847_84384C.1
acgcgttgatttaaacgtgacaacctagacgttgtatatcattccttcttcttctttttgtgttgacggtgatctgggtctcgatcaaagtcaggacaaaggcaggctctcatctgttcctcttctacatcacaacaccaaacctcgtcttggctgcgggtacgacaagcgaggccacctccctgcactccgaacgctacgtttactaaactcatcgaaacacagaccagtccgttaggtcaacccacgattgtgcagtgcacgggcgcgacctgacatttttatccaacaaagaaacctgtacctccttctagagacccgacagaaatgaagtggcaaaagccgactctcctgtttattctgtatcgtttctccgatcaattaagacatagaagtacagaaaggagaaaagtatcgattcaaaaaagttgtcgtgtatgttatacattaattgatttcagaatgtagtgagtatccgttcactaaatcgcagcatagttgtctccatgttattatttagacaaagagactgtatctgaaagcatttatgaagataactaggatgactgaaacttagtcaagatgttggcagatgggagataacacaagggaggataatttaggtttgcttgtcagatagattagaatgacacacataaagagacatggaactaccaatgaagttcttaagagaccaggagctcctgtaataggaattacagttattatactggaagattatcgagaaaaatagatatccgtctctcacaagggtgagaaccattaccatgaatggagtgtatgaacacaggatcatatgacataacagcctctttttggtattgatgcactacaagtatcactttaccatcatcatcagtagtgggaatcttgaatggatttttttcagtcagaataaaatcataaactcctaaattagggtaaatttaagaggtgaaaattattcaaagactagcaaaggtccagtttgagaaaatattaatagaaataagaaagatcgcagtctcctagtcttcggtacaaagttgccattgaatttcgaatcccctaagccttattctataattttgataggatgtccataacatcgccttgaaaagcatccattaagattgccaaatagaggctaaggtgggggcaagcagtatttgttaagagcagagtttcgtcttcccagtataacggatgaggaagcaactcctgagagaaaagctcctatacgtgtaaaatttgaaataccatattttactgtatctggaatacaggtaagatatttgaaggttattgagaaaagtgggtatcaggctcttccatgggtgagatacataacgatggccggagagtatgaattaaggcttatttaagaacttgtatttttctttggtgctggaattccaccaaataacagggtcagcttccatgatcaatggttttaaagtggtggatgggagagggactcttgggagggaaattagtatttgacctgatcatatatcgtctggcgtcatgatactcttgggcgcagatggcaagtcgctggtcgtacatagcccgaaaaggaaaaagttacacgaatagccataacgaagaagttgattattcggaggaataaaaggtacagggttctttcggagaaggagatttgggagaaggaaaaccctagcaagcgatcggaagcattttcgaagagggaatcagtgaagcgaagacgagagggttgaattgaagggtgaagagagaagcagagtggggaatcgccggcgatgcgacccccagaacgccggaagagagagtgccgtacagagaagaaaagacagagtttggtttgggaattgggggaagtgtgagaaggaagaaaaccaaatgaaaccaagtaagcagccattcaaacagccgttcgcaggtcaatggcag

SEQ ID NO: 125554 - DNA, 459 bp, Glycine max
  Clone ID: PAT_MRT3847_84385C.1
tggctgatctcagtccgcccctcgctggcacccgtgcttgggggcgtggtcccccctcaggctggtcttatcctccctggcgtccttgcccgtgctcgtggtgggataactatatttgtaatcttaaactcaaactcaacaagggttggcatgattcacaccatttgaagaagcaccctccaaccaccaagctcaggaaaggagttttcaaactgaattataagtaggctgtgaaagggccatcacgttgtatgggcattgcaactctcttttcaaacttaagatgcttaatgctatgggcttctttgtgttgtgagtctggtgtttcatttggttgtgacactacccattctttataggtgctcaggtaaattttggaattcaaaagcaagatataaggttgttttgtgataaagtgttcccttcaaacctaaagttattgtgtcctgtttgtctctc

SEQ ID NO: 125555 - DNA, 173 bp, Glycine max
  unsure (1)..(173): unsure at all n locations
  Clone ID: PAT_MRT3847_84386C.1
cgttacatatatgtcacctgagaggattcgaactgaaagctattcttatccagctgatatttggagcctggtctgcactttttgagtggggaaggagattcccgtaatgcaagaggcttcactagtgaaccgagtctactaataaaattccgacgctgtngtgtaaagcattg

SEQ ID NO: 125556 - DNA, 1585 bp, Glycine max
  Clone ID: PAT_MRT3847_84387C.1
ctcgatttgaagacgatcgaaccttttcccttttatatctgttcctttttcctttgatttttccttcatgaaagagagagaactgcttaccttaaatttatgtactgaatcaatgagtggtctgctttagattttagaccactctatatgtatttacttctccaactactcgaatttaattttacagtactgccacaaatgttgagattgagttgcctgttcctgctgatgcaaccaatccaaatgttcggacttcaatgggatctgcatcatatgcacctgaaaaagatgcattaatctggaaaataagatcatttcctggaggcaaggagtacatgttaagggcagagtttcgtcttcccagtatagtagatgaggaagcaactcctgagagaaaagctcctatacgtgtaaaatttgagataccatattttactgtgtctgggatacaggtaagatatttgaagattattgagaaaagtgggtatcaggctcttccatgggtgagatacataacaatggctggagagtatgaactgaggctaatttgagatttgtgtccttgtttggtattcacaaaataaatgtgtcattccgtgatcgtggatggaagagggagtctcgagtcattaattttttaccaaccccatatgagttactaattgtctagaaagttgttgcagctgaaaattctgagttggaaagtgtgagccgaaactcttgcaagtcccttcggtcaaatctgttttgattgggaaaatgattcgttctccctcttcatttttaggccttttttgtaatcacaatgtgtcgatctttttccaacgtcttcaaattgtaatctgatatacattttaaagagaatcatagggttttgtattagcaagtaaatgatttctacagacaaattatagatagggaataattgtccctcagccatgtatgaacgacaaatttttaaatatttattcacagttttacagatgccgcagatgacccagacacaccccaccgtgacttcatgatcgaaatcaggcccaagatgattgggctcttgctgcaaccgtcgccgagaaattccccggcgaggctcgagtaagtggactgggcccagcagttgggcctggcgaaaattgcggactccgccgccggcggaggaatctagatccgtcttctgggtggcgcccccgaagaggcgcgtgcggatccagcattcctggacacatcgcgaattggcgacgcgcacgccggcggaggaggcgaggctctgggcgacgtagcccgaaaaggaaaaagttacacgaatagccataactaggaagttgattaatcggaggaagaaaaggtacagggttctttcggagacggagatttgggagaaggaaaaccctagcaagcgatcggaagcattttcgaagagggaatcagtgaagcgaagacgagagggttgaattgaagggtgaagagagaagcagagtggggaatcgccggcgatgcgacccccagaacgccggaagagagagtgccgtacagagaagaaaagacagagtttggtttgggaattgggggaagtgtgagaaggaag

SEQ ID NO: 125557 - DNA, 1434 bp, Glycine max
  Clone ID: PAT_MRT3847_84388C.1
tacctcgatttggaacgatcgaacaatttcctttataccacctgatgggtcatttgatttgatgacatataggctcagtacacaggttaagcctttaatttgggtggaagcaagtgttgaaaagcattcaaagagtcggattgattggtggagagtgttaacatactttatggacaaataattagatctgatgttgttggggcattgaagatgagaacatatctgagtggtatgcctgagtgtaaacttgggttaaatgatagagtattattagaggcacaaggtagaacgaccaagggaaaatcaattgacttggaggacatcaaatttcatcagtgtgtgcgtttggcccgatttgagaatgatcgaacgatttcatttatccctcctgatggatcatttgatttaatgacatataggctcagtacacaggttaagcctttagtttgggtggaagcacaagttgaaaaacattcaaaaagccggattgagattatggtaaaagctaggagtcaatttaaggaacgcagtactgccacaaatgttgagattgagttgcctgttcctgctgatgcaaccaatccaaatgttcggacttcaatgggatctgcatcatatgcacctgaaaaagatgcattaatctggaaaattagatcattccccggaggcaaggagtatatgttaagagcagagtttcatcttcccagtataacagatgaggaagcaactcctgagagaaaagctcctatacgtgtgaaatttgaaataccatattttactgtttctggaatacaggtaagatatttgaagattattgagaaaagtgggtatcaggctcttccatgggtgagatacataacgatggctggagagtatgaattgaggcttatttaagaatttgtatctttctttggtgctggaattccaccaaataatcgtgccaacttccatgatcaatggttttaaactggtggatgggagagggactcttgagtaaaattagagtttatttggcctgatcatatctcctcttgcgtcatgatagttttggcaacagatcgtaaattgctcattgtccgtaaagttcataacttcaagtcaggaattggcaagtgtaaggctgtatcttctgtgtaagtcctttttgttcaaatctgtttgttgggaaaatgtctgatttttttttcctcttgttttcttttcttttatttacgatctgtcaatctttgccattgtcttcaatttgatttatttgtaagagaattattagcttttgtattactaagattgaatattttccccatctttatttgtattcataacctgacccatcttgtgtattaatatggtgccatatccctccctttttgaacaaaaaccatgtatttttttaccattcattcaaaaagttgattgcaggtcaatggcatcaaa

SEQ ID NO: 125558 - DNA, 1487 bp, Glycine max
  Clone ID: PAT_MRT3847_84389C.1
gttattatggaacaagtaaggacttggtagcactggatcttctcagaaagttgttgaggagtagagaggatcaacaccatgttcctggtttgttaatggcttctaagatttgttgtgagaactctactcttgcagaagaaggagtaagctttgcgtggcaagtgcttcagaacctggatggtagatgtaatcagctagaaaatcatgccaatttctttcttggtgtttcactttcagcacactcgaaattggccgtttctgattctgataggtttaagagacaatctgaggcacttcaagccctagaaactgctggaagaacgggaaacccctttgtactataccatctcagtttagaatatgcagaacaaaggaagctggatgctgcattttattatgcaaaatgctttctaaaactggaaggtggttctaatgttaaaggatggttattgttagcccggatattgtctgctctaaaacagtttttggatgctgaatctattatcaatactgctttggatcaaactggaaaatgggatcagggtgatttgttgcgaacaaaagctaaacttcaaattgcacagggccagttaaggaatgcaattgagacatatacgcagttacttgctgttcttcaaattcagagtaaaggatttggttctgggaagaagctatacaaggtttcagttgatccagtttgctgttgtaataacttatgctggcttttccttccccatgtttatatcagtcttttacagtggcatgatgcagaggtgtgcctttcaaaatccaaagccatcaaaccactctctgcttccagatgtcatgcaataggcataatgtacgaagcaaagggccattacaaagaggctctaaaagcttttggtgatgccttggacattgatcctggccatgtccctagcataatctccactgctgtagttcttaaacgatgcagtaataaatcaaatccagcagttaaaagctttctgatggatgcgctacggcacgacagattcaacgcttctgcttggtataatcttggccttcttcacaaggctgagggtacagcatcatcattagttgaagctgccgaatgttttcaagcagcacactttcttgaagaatctgcacctgttgaacctttcagatgactcattctatgatggctggtctactggtagaagcaaaagagcaagcatgtttcttttagagattaaatagcaaggaattttcctgtgaatccttctgtctcaggatagctaggagagagatattgatcatggtttggaaggctagttcataagaagcaatagtaataaacaaaagaaaaagatggctaactctacaagcagttttgtgatgcaaggattcatgcttgatgtattcaactattctataattttcacatgtcttctttagaggtcaattcagaaaataataaaatgaaaagggaaaaaaaaatagaggcttgtttcttgttttcc

SEQ ID NO: 125559 - DNA, 848 bp, Glycine max
  Clone ID: PAT_MRT3847_8438C.1
atttcggttcgggttcccctgctagtctagccaatagccaacccaacccacgtgctttctctcttttcttttctctcttccctcaggaaaaacacacaaccctccccaaaacggtgtcgttttctgggaccattttagagagaaaaagagagagagagagttgtgttgtgatgcggaaacgttgatcccaaatgcacccgtacaaccggctaccgagcagcgggcactcgacgccgtcaccgccgccgtctccgctccggtcgccgaggctccgccacgcagggcggtccaaggccgggcggttctctccgagccgggggagcggtcggaccgccgcgcagcggctcagctggatgttcctctctgttctgcttcgacgacagggcgtttttctcttcgctcctctcatttacatctccggaatgctcctctacatgggaacggcgtcgttcgacgtcgttccggtaattaaacaccgtcccgcgcctggctccgtctaccggagccctcagctcttcgccaagctccgcctcgacatggattccgataattcctccgccgatgcgatatctacaatatggaagtatccctatagaggtggtgagtggaagccatgtgtgaacagatcttcagaagacctacctgaatcaaatggatacatatatgtggaggctaatggtggcttaaatcagcagaggacatcagtatgcaatgcagttgctgtagctggctatctcaatgctacccttgtaatccccaactttcattatcatagcatatggaaagatcctagcaaattccgggacatttatgatgaaggagtttttgtcaataccttgaaaaatgat

SEQ ID NO: 125560 - DNA, 921 bp, Glycine max
  Clone ID: PAT_MRT3847_84390C.1
gcaatatatctgtaaaactgtgaatagatatttgaaaaatacatgtatattttatcgtgcatacatggttgagggacaattatttccctatctataattggtcagactacaatttgaccaattatacaaaaccctagaattctctgtaaaatgaagatcagactacaatttgaagacgatagaaaaagatggacagattgtgattacaaaaaaaggcctgagaatgaagaggaagaaccaatcatttttcctatcaaaacagatttgaccaaagggacttgcaagagtttctagcttagatttagctgacaactttctagacaatgagtaacttataatttgatgcggtcagccaaaaatcgattaaagactccctcttccatccacgatcgttaaatgagacaattattttgtgaataccaaacaaagacacaaatctcaaatgagcctcagttcatactctccagccattgttatgtatctcacccatggaagagcctgataaccacttttctcaataatcttcaaatatcttacctgtatcccagacacagtaaaatatggtatctcaaattttacacgtataggagcttttctctcaggagttgcttcctcatctactatactgggaagatgaaactctgcccttaacatgtactcctttcctccaggaaatgatcttatttttcagattaatgcatctttttcaggtgcatatgatgcagatcccattgaagtccgaacatttggattggttgcatcagcaggaacaggcaactcaatctcaacatttgtggcagtactgcgttccttaaattgactcctagcttttaccataatctcgatccggctttttgaatgtttttcaacttgtgcttccacccaaactaaaggcttaacctgaaacaaagatcaaagaat

SEQ ID NO: 125561 - DNA, 259 bp, Glycine max
  Clone ID: PAT_MRT3847_84391C.1
attgagacacaaatgtattaacggacatgctatcaatcacagaaagaagtggcaagatacattatgtatccttacacagaagacacatactaccacctatgaccagagcattacttattacatggcaacaaattctagaggatcacagcacttgattatcacagaaaagccttaaagaaaataaccgaccatgtgcaaaccccttcattaatccaaagttgggcgatcaagcaacacctggctgcataattggtccaag

SEQ ID NO: 125562 - DNA, 2296 bp, Glycine max
  Clone ID: PAT_MRT3847_84392C.1
gacaacaactgaggagaaggatatcttgaatgggatcactggttctgtaaatccaggggaagttttggcattgatgggcccctcgggaagtggaaagacaactcttttaaaccttcttgggggaaggttaagccatcctataagtggtggttctatcacttacaatgaccgaaccatattccaagttccttaagagcaggataggattcgtgacacaagatgatgttttgtttcctctcctaactgtgaaagtgacattgacatatgcagccaggctataactaccaaaggcatacacaaacgagcaaaaggaaaaacgagctttatctgtaatctatgagcttggcttggaaagtgttgacgacactatgatttgcggtacctttgttcgcggagtatctggtggtgagaggaactttgtgtaaattggcaatgagatcataatgaacccttctctcttttttcttgatctccggcattcaggaatgaattctaattctgcctcatattagtaactggtgctttgtaagtattaagaattttagatgattatgccaacaacaatccaccaaccatcaagcagactcttccacaaatttgacaagttgatccttcttggaaaagggagccttctttactttggaaaagcctcagaagcaatgacttacttccagtccataggatgttcaccacttatttccatgaacccggcagagtttttgctagaccttgctaatggaaacataaatgatgtttccctaccttcagagttggaagataaagtgcagatgggaaatgcagaagctgaaacacaaaatgggaagccatcaccagctgttgtacatgagtatctggtggaggcatatgaaactcgagtagcagaaacagaaaagaaaagactaatggttcctatacctcttgatgaagcactgaagtctaaggtttattctcataagagacaatggggagcaagttgggatgagcaattttccatactattttggagaggaatcaaagaacggaggcatgactattttagctggttgagaatcacccaagttttatccactgctgtcatcttaggattactttggtggcaatcagatgctaaaacaccaaaaggtttgcaagaccaggcaggactgcttttctttattgctgtgttttggggattctttcctgttttcactgcaatattcacatttcctcaagagagagccatgctgactaaggaacgaacaaccgatatgtacagactaagtgcatatttcgtggctagaactacaagtgaccttctactagacctggtgctaccagtgtttttcctccttgttgtttatttcatggccaatttgagactcggttcagggcgttttttctttagtattcttaccgtttttctctgcatcatagcagctcagggtcttggacttgctattggggctacactaatggacttaaaaagggcaacaactttggcttcagtaactgtgatgaccttcatgctggctggaggattttttgtgcagagggtccccatatttttttcatggattcgttacatgtcattcaactaccacacctacaagcttcttctcaaggtgcaatatgaacacatctcaccagtcatcaatgggatcagaattgatagtggtgcaacagaggtagctgctctaatagccatggtttttggttaccgtttcttggcatatctttctctaaggagaatgaaacttcaatctggagcttaaattcaacttgatcactctttgcatgtgggtgataatattaattaaacaaagaatcacatgtactaagaaggaccaataattgaagtacctagcacattagagatagtggctttttttttattttgtcttgtgaatatttatatttcatttaattagttatgttgaaacaccacagtgcaagccacatgttatgatcatcgtaggcacaacattatctggggaattcagatttttgttttcgagagatacttaattaactcttccgagaatgtttaattgactgaagcttgtaactagtactgtagtggaattatagagtttatccatcaattcactacgtatatagcgtagttaagttgctcacgcctttttgaaatgacatttgtcaagtaattaagatgtaacttgacatgaagaaatgttttatctgaccaaaaaagatctttctgcttttgttttgaattcagaaggcattatttatagttattgaatttgggttaattatccatttaactgccacaaaaaatataataaagataaaaagt

SEQ ID NO: 125563 - DNA, 270 bp, Glycine max
  Clone ID: PAT_MRT3847_84393C.1
cccacgcttgcggttcggattgcggcgacttgagcggttcgttgcccgcgacgtgggtgagaagtccactgaaccttattatttaaaggaaggagagtggatcgattcctcaacagcaccatacatttataaaagctctttcccttccctcatatcgctcttattcttccaatctttttttttttattttgttacctttcttcctctgtctataattcaacacaacaattaatattactaatgttttttcgatgccatttaatcgtattt

SEQ ID NO: 125564 - DNA, 170 bp, Glycine max
  Clone ID: PAT_MRT3847_84394C.1
tttactgttcttgcaccttacagatgaatagcaccttatgctcgatagtccctaattggctttgatagatacgctgaactatgtgtatgcttcgaaccgagacacgttcactctggtaatgtaatcttgctggagcaaagctccatcactgttaccttacctgcgtgaac

SEQ ID NO: 125565 - DNA, 150 bp, Glycine max
  Clone ID: PAT_MRT3847_84395C.1
gccttggtcagcgttgagccaagctctacgaatctggcgcacgtattgccaaatggcgtgcagggctgaagaatgggcccaacgagccatttgaactgtctatccatgaaaacggctattgcttgggttgatacgctgtcatatgccatg

SEQ ID NO: 125566 - DNA, 420 bp, Glycine max
  Clone ID: PAT_MRT3847_84396C.1
cctggcttggaaattcattatggacaatcgaaggtcctagcctgtacagtccggccaggttcccgggtagtggcacaaagtaactcctttgtacgcgcaaaacacatgttgccgttaataattcccagtacacctaacgcactcgctgctaaaagaggaatcaagattaagggacctggccagattctttccgatcgataccaacgatgcagaattgatccaagaaatattcagtcctccccttgcgtgatgcgtggtcggagagatctaaacgtgaggcgctgcaggtcccttgttacgttggtcgtaacacaacccacaacctagtagattctgaaatgattggaaggtgaatgtccgttggatagtatagttcgtcctcgaatcccgccgcatttgacttgcgaacatgcaatccga

SEQ ID NO: 125567 - DNA, 130 bp, Glycine max
  Clone ID: PAT_MRT3847_84397C.1
gttcaaattgctgaagtcaagatggaacagcatcaatgaaaacgatatttgtcagtgaaactgtgacgtttctgctgatactgagtgcaaatgtctgagtctcctggtgttggcttcttgtaatcgcaat

SEQ ID NO: 125568 - DNA, 850 bp, Glycine max
  unsure (1)..(850): unsure at all n locations
  Clone ID: PAT_MRT3847_84398C.1
ccacgcgtccgcagagatcaatgtatgatcgtcactccgattccgattccaagcgacgccattctagacccggctaagaccccaacaagagatatagaagggatgaatatggaaaagaagaaagagagagagtgatgagtagaactaatgttcaaaatgaagctcctttctctaagcacaacaaaccaaatgatcctattcaacttccatcatctctctcttattttcagggtgagactttacacagaagcgccgtcattaactgcaggccgaggggaatggtggcgtgcagagagaagagcattcccatggatccctgtgggacaaggttcctgtcttatgcataccaattgtttatcactattattagttttttgcccttttaatttaacagcttgcttggcagaatgaaaaaccttagctttgttttaaggtcagttattatattttctttgggttgcatacaattaatcatctttagtctttacttggagggtcagtcggttactgcatgcatagttgattattgagctcaatgtataaactcttctccattaatcattgttgaaaatggtctcttagttcttacaggctcttatttgtaaggacttggagtatttatagtcacttgaatgaaagaaaatgtcttaattcaacaagagattttaaaataatttgcatgcttcatttttattcgttgtatgcaatctatatttttgnggggtggtgtagtgggggttcgtgttcagcaccatgcctttcagtgactctgtntatacctaaccaccttaggcttgcctatgcctgtttttttaccggcccgattaacgagatggcactgggcccggtt

SEQ ID NO: 125569 - DNA, 354 bp, Glycine max
  Clone ID: PAT_MRT3847_84399C.1
aattcaccctcgtgctcggcgttcgtctgctagcagtaagcactttggtttgtctcgtcaagttggattatccctagagccttaacacaatagcggccatgacatagatcaattattgtagcgacattagtcgatacgcagagaaggggaaccacagagtccagttcgacacccggttctgagttccaatcagcagatgacgatcccacacgtcacgaccctacgtacactgtagcagccacacgtttatccgttgctatgattgctgaagttgagatccatgagttagatgcacaggacgaagcatcttacgccaccgtcaggagagaaagaatggtaagtcttcactcctat

SEQ ID NO: 125570 - DNA, 422 bp, Glycine max
  Clone ID: PAT_MRT3847_8439C.1
acccttccgagacatttcattttttttttactgcacttgttgaatcttgtttttcctttctcaaagacttgatttaattaattctttcttattttctgtagtaacagggtttgttttgttttgttgggttgaattgatctcttttcctttttgatttttgaattaatcattttcctaatgtagtggtgtcactgcactggcaggaaccactcgccatttcgactcttgttggtgttctatatttggccttaattcgatgacttactcgaacaaaaatatctctagtggaaaatatttatgatataaacaaaaaaattcagcgacttccctttatcttcacaaaatctttggcttcctaaaagactttgaattggtgttggagttggaagcatgtctatctctttgacccgtttggcatggtc

SEQ ID NO: 125571 - DNA, 805 bp, Glycine max
  Clone ID: PAT_MRT3847_843C.1
ggagcatgaacccaaggttgggtgattttggtttggcaaagcttatggatcatgacaagagtcctgtttcaacactaactgcagggacaatggggtacttagctcctgagtatcttcagtgtggaatggcaaatgagaagactgatgtgttcagctatggtgtggtggttcttgaggtggcttgtggaaggaggccaattgaaagagaggggcagaagatggtaaatttggtggattgggtttgggggttgcactctcaagggacgatcattgaggctgctgataagagattgaatggggattttagagaaggggaaatgaagaggcttttgcttttggggttgagttgtgctaaccctgatagtgctcaaaggccttccatgagaagagtattgcagattcttaataataaccaaggagtggctcttgttgtgcctaaggagaaacctacacttactttctcctctggcttgcctttgagtcttgatgagattgtttttgatgcagaggaagagttggattctggccaggttgtgtgtgagatcaaaattgattgaaattgaagatgctgaattttgttattattattcatttgattcctttgttctttctcatgatgacattttctacttgtagtgtcacatataatactagcgaaattcacttccctaactggagttcaagctattacattgaacttcatggtaaccaataatgtattcatcccattgaaagcttagtataaaccgaaatccccttcgtttctggtcatatatattagatatttctcaagtttgctttgtgg

SEQ ID NO: 125572 - DNA, 736 bp, Glycine max
  Clone ID: PAT_MRT3847_84400C.1
cccatgatagggcctgaaatctccccatccatattgccaatagcataagtttattattacggaaagttttgtcacaggtggagtttaaaggaattgtaaagatatcaaaagggccatcctcataaggaccatgaccactgaaaggaatagtgcataagtagtgacattctatgttttcttcttcactttgacaaatgttgacaatgaagcaatcaatccctcgagtatgccccataaaaaaaaccagtttgtcaccaagtattgaaggtgcccatttcaagctagtgtacaaggaacacgagtcttgagttgcaagctttccacagagttccatagtaggaaccaaagttgggcatcccaaaatgcagtttgaaatgttagaaagtgaccaaaaaagaagcagtccattagaatccagagaagcagcaaattgaactttgcatgtacaaggatgaagtgaaacctttaatattttcccactatgaccatctaagtttaaaaccccaccagtcaaatgggaggagatgttatctgtgttaacattatcattggagtcctccacagcattatgtattgtttgaatacggaaatttgaccaaactaaggaattacaaggcaatagctgaagtgaagagcatatagttggtggaccaaacaggcaacttctcaatataataaccttatgaagaaatagtgcatttttaaaatcagatgagttaaacttgtaaacatttgc

SEQ ID NO: 125573 - DNA, 243 bp, Glycine max
  unsure (1)..(243): unsure at all n locations
  Clone ID: PAT_MRT3847_84401C.1
aacaaacaagggccccccaggggnaaaagggacccaaggcccnaagaagggccctaacccaacatttgtgaggggcannnnanccacacggaggggacaaaggcaattctttttggttangaacacagggannaggggagaagaaggcggggggttnaaaaacccggcgcccacttagggggatagacccaagccttggtagccacaggggtggcactggaaaagggccattggagaaccttt

SEQ ID NO: 125574 - DNA, 349 bp, Glycine max
  Clone ID: PAT_MRT3847_84402C.1
caacctgttgatccagtaaccattcattaaggtagaaaacataacatagtattcgatttgttacacctataaaacatagaatacaaatatcctattcagatatccaaccataatgattgatctatacagagttacaaacacaaaaacaaatttgaaaatctttctcacggtagctgttatgaacttcctataaatttgaacccttaccttgaaatacttcattgacactggaaaactttaagaactagcacttcttaatatcttgaactctaagctcaaactttaactgggggaaatgccatgtaggtatgtatcccttcaaaggaacattcaaacttcagtgcaaaac

SEQ ID NO: 125575 - DNA, 346 bp, Glycine max
  Clone ID: PAT_MRT3847_84403C.1
acgttagctaggagtgcggctcgagtttcgacacactcacctctcatcattcatttatcattatctctaagagccatgtctagagccgggtggccataccatcgagtgcatatcttcaattgaatggcaggctgagaagccactcgtcattgaagaagtatgaggttgcgccaccgtatgacctgagaaatccgtttgaagataactctacacctctctctgtcacactgattgttacttcctgaggatgcgtaaaggccagactcacattgcaaacctctcattccccggccatgaaccttgcgagattggggatgagcgaaaagcaatggtgtgactcatgctg

SEQ ID NO: 125576 - DNA, 322 bp, Glycine max
  Clone ID: PAT_MRT3847_84404C.1
tttttctctttttatggcgaaacaccataaaacttcctaatgcatggtattgcggacctcaataagcaccctttactgtcttgttacttacatctacactcacacaaaaaaccaactgtgatcctcctgacgacttgcccacctccttagtgctaccaaggattgaattgcctgcaacactcaagattctgccttgctccaacggtgtacatgccaccgtttgaaaacccaccgcacttcctattattttttaggaagatcactcacctcaatgattgctcccaggctgggagctggcctctacgggagtggtctttccata

SEQ ID NO: 125577 - DNA, 545 bp, Glycine max
  Clone ID: PAT_MRT3847_84405C.1
gccatgcatgctgtgtgttattattaatcaagggaaaactaaattaactagtttctgttttctacaaatctttgttcattatgtctctctttaattcagttttgatttcctattctcgtggtttctttccatcttatctgttgggagggatggaaagaagaggtttgaaaggtctcctactctcctttggtatctgataaataattaatctattaattgtgcttaatgttgtgttaggttgtgaatagcctacttggttcaaaatgttattgatttggctaaatagtagagaggtaagtatcattagctacaaagaaaataaaataatattttttggttttgatatttgcttttcctttcttatcattttataggttaattggcatcttctgtcctccctcagtatagatcattgtcaccttaaagttgacgcatccaccaatcgttttcatcattgtcttgtcattttttgttgcaattgaccagttaacatcttggctacatttacatttgtttatattcagtatacatttcaactcaaatca

SEQ ID NO: 125578 - DNA, 385 bp, Glycine max
  Clone ID: PAT_MRT3847_84406C.1
ccaccaccacccaacaacagcgtttcaaagaagctccaaaattctacaactcccccacgtgcgccaccctccgccaccacccgaacccaaaccacacgtgccccgacaacgctgtccacgtggcaatgaccctcgacgtttcctacctccgaggttccatggccgcaatcctctccgttctgcaacacacctcatgccccgaaaatgtgatcttccacttcgtcaccgcagcttctaaatctttctccgccgcaaagctaaaccaaacgctaaccacctccttcccctacctgaatttccaaatctaccccttcgacgacgacgccgtttcgcgcctcatcttcacctccatccgctcagcactggattgccccctcaactacgc

SEQ ID NO: 125579 - DNA, 648 bp, Glycine max
  Clone ID: PAT_MRT3847_84407C.1
atatcctaaagcatcattggcttcaaaactcatagagagagagagaggagagagagcttaagggtagtcgtttgtatgtttttattttccctcttgttaggttgggagaatgcctatcctttgcaaaccagtgtacattgttgtgacttcattttatgtttatgttcttcaattcagtgactgtttggcctatgaggaggaacatcactctagtagtcacaaaagcactaataacaaagtttacaaggtaaatctgcagaagacatctgatattgcagtacatggattgctcctgtgggcttcaaccgggtttttgatgcctcttggcatacttatcatcagaggatccattaaagcagaacctggatccagaaggagtatagttctcttctatctccatgttggttttcagatgctttcagtgcttcttgccacagttggagctgctatgtccctgaagaagtttgagaattcatttgataacagccatcaaaaactaggcctagcactttatggtgctatattggtgcatggcttgattggatttttcagaccacacatgggaaagaaggagagaagctattggtacttactacattggattctaaggacaataatttttcttgtggggatcatcaatatttacac

SEQ ID NO: 125580 - DNA, 467 bp, Glycine max
  Clone ID: PAT_MRT3847_84408C.1
gtgtgggtaaggctttttttttattgtttttttttctttttttttttttgtttgcgaggccaaaggggacgaggaaagaattcttgtacctatatttaaaccaaaaaaaaagaaagaactggagggccgcccgcggcccgggggaaaaaaccctcccctaaaggggggggaacccccaggggggggtgggccgggggttccccccacgaaaggggggggggggggggctgacatttttaaaaaggtcccaaaaaaaaggagggaaggggggctttgatacggctttctcaaaaacaccgaaggcgccggaaaccaaaaaaaaaaaggcggggaacaagggcgccaaacctgtggggtaaaggttcaggaaaaaaaaagcaaccctggcccccggagggaggagcttttacgggaggggtaaaggagggccaaaaaacgggattgtggcctcgtggcctaaaaaagga

SEQ ID NO: 125581 - DNA, 245 bp, Glycine max
  unsure (1)..(245): unsure at all n locations
  Clone ID: PAT_MRT3847_84409C.1
agcttgctcatcnagtccaaganncaacctaccttttgcnatctcaattcaatggcgtcctctctcattgcgaagggnttnnnacncctnttcnctcctctccaggtnnctncttcgncccggcgattcggcttaccacnggtctttcaacnaccaatgccatgngcnagtatgncaancgtgacgacgaacanagnacgacatcgatcgtcantccgannggtctttcnctaaaantgggngcg

SEQ ID NO: 125582 - DNA, 159 bp, Glycine max
  Clone ID: PAT_MRT3847_8440C.1
gacaaaaggaaccattttcctctaaaatgggtgggttcaaaaataacaatggccaccaaggaaggcccttttttttagatccacggggagggccaccttttttggaggaggcttaatcttgactatgttatggctattacaaagacttttgtccaacaa

SEQ ID NO: 125583 - DNA, 320 bp, Glycine max
  Clone ID: PAT_MRT3847_84410C.1
ctcatgcaactgtagcaagggaagaaccatttcaatgttcatctacccgaaagcaaaagggggagaagctttaattgacttgcctgccctgccccacaacaatagacactttgtctatctagacagcacctttatacctttcttgaaaaattacttaagtttatagctccctatattcacttattaatgcagcaaaatgtgatactgatagtgatacaatcatacaattgaatatgaacacggcatcgttacgtacttttatgttagcacttttgaaattcaacctctttcagaaagctgcttgcaaactctttacctta

SEQ ID NO: 125584 - DNA, 340 bp, Glycine max
  Clone ID: PAT_MRT3847_84411C.1
gccacgcgttctgcattgctctttgcaaccttatttctagctaattattatgggtattatggaacctgatatcggggataatggcatacttaatcaaatacacagaggccaacactccttccaatattccatacgcttgactagccactcctcaagctgaacctaaagctgtaaccacagccatcaccatagcaatcatgcatatatacacgcatattgcttatactaatccgtctaacattcaatctgatattaataatgatcttaataatcattttgataatcgtgaggacaaacgtaataacttatggatcaccttctaacaatattcttcatatca

SEQ ID NO: 125585 - DNA, 330 bp, Glycine max
  unsure (1)..(330): unsure at all n locations
  Clone ID: PAT_MRT3847_84412C.1
ctcctcgggatcgactccactgctgtcgccgcctatatacntcaagaactgtccgtctctttgttttggctctccacgctttctctatcttattccttcactctgtgggttcattcctgcccatttagcatcaaagtctacatctttgctatgtatagttgcaccttttgagatttcagtagttttgttcccagataatatccgatctaacttgcctttccgagacacaatcgagctttgggaagaagaagaagacgatgggcacaacaaagctgagtcttttgttgtgagttggggctttgctgttggggtgttgtgtcggttggtttg

SEQ ID NO: 125586 - DNA, 2758 bp, Glycine max
  Clone ID: PAT_MRT3847_84413C.1
aattcggctcgaggatgccctggggctatggctaacctctatcatatgtgaaatctggtttgctttttcatggattctggatcagtttcccaaatggtttcccattgatcgagagacataccttgatcgtctttcaatcaggtatgagcgtgaaggtgaacccaacatgcttgctcctgtggatgtctttgttagtactgtggatcccatgaaggaacctcctttggttacagcaaacactgttctttcaatcttggccatggattacccagttgataagatatcctgttacatttctgatgatggagcttcaatgtgtacatttgaagccctgtcagaaactgcagagtttgctaggaagtgggtgccattctgcaagaaattttctatagaacctagagcaccagagatgtacttcagtgagaagttgattacctcaaggacaaggtgcagcccacctttgttaaggatcgtcgagctatgaagagagaatatgaagagtttaaggttaggatcaattcacttgtggcaaaagcccagaaagttcctcaaggaggatggatcatgcaggatgggacaccatggcctgggaataacactaaggatcatcctggtatgattcaagtgtttcttggtagcagtggaggtcttgatactgaaggaaaccaacttcctcgccttgtttatgtttccagagagaaaaggcctggttttcaacaccacaagaaagctggtgccatgaatgctctggttcgggtatctgctgttctcacaaatgctcctttcatgttgaacttggattgtgatcactatgtcaataacagcaaggctgcccgagaggccatgtgcttcttgatggacccacaaactgggaagaaggtctgctatgtccagtttcctcaaagatttgatggtattgatacacatgatcgttatgccaacaggaacacagttttctttgatattaacatgaagggtctagatggtattcaaggtcctgtatatgtggggactggatgtgttttcaggaggcaagctttgtatggctataatcctcccaagggtcccaagcgtccaaaaatggtaagctgtgactgctgcccgtgttttggaagccgcaagaagtataaggagaagagaatgatgcaaatggagaggctgcaagcctaaaagggatggatgatgacaaagaggtgctgatgtcccaaatgaattttgaaaagaaatttggacaatcctctatttttgtgacttctaccttgatggaagagggtggtgtgcctccttcttcaagtccagctgccctgcttaaagaagccattcatgtgatcagctgtggatatgaagataaaactgaatggggacttgagcttggttggatctatggatctatcacagaagatattctaacaggttttaagatgcattgccgcgggtggaggtccatttattgtatgccaaagagagctgcattcaagggtactgctcctatcaacttgtcagatcggcttaaccaggtgcttcgttgggcacttggctccattgagatcttcttcagtcgtcattgccctttatggtatggctataaggaagggaagctgaagtggcttgagagatttgcctacgcaaacacaactgtctaccccttcacctccatacctctagttgcctactgtgttcttccagcagtttgtttactcactgacaaattcatcatgccaccgattagcacctttgctggtttgtactttgttgctctcttctcctcaatcattgcaactggtattcttgagttgaaatggagtggagtgagcattgaggaatggtggagaaatgagcagttttgggtcattggtggtgtatcagctcacctctttgctgtcatacaaggtctgctaaaggttctggctggaattgacaccaacttcactgttacatccaaggcaacagatgatgaagagtttggagaattgtacacctttaagtggactactctcttgattcctccaaccactatcttgatcattaacattgttggggttgttgctggaatctcagatgccataaacaatgggtaccaatcctggggacctctatttggaaaactattcttttcattttgggtgattgtccatctatatccattccttaaaggtttgatgggtcgccaaaaccgcacacccaccatagttgttatatggtcagttctattggcttccattttctccttgctttgggtaagaattgacccgtttgtattaaaaactaagggacctgataccaagctatgtggaatcaactgttgaaagactggttttccaatagtatccatttgtgagcatcttttaaagatgcaagtaaatgtaaattcttgattgtgctgtatgatgcgtgagctacaaagtttagatgtacaaggatgaaaaaaaaaagagtgaaaactgggaagtgcaaatgcagctttctcatctttgtaaatgtgctggatgatgtattggttagcaattgttttggctcaaactgcccaaggattggaaagtaaatcaaagttataaattgttgcaagttagtaaaccggttgataaaatatcatgctacatttctgatgatggagcctcaatgtgtacatttgagtccttatcagaaactgcagagtttgctagaaagtgggtaccgttttgtaagaaattttccatagaacctcgggcacctgagatgtacttcagcgagaagattgactacctaaaggacaaagtgc

SEQ ID NO: 125587 - DNA, 245 bp, Glycine max
  Clone ID: PAT_MRT3847_84414C.1
tttttgtattaacatagactgaggggtaccaacggtgacgatgctgccacacctatttcaaagaatagtgtatcctgaaagaattgacttacagaataggcgaactcaaaataaaagatacttttcacactgactgttatcagaatcaatgactagaacgacgccatattctacatacgtgaccctgcacacaaatgggcctcctttgtaacgaaaatggcatgtgctatgcataatcaaataaa

SEQ ID NO: 125588 - DNA, 733 bp, Glycine max
  Clone ID: PAT_MRT3847_84415C.1
ccaatttcactgttacatcaaaggcaacagatgatgaagagtttggagaattgtacacctttaagtggactacactcttgattcctccaaccactattttgatcattaacattgttggtgttgttgctggaatctcagatgccataaacaatgggtaccaatcctggggaccactctttggaaagctcttcttttccttctgggtgattgtccatctctatccattccttaaaggtttgatgggtcgccaaaatcgcacacccaccattgttgtgatttggtcagtgctattggcctctattttctccttactttgggtaagaattgatccatttgtcctcaagactaagggacctgataccaagctatgtggaatcaactgctaaaaaagactgctttccctatagtattattctttaaaagatgtatgtagggtacatacattcttggtttcacaaaccaacaaagtggcaatgcacaaggatcaataaggaaagagtgaaaattttgtgtatcataaatgagtgttatcatttttgtaaatgttctcaaggacatctgttttggttggaactgcccaaaaattgcagttttatctattcactggaatcatgttcaagaaaaaaaattcaaaagcatatataaaaacaacaaaggatactgtaaacgagaatgaaaggctaaaagaacaagtaaagaagatgcgttatactttttgattataatttcctcc

SEQ ID NO: 125589 - DNA, 631 bp, Glycine max
  Clone ID: PAT_MRT3847_84416C.1
aattcggctcgaggaaactcttaatattgtcattggatggttttgagtgctctccgcaattagaaagtttgttttatagattacagagtgaagctaatggacatgaaaatgttgtgaacaatggattttctagtgagtcaaatggccatggtgcaactggcaggtgtcagcgtgtgttccgtgatatcttagcctctgagaagttcagttcattatgtaaagtgctacttgaaaatttccgaggaatgaaacctgaaactgtatttgactttagtttgataaactcaaggatgaaagggcaagcttatgaacaatcccctacacttttcttatcagattttcaacaggtttggcgaaagcttcaaaatactggaaatcagattgttgctatggccaggagcctctccaacatgtcaaaagcttccttctgtgagcaggtgggaatttcagcgcagagttcctttgaagatgaaaaacaagtgattcctaatcctctcatacctctgccattattctatgcaacatgttcaagagactattatttttttatcgtaatatcataagttgcagtttttgtattgtaagttacagtataaaatagaatacatgcatatatgccctggtatttttg

SEQ ID NO: 125590 - DNA, 1003 bp, Glycine max
  unsure (1)..(1003): unsure at all n locations
  Clone ID: PAT_MRT3847_84417C.1
cggctcgagggtctcagctcaagaaggattcttgcctaagtcctcctttttctatttttcaattattgcgtctctcacttgtggcgtgggtttttatgtgatgctgggggaagctccatgttttttttatttcatgactctgtgtcattttcctttccaagtgcagcagatggtgtgaaatcatttctcccccctaaattcttttcctttcattgcataacttcttctatatacttctctctttctctctctcatcccactgttaccatttccattggttgtttgttctcagctcaagaaggattcttgcctaagtcctcgtttttttatcggaatggtagatttgaggtgaaaaggttccatatttgttaggtaattctcagatctagcttcactctagctcgttaacatcaatttcacgaattgattcatggaccaagcaatattttgtgcctgctagttcttgcttgtagcagatcttatagattgacagattctagggtttgaaaactgaaacacttcttccaaatttaggtgacttcatcaaattagaacatttgaaccaaatagagaaaatgaaacttagtccatttagttcaggaaaatgtgtttttttaaatttttttattcataattacaaaagttctattttgttttcccttttgatttgatgtttacaacaacattaatgtaaaattgaattagaggtggtgcctggtggtgtagtaacagtaaaactagaaaaaggaaagatatgagttagaggcgagcgaggcttggctgtttgagacttgcagagatttgtctccatcaaattttgtaagctcttctttgatacaaatcaattcattgaacttgactgccatacataccataggaataaaaatattaaattacatttagtttaagcaactttttctgctgctatttatttcttttctttcatctttctctttcttcgncctgctcttggcttgcttttccatccatgtaagtttctcat

SEQ ID NO: 125591 - DNA, 2654 bp, Glycine max
  Clone ID: PAT_MRT3847_84418C.1
aattcggctcgaggaagaaggaagctgtagataatggggtggcggttgaaggtggagatggtcttgctgaaggtgaagaagttcaggacttgaagaatgaaactgtaaataatgggatggaaactgagggtggaaatggtgttgctgaaggcgaagtttggaccttgaagaatggcgttataaatagtggggtggcaattgctgatgggagtgctgctgctgaagatggagaggtttcaggctcaaagaatgaagttaacggggtggcatttgctgatgggaatggtgttactgaacatggagaagtttggggatcaaagaatgaagctgtaaataatgaggtggcaattgttgatgggaatggtgttgcttacggtggagaagttcatggctcaaagaatggagctgtaaataatgaggtggtcattgcagatgggaatggtgttactgaaggtcaagaggatcactgcttgaagaatgaaactgttaataatgtagtggcaaatgcagatgaagggaactctggtgcagttgagtgttttcaaacatacaagaggcgcaagcatgcaaagtcaagttcagaatttaaagtccaggagaacagcagaaaacatatgggagctgcaagtcaactgttggcggtgaggaaaccatttgatttagctgttggcaacacttcaaaagatcattcacatgaccattgggggaatgttgtactaaagcatttatatcattcattaggcaatgacaatggtggcatgaagtggtgtataagggaagcactcatgagctgtcctaaaattagttgtgcccctacaatgaaggaaactcttaaaattgtcaaagatggtcaggagtgctctccgcaattagaaagtttgttttatagattacagagtgaagctaatggacatgaaaatgttgtgcacaacggattttctagtgagtcaaatggccgtgatacaactgaggggtgtcagcgtgtgttccgcgatatcttagcctctgaaaagttcagttcattatgtaaagtgctacttgaaaatttccaaggaacgaaacctgaaactgtatttgactttagtttgataaactcaaggatgaaagggcaagcttatgaacaatcgcctacacttttcctatctgatgttcaacaggtttggcgaaagcttcaaagtactggaaatcagattgttgctatggccaggagtctctccaacatgtcaaaagcttccttctgtgagcaggtgggaatttcagcgcagagttcctttgaagatgaaaaggaagtgctctgtaaccaggaatccatctctcacatgaaaccagagcagacagtagaatgtgttgcattcagacttggcacttgctggcattgtggagacaaagcagatgggacagactgtttggtttgtgattcatgtgaggagatgtatcatctgtcctgtattgagcctgctgtgaaggaaataccctacaaaagctggttctgtgccaattgtactgctaatggaattggatgtcgacacaagaattgtgtggtgtgtgaacggttgaatgccctgaagaccctggatgatattgttggtgaggaaaacatccctacaaatgaggaaacactgaatgaattagaagagaattcaaattgtacttatgatgggattcaaatttccacagataggagaaactcatccgactgcaaaatttgtaaaatggcggtggatggtgaaaaagtaaaaatctgtggtcactctttttgccctagtaaatactaccatgtaagttgtttgtcaagtaagcagctaaagtcatatggtcactgttggtattgcccttcttgtatatgccaagtttgcctcaccgacaaagatgacaataagattgtactctgtgatgcctgtgatcatgcataccacgtctactgtatgaaacctccacaaaattctattccgaaagggaaatggttctgcataaaatgtgaggcagggatacaggcaatacgccaggcaagaaaggcatatgagagtaacaaagggaaagttggtcagaatgattcaaagccaaatgaagatattgacaagaaatggaacaaaaagcgaggacgggaattagacaatgttggaggaatgatggacatgcttataactgctgcaaatactctgaattctgaagaggacttaaatgcaatgctgattgactcaaagaaagcattaacatgagggcgtgtgtgctaactgctaatacctaatgttttctatttcctgcatttgtttaagtctttagataactgattttgttaccgttggagagaaaggattatagaggccaaggagcaaaaagcatcaatagaaaaaaaactgtgataagtgaagtatgggatattttgcaggccagatactgatgcaatatgtggttgatatgaaatttaataggttgctttgctccctgcagtatataatgttttggattgtcatgattacttaagcgaagacttcaaattagaataatatcgatttccaatttgtggataatcaaaagggatgatgttttaccctttagatttcaatgtttcagtgccaattttgcacaagccttgaacagtattctgttcttgattttcttatccgttcaatgaatgactctgggagtgtttg

SEQ ID NO: 125592 - DNA, 408 bp, Glycine max
  Clone ID: PAT_MRT3847_84419C.1
tgttttttttgacctcccacagagccgtggctgcctatcctctcctatttcgacatggactcctctcacgagtaccactggtccagctaggccaagatgtctgacttacgaccagacaccaactgatcagggtcaggcaccatcatgcatacggagtctgccgagtctggagaactcacgctcttgttacgacgatggtcacacagtttttccgataacgggcatgaggcgtatatgccttcgcggctgtgccctactatacctgcagagcttacgcctggcgacaattcggactgatgaccatagcatgctcctgtgcgaagaagttgtgcagctgcaattcgacactagatacgaggcgtactcctctggtgtatagcctaggctgcctaatgagagaactatctc

SEQ ID NO: 125593 - DNA, 1013 bp, Glycine max
  unsure (1)..(1013): unsure at all n locations
  Clone ID: PAT_MRT3847_8441C.1
caaaaagaaaaattccttcctctactaaagggcctcgatctatgtgttaaagcattacccttttgtttttgttaatagcttttgcttgaacatgctaatcatgatcaccatcgtgttataacactttattttattgtcctcgtgaaaaccctttaaagatattgccacttgcatatacatatatacatttcaataatcacatttctgatctgtatttggaaactttggtggtggtggtggttgcttgtgcagatggaatcagtgaagccgtcggccgtgaccccgcgaaagaagttggcacgcaattttgcgaaggttcttcatgtcaaagcactgattggaattgcttcagttgatggattgaagaatgttatatctgatgcaaatctcaaggatgaagggaacattggtaagagtaaggctacactgaattggtctgagtcattcaatgaagatgatgatgaagaccttcaagagagagaggccaatgaagcacttttggcaaagctttttgctagcatttcaactgttaaagctgcatatgctgagttgcagtatgctcagtcaccttttgaccctgatggcattgaagctgctgatcaattgctagtgtctgagttgaagaacttatctgagctaaagcaatgttacttgaagaaacagtttgatccttcacccaagactgcaatactcgaggccgaatccaaggaattgcagggtgtgatcaaaacctacgagatcatggggaagaagttggagtcacaggtgaggctcaaggattccgagataatttttcttagggagaagttggaggaagctaataggcagaacaaggcaatcgagaagagattgaatcaaagtggccaactatccgggcttgataatcttcacataacaggnattaagtcctagccatttcatcacggttcttcgccacacggtccggtccattcgcaactttgtgaggctgattgttgatgagatgagatatgcaggttggggacgttgatgcc

SEQ ID NO: 125594 - DNA, 154 bp, Glycine max
  unsure (1)..(154): unsure at all n locations
  Clone ID: PAT_MRT3847_84420C.1
ccgccacaaaacaatcaattttcataattntaaaaaggttttaagccaaaacttaccggagggaatacgcatggaaggccnaacctnnnntgaaacacttgattntaantacttgngattaaantttactannggggggggtntnnnccaaatt

SEQ ID NO: 125595 - DNA, 150 bp, Glycine max
  Clone ID: PAT_MRT3847_84421C.1
gagcttgagcctgaagaacttaagccgctttctccgtcaagcatatcattaaacccccaggaaagcacatgtcctgattcaggaccgatggtgtctcaggaggagtgtgatgcaattccggaaagctgcaagtcaaatagtagagcagta

SEQ ID NO: 125596 - DNA, 661 bp, Glycine max
  Clone ID: PAT_MRT3847_84422C.1
ggaaaaatcatgggaaggaagagcatcgtgctcgagatctgttttatgctctctgggtgcctgatctctttatggaaagagttcagagcaatggccaatggtctttgttttgtcccagtgaagcaccgggtttgacagattgttggggtgagaaatttgaggagctttatcttcaatatgaaagagaaggaaaagcaatgaaggttgtccaggcacagagcctctggttcgaaattctgaagtcacagatagaaaccggaaccccctacatgctttttaaggatacttgcaataggaaaagcaatcaacagaatttgggtacaattaaatcgtcaaacttgtgtactgagataattgaatattcaagtccaactgaaactgctgtgtgcaatctggcatcaattgcactaccacgatatgtaagagaaaagggtgtcccgatggagtcccatccatccaagcttgttggaagcacaggctctggaaatcggtattttgactttgataaactagcagagattactgcactggtcacaacaaacctgaacaaagtaattgatgttaattactacccagttgaaaatgcaaaacggtcaaacttacggcacagaccaattggtataggagtacagggtcttgtctgatactctcatactccttg

SEQ ID NO: 125597 - DNA, 224 bp, Glycine max
  Clone ID: PAT_MRT3847_84423C.1
cccattttaaaatttactaaacatagttatttattagaaattatatatacatacacgaacataaactaacaatcaaaatcttcatatcatttctattataaacaacattataatttaaccatatcacatgatcactttacttataatatacctatatcatttcaataccacatcattcaattcatatcaccaaaatcaaatccttatactacaacaaactttca

SEQ ID NO: 125598 - DNA, 431 bp, Glycine max
  Clone ID: PAT_MRT3847_84424C.1
ataatttctccgttgatttgcttttattctagtttaatgtttttattaatagcaaataaattgatctttgttgatttacttttattttactttaatgtgacataaacatcacctaatagcaaataaatttaattttagtttatcatgtactagtataattatacttcttttatgggcaaacaaatgttaaattttttttaagatacctggaaccttgctaatttagcttcttttttttttttgtgcaatcaaaattggagtgtccaatacctagaaccttgctactgttcatattgaagggaaacaattttattcatcggacagctattttcgaatttatgtttcccgtccactcccaatccactatgtagaaccttggcaagcaatcaagtaattttattcattggtcactctaatggggggtgattttt

SEQ ID NO: 125599 - DNA, 525 bp, Glycine max
  Clone ID: PAT_MRT3847_84425C.1
cccaatactggaaaaatgatttaatgggtggggcgtttaaatacaaacaaaaaatactgatcccaaattaatccaacgacgaccataaattttcaccttccccccagaaaaacaccctaccaaaccctaatttgaaaccatggtcccctctttttttttcttttttttaacattctttttttttttataaacctccaaactccgatcccgtatttttttccttgctacccgatccaaaggcttaaatcctttccccgtgaaaattttgtttcacgcccctccaacgctggaccacgcccctgtttccccctccatcatggtcctaaccggagggaagggcctcaaaccccccgcaaaaaaaaaagtccccgccgatttttacaacttcctcacgttccccacgccgttgttcgccgaagctgaaaacttggccgggggaccgttccgttccaacgggcgcgcctttttgaggaagcacgcgctttttccgccggcgtccgggctcttcccgcacctgttgagggg

SEQ ID NO: 125600 - DNA, 491 bp, Glycine max
  Clone ID: PAT_MRT3847_84426C.1
gattaaacaccaatattttttttgttgggaaaaaacccataccagaacacatgaaaaggtgcattgtcattggagttacacattacatgaaacagaattgtgtctgagggaatgatcccaagagaagacatgacctatgccatagtacgaggccatgatcctgcgacattccctcgccaagagtgtagcaaccctttttatataaaaaaataccttatgacgctgagagctatatacccttacgccggaacttgcggaacatttctgtcacacagtacctgcctctggcgtgagcatcctgtgatttgctcccgatgtgcccaacatagatgatcactaccatggcaatcctgtgccggaagtttctctttacaacgacgctgatacatgcttcttacaacatccactaggcgccggcggttgccaactcaaaccaggccttaggccctccttagacataggaaagctgcccaaccactgtcgtatcctga

SEQ ID NO: 125601 - DNA, 934 bp, Glycine max
  Clone ID: PAT_MRT3847_84427C.1
aatccccactctctcacgttaataatgttgttatccgttttcgctgttacgaaccacctttactttattataaccctttgactgttgactacatcactcagcgcatgttagcaacagcggcgcatcgtactgttttaaattttattttgttttttcaggaagaatcgtgtgaagaaaacggttagagttccggcgattagttcgaaggtcgccgatattccgccggatgagtactcgtggaggaagtacggacagaagccgatcaagggatcaccgtacccgaggtgagtggtttgtggccgttgatttggtgttggctttggtcaaaggtgtgttaactgacgttgatttgttttgtgttctcagggggtattacaagtgcagtaccgtgagagggtgcccggcgaggaaacacgtggagcgtgcttcggacgatccgacgatgttgattgtaacgtacgagggggagcaccgacactcgattcagaccgcgatgcaggagaacatttccgggggagtgggtttggtattcgagtcaacgtgagtgtggaattaaagaaaggggaactgttggggggctttttttttgtagtaggaaaaaaaaaagaggtgaataggaaaattgaattaaggtggtggttgcaatgtaaatctgaccttattgaaagaaaatattattgtgctgttattatattattacagggtatcttaatcttctcccacaaaagtcttcttacctgattattttattcaagattttgaaagtagtttgggtcattgatgatgaaattttgtgattggagccaagtgtgatatagggtcgcgcaattagaaatggtaggtagtttgttttgtatagtgggaatggtaaagggtccctatccaagttgatgcctcgtaatggaaaaaatgaaatgacgtttcaactcaaaaa

SEQ ID NO: 125602 - DNA, 303 bp, Glycine max
  Clone ID: PAT_MRT3847_84428C.1
atgaagctctcgtcgattcctttgaactccaaatactgcgctgcgctcgatttcatcaacagatcgatcgtcttgttacggtttccgcgtcggtgcagaggggttatggacgaggtcgacgacaacgatgtcgtcagagtcaaaggatgcggcggaggggagggagtgcagggaagtgaggtaggaagtgagatcgtggaagaagagagaagcgaagtggctgccgtagaaggagttggggtcgaggtggaggatggttttgccaacggcagaggtggtggctgcgatgacggattccaatag

SEQ ID NO: 125603 - DNA, 728 bp, Glycine max
  Clone ID: PAT_MRT3847_84429C.1
tgcttggactcatctgaagagcatcaaggttgcactgagcggagcagaaaaccttattcttgcatcagatcctgatcgtgagggggaggctattgcttggcacatcattgagatgttacaacaacagggtgctctacatgataatatttctttagcaagagtagtctttcacgaaataactgaaaaatctataaaaggttccctacaaacaccgcgagagattgacataaatttggttcaagcttaccttgcacggcgggctcttgattacttgattgggtttagcatttcaccattactatggaggaagttaccaggttgccaatcagctggaagagttcaatctgctgcactttctcttatatgtgatagagaaatggaaattgatgaatttaaaccaaaggagtattggattgtagaggttcaattgaaaaagaaagagctgagatcaaacaagaaccttacttttcctgctcacttgacccattttgattcaaaaaagttgaatcagttttcgattacttctgatactgaggctagagatattcaaagcactataaactcagctgattttcatgttgttagcttgaaaaaagcaaaagtagaagaaatcctcctacaccttatataacatcgacacttcagcaagatgctgcaaacagttgcatttcacggaaagcacacaatgaagcttgcacaaaaactcttacgagggagttgaactgtct

SEQ ID NO: 125604 - DNA, 500 bp, Glycine max
  Clone ID: PAT_MRT3847_8442C.1
tggtcacgctcaaattgtcaggatctgagtctaggcaagaggatgcccctttctccaaatgagacttcatcaaacccattgcctacagatgagcaacaaagaacgaacgggcatgcagttgctccagctgttgctggaagagctccccacaaaccttcggctgctccatctcggatgatttcatcgtgccgggtacattggcactgctatttgtttcttctacttctacttgtgtctgccctttactgagacagacacgttcttattcttatgtatctcaactagcctgtctagatagagttattacatgtacatccaaatatgtatccattttgtcctcctcctagctttgtaagtattttagatcttacaccatccaatgctgttatttttttgacattgccagcatgttagattcctaacacgtactggaccattatctgttaaacccgcttttgctcgggtgaggttatgtaaattaataagcctggtgttatccc

SEQ ID NO: 125605 - DNA, 260 bp, Glycine max
  Clone ID: PAT_MRT3847_84430C.1
cttttaaaatatacgagtggcatatttatcttctaattttataaagtttcccatgaaagtatcttgtcatgcatcataacagtcctacaactgcttaacaagtggaaactatatgttcaattaataaccagtcactaactctatctgaaatagtattatgttgtatgtatatcatgggagagcttagtgcctttttctttcttctaatatgtaatttgatattctagcttcccattgtattgcttcagaagatcaggcta

SEQ ID NO: 125606 - DNA, 561 bp, Glycine max
  Clone ID: PAT_MRT3847_84431C.1
cacacgcacgcgtgcgtcggactccgactcgaggtcggtggagaaagaggtcttgtgtgatctgagaatatgccttgcttgttattgttggtatttctgattcaatcatgggcagtgaaggcacaacaagtctacgataggaacatattcatattagcggggcagagcaacatggctggtcggggcggcgtgctgaacaacaccggcacggggatcgccacgtgggacggcgtggttccaccccagtcccgtcccaacccctcagtcttgaagctggacgcgcacttaacgtgggtggaggcccgtgagccactggacgcggacatcgattctaggaagacaaatggtgttgggccaggaatggcatttgcgaactcggtgttggagaagcacccagattttggtctgattggtttggtcccttgcgcgattggaggcagcaacataagcgagtgggaacgcggaaaagagctttactttcagatgataaagagggccaaggcatcgttgcgtgacggtggcaccattcgtgcattgctatggtaccaagagaaacccgat

SEQ ID NO: 125607 - DNA, 864 bp, Glycine max
  unsure (1)..(864): unsure at all n locations
  Clone ID: PAT_MRT3847_84432C.1
ctttaagtacatactaccagagggagagaaagagctaactgacccaggttgacatcatcgttgtagacaggcgcacttgccctctttttaaaaatgcttaacctaacaaaggctggaaacccgcacccttcaaatgcccaatgccttacatagccatttgttcctattattctagttcataagcttacccatggaaatactatttgatctacggatcaggaaatccatgttaaattttaaattcctgatttttgatgccctctatccctttgtcgcctttatttgctactctaagtttgtggtccataatatgcatttggctggtgccatctctactagaattgaagccatcgttactgcatctgcttgttcatggggtctgtgaaattcacattacatatatggtggactacaggtcagcactttggttttgtatttatttgatgtgggaacttcaaatgaatcttcatataacttccctgcagaatggttctgtcttggtgtttgatatgcgccaaactgcaggacccatgaaatcccttgttggtttgactagcaaccctgtgcatactgtacatgctcttgcacaaacttcaagtttgtcttctggtgttaaaaccatcctatctgcatctgctgttggcctttgtcagtggaacattgattctgaagagcgatggacttggaacatttccctgcatttaagacggccgcttatggttcctgaaactgataatcaaggaggctaaaaccatcctatctgcatctgccattgacctttgtcagtggaacattgattctgaagagcggtaggctgcttacattttatggatattttgtnnncttatattcatnatcattgcc

SEQ ID NO: 125608 - DNA, 333 bp, Glycine max
  Clone ID: PAT_MRT3847_84433C.1
gttagggacttgtgggcccttgtttttaaaattaatatattttcttcatgcaagaggaaaaacggtgtccgccaaaaaaaaaaaaaaacgggccccagtccagggggggattgccccccaaaccccagacaaaagggggcaaagggaagcatcccccgccaaatgaaaaattgctattaaggaaagggggagttaggaattgcaggggtgcagaaccccccctccaaataacaaaccacctttttttaataaagaaaacgcgggcaggaggactggttaattgctactaacaaacaccaagggccgtgcccgcccgaacccccgtttaagggg

SEQ ID NO: 125609 - DNA, 203 bp, Glycine max
  Clone ID: PAT_MRT3847_84434C.1
aaagaagcatgcatgtgtcgcggagcaatcatctcagatttcataccttggcggcgtggggggactcttacagcctcctaactcttgcccaagcacattgtacctcaacctcaaccttttccttcttcatttaagaggcattgtgaatacctttacagagggttcaggcagtggtcctgtttcaaattgaccttttgagattt

SEQ ID NO: 125610 - DNA, 375 bp, Glycine max
  unsure (1)..(375): unsure at all n locations
  Clone ID: PAT_MRT3847_84435C.1
agatcttaatatacattgacttaaaaagaaagctgagagatnncncttntttgtttttttttttcacttgaaaaaaggcatggaacaggaattntgttggcttacctggatccaatttgcatagcctccacaatacatccactcatttccataaactcccatgtattgttctttctcacttgccactctttatttaccttggaaacttctccctttccctttatatttacttcccgtacccttccgtgttgatttagattgagaataaaaagagaccactgtttagtgacaaagaaattgttcacttcttgggcggcgattgtttacattaagaaagaccttgcgttgcaaacaactttggaggggcttgtggtt

SEQ ID NO: 125611 - DNA, 695 bp, Glycine max
  Clone ID: PAT_MRT3847_84436C.1
ctttctagccacaatggcaccgattgaaccccaatctcagacttgtcaaacggcagatgtggccattgttggtggcggtgcgagtgcccttgccattctccttcacttgattgagaagggccaagaaggcaacctgttttccaagatcgtcgtgtttgagaagagtgcccttgccggtcccgggctggcctattcatcatcatgtcaaggcaccattctcaacatgcacaccgataccatgggcctctaccaggctaagcccaaacacttcacacaatggcgaagcactctcacaggaggtgattttccctcgcgagaggaatacgggcagtacctgcaagccacttggtctcaggccatccaacaagcccgacagattgggctaggcattgatgttatcaacgaagaggtacacgacattgagcgattggacgacggcagattcgagctcaaagtcgaaagtggaaaccgacttgtcacgcaatctgcggtcttggccctcggcaacttcaccgcgactatcaattctcaacttatcgggcttcgtggcttctacccgagcccatggccactgtccaaattgaagatgatccccagcgatgccccggttctgattgtgggctcgcggttatctgcaatcgacgcaacaactttcctcaacgagaatggccaccgagggaccattactttgatgt

SEQ ID NO: 125612 - DNA, 347 bp, Glycine max
  unsure (1)..(347): unsure at all n locations
  Clone ID: PAT_MRT3847_84437C.1
ttaattagcccgcaccagngacgccgcaggagaggaagatcgaaacgaaacccaacccgaacaacccccncacacaagagccggacgaaaacacggccagaggaggaagaagaaggagcagcgcaacacacccacacgccgaggcagaaaacaaggacaccacccagacccagccacgcagcgaaaccggagggaaaaaacacgaagaggccacagaggaacagacaaaggaaaaccgccaggaggagggcccaaaagcaacacgcagaccagagaacgacagagaaacngggcaaccaaaaggcaaaggaaccagcgagacaaaggacgaaaagacggcaagaagc

SEQ ID NO: 125613 - DNA, 629 bp, Glycine max
  unsure (1)..(629): unsure at all n locations
  Clone ID: PAT_MRT3847_84438C.1
ccacgcgtccgaaaaaaaatatatagtatgtactatgtacacatttaatttaaactataacggaaaatgatccaaaactttctaataattataaatatttattttattgagtcatcaccattttaaaatgatttctctcgtagttggagtttcaattctttgacgatgatatataataaatcatatatttagtaataaataaaccaacggctgtgattatcagagaaaattctggaaaccttttccatctcatctctatatatctctgcaaattaagaaaccaagcagattagcagtgccatgcccaaaaacaaaataattaaacacatagccaaaattaaaaagtgcctacaaattacattgaaaattagacctctttaactaacaactcttaaataacaacttcatgatcactaactagcaaccaataaaattttatcccactaaataatgtcagctacaagattaacaaaaaaaaacacctacttctaaaagaaaaaaaaagaaggtaaaactaaaataatttttttgtaagttaaaattagcttatacataagttaatatgtaaaaattccctcttattaactcttttctaataatntgatttaacttatgcantagctaatatg

SEQ ID NO: 125614 - DNA, 330 bp, Glycine max
  Clone ID: PAT_MRT3847_84439C.1
cccacgcgtacgtacttaataggaaaagatgaaaggagtcacacagtaagcccagctctggtctgctacaattctctaacaatggcgacggctttcaaaatggcgactactgtgatgtgagtgacggatgagtgcacgaactcattcatgggaatgaaacgtaagatggtgcacagatacatagtctgcaacatcgatcagaagacagggctcggcaccgttgataaggtcgatggccccggcgagagctatggagatctcccatgcctgttgctcaacgatgattggatcaaggctgcggtcgactttgaattggtgaccgctgataac

SEQ ID NO: 125615 - DNA, 286 bp, Glycine max
  Clone ID: PAT_MRT3847_8443C.1
aaaaaattttccgagacgattcggctcaagaaaagaaacccttccttccgttgttttttttttttttttctttcttttttcttgccaccccaacatgataccctccgaacattattagacccaaacaagacctaaccactttttcggtcatggatgcgcgtcgtgctccacgcgccgtcattgaccctaaggtccgtagggcgggttcttcgctccacccgaacccgacccgatcttattggaagactgtacctgcggcaacttcatgtcggcggtaatgatccct

SEQ ID NO: 125616 - DNA, 470 bp, Glycine max
  Clone ID: PAT_MRT3847_84440C.1
acggctgcgagaagacgacagaagggtacggctgcgagaagacgacagaagggtacggctgcgagaagacgacagaaggggacagtgcgtgcctcacatcccatctatccaaacaatcaataacaatcgctgatgctagctttgctcgcatctatggctgcctgcttgccactcactccctcctgattgctaccaacatagatacaaccaattgattgggttcatgcataccttccttgatacctcccacccggtcactcaagtgactgtgggtgcctatatgactaactactggctgctgcatacatacatctgaactgacatctgtctggagcatgaacgatcaacatacctacttacgtatgtctgtctaataatgcatgcataaaggaaggggctgtctttgctctcgctaccctccctaatatatatatcatggatggagggtggattcagactcagaatcactc

SEQ ID NO: 125617 - DNA, 332 bp, Glycine max
  Clone ID: PAT_MRT3847_84441C.1
ggggaaaaagcaagtaacatttagttgggtttggctacccaagataatttacattttttgaagttcttcaccaaacacaaatttaaaaactttcaaaagttattttgttttttgacccttactttccggggaccaaattggtggcataggcccaggcgttttttttgacaggggtatcaaggggatccgggggggtttccaatggaccctttcccgggacaatgggctgatcaaaaaagccaaaccttgagaacatggcccattgttccttctttggttcccttaccttaagctcaacaaaagccttttgggcataaacaagggccaaaggg

SEQ ID NO: 125618 - DNA, 112 bp, Glycine max
  Clone ID: PAT_MRT3847_84442C.1
caacactgttggcaccattcaatttttattttcgtcactgtgctccctccaatgtcaacggctgttggacaaaatgctgttgctttatccataagagacagttcccgccggc

SEQ ID NO: 125619 - DNA, 326 bp, Glycine max
  unsure (1)..(326): unsure at all n locations
  Clone ID: PAT_MRT3847_84443C.1
nggacgtttatatttttaaacatctacaaacagtgttatcagggtgaaggttcttgttttctttggtgctacaattttaaaagcangccaatgccacaccaacgacatgttccctctccgaacgaacactgattatcttacccttactacataagtgaaaaacacaagttgcatgcttgctgtggaagcacaaaacatctttgtctttgacaccatacctcaacaatgactttaatcatcaaaggaatacatccatactgaacattatacatcacactacaaaccatttaacccacaaacttacttttattctacagacctcgaaa

SEQ ID NO: 125620 - DNA, 366 bp, Glycine max
  Clone ID: PAT_MRT3847_84444C.1
gtagcatggtcctgctttcctctatcctccaggccagcatcaagcgtcagttacagcaactactaatcaggcaggagctgtgaattcccctaacagcacttcctcatataataaattccatagttcagttggcggatctcctggtacctcctcaactttgccagttgttgctcctggaataagctttagctacccaaatttttcagccaatggttcttctccgtatatgacaatagttcacaataatgggtattcattccctttttcaacttctcttggagcaaccacggcaatcagaggtccgagccctccacaagcaacacatgtacttagtgggcctttctactcttctcaaatgttccatcc

SEQ ID NO: 125621 - DNA, 642 bp, Glycine max
  unsure (1)..(642): unsure at all n locations
  Clone ID: PAT_MRT3847_84445C.1
ccacgcgtccggaaacggttatcccttacaaagtgccggctgtctcagaaagcaatgttgtcaaatagcggctatcacggcgctatcacgctatagcgtagcgggttttggagaaaacgcaattgcaacggcgtcgcgttgcggattccgcgagaatcgcgatccccggagtcttacgcgtcgcgaaaccacgttgggtcgtggctgttgcgtcgtcggtttccgacaaggatgaatccggagagaaactgcatcgacggcgacggcgcgtttagggttcatcgtgctgactgctgaaagaggaaaccgggtcggagcggatgcgggtcagtgcggattgcagttgttttgggcttgcagaatgctcacaagggcccaaaagtagccttacttctacttcacagcatttattgaagcaaagtgtggattctgataactacaagtgcaaagggcactctttctgtgctagttatgctatctgtaatcggttataagtatgttccattggctttttggtattgcaagaattttggtttttgtccgggggttatcaacaaggatacatttaccagcaggaagtttagtctggtgaacatanagttgaaatgggtgaaagataggacattggatgcctgttgttac

SEQ ID NO: 125622 - DNA, 1480 bp, Glycine max
  Clone ID: PAT_MRT3847_84446C.1
ttcaggctcttcaagaggaacgcaaaaaagttgctccagagacagctgaggcaattgatcagttcctggtgaaactgcgagcctgtgcaaaaggagaatcagccttcacatttattcttgatgatcctgctggaaacagcttcattgaaaacccgtttgcaccatcatctgatccatcattgactatcaagttttatgagagaactcctgagcagcaatcatcattgggataccttgttggttccactcacattgaaggaactcatgatcaagcaccagaaaggggagaagtgactgctgatcaagtgaggagagaacctcatgggtcaataggggcaacagctggtcatcgagccattgcacagagtaacagttcagaaattgctgaagccttatttcgatatactgcaccagaagaggtgatgacattcccaacttcttgtggtgcttgtgccgctaggtgtgagactcgaatgtttgtcaccaatattccttacttccaagaagtaattgttatggcatccacatgtgattcctgtggttaccgcaactctgagttgaaacctggtggtcgaattcctgaaaaagggaaaaaaattactcttaatgtgaaaaatgttaatgacctgagccgtgatgtaataaagtctgatactgcaagtgtaaaagttcctgaacttgacttggagctggcaagcggaacccttggaggaattgttacaactgttgaaggtttaattacaaaaattagtgaaagccttgagagggtccatggctttacttttggagatagtctcgatgaacagagaaaaaacaagtggatagattttaaagcaaggctaaacaagcttcttagcttggaagaagcttggactctaattctcgatgatgcattagccaattcttttgtagctcctgcaactgatgatctgaaagaggacaatcaattatcatttgaggaatacgagaggtcatgggaacaaaatgaagaattaggtctgaatgatatagacacctcttctgccgatgctgcttatgaatcaacaaatactactaaaacttagtgaaaattgtgtaattatttcttctcacacccccaaccaaaacaaatggagggaagaagcagtcaggaaaggaagaatttttgtgccaatttgatagcaatgagacaggaaggatggagaagtcaattgtcttaagcgtcatgtaatggctgattgatttattaatttgtaagcaagttcatcgactagtatcatccttctgaaatagttctgtcgtgaaagatgtaatctcctctgaactggcaagttaattgcttatttctgcttttgtagtcatctgagattgtttattttttaaaaaattcttcttcccccctcccccctttttttttattggaggggcgatgattaccgaaggttggcacagttgaaatatacatatttttgaatatgttgattaacaatttagtctctgg

SEQ ID NO: 125623 - DNA, 633 bp, Glycine max
  Clone ID: PAT_MRT3847_84447C.1
gagacgagggtctgagtgaggtgcttgttgcgttgtggggaagacccctattcatttcgtaatcgcagaacattcgaaccagagaagagaacgatgactatatggaactacgtcgtcacagctcacaaacccaccaacgtcacccactcctgcgtcggcaatttcaccagtcctcgagacctctatctcatcatcgcgaaatgcacgcgcatctagattcacctgctttctccccaaggcttgcaggttattttgcataccttctgagcatttattgaagcaaagtttggattatgataactacaagtgcaaagggcatctttctgtgctagttatgctatctgtaatcggtttatagtatgtttcattggctttttggtattgcaagaaattttggttttgttcgtggttatcaacaaggatacatttaccagcagaagtttagtcttgtgaaacataaagttgaaatgggtgaaagataggacattggatgctgttgttactggtcagagggatcttaaggcagttgggattctggctccatcatttattcttcttctgaatgctgccttccaattatcatctttctcgccaccgggaccaattgtcttccagggacctcaacttccacct

SEQ ID NO: 125624 - DNA, 2095 bp, Glycine max
  Clone ID: PAT_MRT3847_84448C.1
cggacgcgtgggcggacgcgtgggttcaggctcttcaagaggaacgcaaaaaagttgctccagagacagctgaggcaattgatcagttcctggtgaaactgcgagcctgtgcaaaaggagaatcagccttcacatttattcttgatgatcctgctggaaacagcttcattgaaaacccgtttgcaccatcatctgatccatcattgactatcaagttttatgagagaactcctgagcagcaatcatcattgggataccttgttggttccactcacattgaaggaactcatgatcaagcaccagaaaggggagaagtgactgctgatcaagtgaggagagaacctcatgggtcaataggggcaacagctggtcatcgagccattgcacagagtaacagttcagaaattgctgaagccttatttcgatatactgcaccagaagaggtgatgacattcccaacttcttgtggtgcttgtgccgctaggtgtgagactcgaatgtttgtcaccaatattccttacttccaagaagtaattgttatggcaggattttgagattccaccagaggctcagcgtggtagtctgtcaacggtggaagggatacttatgagagcagctgatgaacttcagacccttcaagaggaacgcaaaaaagtggctccagagacagctgaggcaattgatcagttcctggtgaaactgcgagcctgtgcaacaggagaatcagccttcacatttattcttgatgatcctgctggaaacagcttcattgaaaacccgtttgcaccatcatctgatccatcattgactatcaagttttatgagagaactcctgagcagcaagcatcattgggataccttgttgattccactcacattgaaggaattcatgatgaaacaccagaaggaggagaagctgtgactgctgatcaagtgaggagagaacctcatgggtcaataggggcaacagctggtcatcgagccattgcacagagtaacagttcagaaattgctgaagccttatttcgatatactgcaccagaagaggtgatgacatttccatcttcttgtggtgcttgtgctgctagttgtgagactcgaatgtttgtcaccaatattccttacttccaagaagtaatagttatggcatccacatgtgattcctgtggttaccgcaactctgagttgaaacctggtggccgaattcctgaaaaaggaaaaagaattactcttaatgtgaagaatgttaatgacctgagccgtgatgtaataaagtctgatactgcaagtgtaaaagttcctgaacttgacttggagctggcaagcggaacccttggaggaattgttactactgttgaaggtttaattacaaaaattagtgaaagccttgagagggtccatggctttactttaagagatagtattgatgaacagagaaaaggcaagtggatagactttaaagcaaggctaaacaagcttcttagcttggaagaagcttggactctaattctcgatgatgcattagccaattcttttgtagcacctgcaactgatgatctaaaagaggacaatcaattatcatttgaggaatacgagaggtcatgggaacaaaatgaagaattaggtctgaatgatatagacacctcttctgccgatgttgcttatgaatcaacaaatactactaaaactgagtgaacattatgtggtttcctctcctcacaccccaaccaaaacaaatgaagggaagaagctgttgttaggaaaggaagaatttttgtgccaatttgattcaatgagacagaggaaggatggagaagtcaattgtcttaagcgtcatgtaatggctgattggtttattaatatgtaagcaagtccattaactagtatcatctttctgaaatagttcagtcgtgaaagatgtgatctcctgtgaattggtaagttaattgcttattaatggttttgtagccatctaagattgtttcttttggcattttttcttctttaccctcttctttttttaattggcgaaggtcagtacagttgaaatatagttggatacttttgaatatgttgattaaggattatttagtct

SEQ ID NO: 125625 - DNA, 3718 bp, Glycine max
  Clone ID: PAT_MRT3847_84449C.1
gaacgatgactatatggaactacgtcgtcacagctcacaaacccaccaacgtcacccactcctgcgtcggcagggtcaccagtccgggagacctcgatctcatcatcgcgaaatgcacccattagattcacctgctttctccccaaggcttgcagggtattttggataccttctggagcgtccgaccggatggcgtattcatcggatagtaaataggaatcacaattaattcaataaaaccctcccaattacattggtgaagcgaaggaacggttatcccttacaaagtgccggctgtctcagaaagcaatgttgtcaaatagcggctatcacggctctatcacgctatagcgtagcgggttttggagaaaacgcaattgcaacggcgtcgcgttgcggattccgcgagaatcgcgatccccggagtcttacgcgtcgcgaaaccacgttgggtcgtggctgttgcgtagtcggtttccgacaaggatgaatccggagagaaactgcatcgacggcgtcggcgcgtttagggttcatcgtgctgactgctgaaagaggaaaccgggtcggagcggatgcgggtcagtgcggattgcgtgtagttttgggcttgcagaatgctcgcaagggcccaaaagtagccttacgtctactgcacgtaagttttttccagagcattctagaacctctcatttcctctgattcttagtcaccacgtagccttcttcttccaaggatacatttaccagcagaagtttagtctagtttttttttttcttttgtataatacttctttcttctttctctgtttttctttcttcttcttcttcttcttcctctgttttcttgatgctggggcaggggcagagcagaataaatagatgttttcttgatgcttttagctttttttgattatatgccttaatgggcccagtgacctcaaactttccacctttataagaagatatcccaacatatttaatgagtcctcttttcttgatagtggaggctctcctgttccgtgtttcagtttgagtcctgaagccttggagctccatcatgaggaagtcaacatcagagaatgatatcgttgaggtttgagggttcagcaatcaagattggtgttggggtagtgaccttagatgacacaagatttggaatttattttaaaagaaaattgaaccaaaccgaattgcatgtcttataattcttttgttccaaatcatcctgaaagtttcttatatgttcgccttcctgatgatcgtattggcctgaaattgttattttgggatgacaagcttgacatccctgagttacagaagaatacttctctacaacaaaaggcagaagacataaaaaatggatccttagaatttccaattagtttcaccaggggttttggtttgaaaagacaatgcatggagtggttgaaagagtggcagaaactcccttatacttcaccttacatcaatgcctctcatttggatccacgtactgatgtatctgagaaaaggatagttggagtcttccatgagctccttcatctcacactccataagcaaaccgagcgcaagaacgttagcaacttgcgtagacccttggccttacctcagaagtttactaaagtatttgagcgtcatcctggtattttttatatttccaagaggagtgataccctaacagttgttcttagggaggcctataatggtcaggaacctgtgcagaatcatgcccttgtacaaattagagaggaatttgcaagcctgttgaagaaagggctattgttctagctgtagtttgagatctgattttgcatggagtaatacccttcctagtggtaggagaatatttctcacttcgtttaaattgtcttaaatccaaatttttacatatgcagagcatttattgaagcaaagtgtggattctgataactacaagtgcaaagggcatctttctgtgctagttatgctatctgtaatcggtttatagtatgttccattggctttttggtattgcaagaaattttggttttgttcgtggttatcaacaaggatacatttaccagcagaagtttagtctggtgaacataaagttgaaatgggtgaaagataggacattggatgctgttgttactggtcagagggatcttaaggcagctgggattcttgtctccatcatttattcttcttctgaatgctgccttccaatataccatctttctcgccaccgtggacaacttggtcttcccagtgacctcaaactttccacctttataagaagatatcccaacatatttaatgagtcctcttttcttgatagtggaggctctcctgttccgtgtttcagtttgagtcctgaagccttggagctccatcatgaggaagtcaacatccttcagcaaaatcagttggaactcagggataggctgtgcaaactgcttatgctcacaagtgatagaatccttccactacaaaccattgaccagttaaaatgggacttgggtttaccatacgattaccagcattcttttgttccaaatcatcctgaaagtttcttatatgttcgccttcctgatgatcgtattggcctgaaattgttattttgggatgacaagcttgccatctcagagttacagaagaatacttctctacaacaaaaggcagaagacataaaaaatggatccttagcatttccaattagtttcaccaggggttttggtttgaaaagaaaatgcatggagtggttgaaagattggcagaaactcccttatacttcaccttacatcaatgcctctcatttggatccccgtactgatgtatctgagaaaaggatagttggagtcttccatgagctccttcatctcacactccataagcaaactgagcgcaagaacgttagcaacttgcgtagacccttggccctacctcagaagtttactaaagtatttgagcgtcatcctggtattttttatatttccaagaggagtgatacccaaacagttgttcttagggaggcctataatggtcaggaacctgtgcagaatcatgcccttgtacaaattagagaggaattcgcaagcctgctgaagaaagggctattggataggagtaagggtgtatacaaaaaaagcagacacactaatttggtggagggttttagaaaggaggtttgcattgctaaaaaaactaaccagcttagttctcaggatgaatcagattccatgttttctgaatatgattcggatggccctccacaaaacccatgctgatatatgtgaatgtgatatttctctttagccattatgttaaagtggtttggcttattgacaatcttgaaatctggcctagatgggggatgtttgcattttactatttttcacccgcttttgcctcttgtgaagatctgtcaataaccaaatatgtcaacaatgctatcttcttagcaagggagagcattttctgattagatgtaatattctggaataagggttactgctcaatctcattttaagattagatagacccaggtatagctacaattcattttaccgagagaaattttgaatatctcaaaatctttatgggagttcaaaatgtaatttaaaaacaatgactagatacctatagttttagagcatctttttttcttggggttgtgggaggtgtttgacaaaaatcactattatgatataatttggttaatccggtattctattctt

SEQ ID NO: 125626 - DNA, 359 bp, Glycine max
  Clone ID: PAT_MRT3847_8444C.1
ggttccattgtaatgggtggactttcacatggggtgtggctgcacgtggtggaactaatgtttgccttagaaatatttcagcctataacatatacaagaacatatctttgcatcatgtgacacacatgtgttgtgctcctattgtctttaacatcattctagaagccaagccaagtgagcgtattgaaatcaaatccagtgtggaaatactcactggtggagcaccaccaccaccttcgttgattgataagattgagtctcttggatttcatgtcatgcatgcatacgggtcaacagaagcaactggaccagcgttggtgttgagtggcacaacaatggaatcagctcccaaaagttga

SEQ ID NO: 125627 - DNA, 448 bp, Glycine max
  Clone ID: PAT_MRT3847_84450C.1
ggcaaaaaagtggggaattaaagtgggaagaaagaagcattattaggggcagtgatgtaaaacccttataataggaaaagcataagcgaaaaatggtgaacttaattgaaatgacttaaaaattaaagtaaattaagataaaaacaaatagaataggaaaagagagcgaaaggtgggcttaatcaaacaggccttaaagataaaaaaagattaaaaacagtttaaaagaaatttaaaaaaataggaaaaagtaactgaccaccattaattggggggcttatttgaacaagcttaaaaggaaatggtggtttttttggtaatggggggatttgaacccacgaacttccccttcaaaatacattggaaaaagagagccaaaggggggcttaatcaaacaggcataaaaaaaaaaaaaagccgtttaaaagaaattaaaaaaattggaaaa

SEQ ID NO: 125628 - DNA, 361 bp, Glycine max
  Clone ID: PAT_MRT3847_84451C.1
ggggcattgtatgagtataagaagttgatgcatgctggcgccaccgaatcctgaataaatttatattctgaaagctgcgctgcctcaagacgcgcattttttaaggatcaactgggttgcattaagggcatacatatgtcaaaagatccaagtgtttccacattcggtcaataactctaggagataaaagtcatccctattgtacactttacagcaacgcatacattgacaaaagaaaaaaaaagctggtgtcacactcgctgttgcttacaggactttaaaatcatgcgctggtcattctatttatcattgcccaatgagactgcaaaagcgaccggcatggatcacaggggaaatttga

SEQ ID NO: 125629 - DNA, 240 bp, Glycine max
  Clone ID: PAT_MRT3847_84452C.1
ggcacaagtgagtttgttgatcgagataactagaaccagtgtgatgaaattgaaggtccttgttttcctcgttgctagaatttcggtagcatggcaatgccacgtctaggacatgttccctcgcggactgactactggtcacggtccccgtactccggaggtcaacggcccaagtttgaggcttcttcaggcaccctgcaccaccgtagcctttctgaccctccattatcattccttaaa

SEQ ID NO: 125630 - DNA, 552 bp, Glycine max
  Clone ID: PAT_MRT3847_84453C.1
ccacgcgtccgattaaccagaggaccaccgatggggttgagaaaatgctttatcgactcgctgagcctgtcatatttagctctctacaggttgcaaactcaaatgttcgtcaaaatgctttgcatctacttctggacatgttcccccttgaagatcctgatgccacaaaagaggagaaagatacattgcttgataagcagttctttttattagaaaggctacttacagatgattgtctggaagtgagaataattgctgttgagggttcttgtcgcatccttcatctgtttgggaagttattccttcaccaatcataacaaaggtgatgacaaaaatatttgatgatatgtctcatgatggatgcaatgaggttaggctttctacgttgaatggcatcatttatttacttggcaacccctgctctacgaaattcttaaggtgctgttgccaagactgcagcacctaatgcttgacaaggttctcgcaatacgagttgctgcagtgggatctcttactacactaaatgatgttcaaatttttcagttcaacaag

SEQ ID NO: 125631 - DNA, 362 bp, Glycine max
  Clone ID: PAT_MRT3847_84454C.1
ttgattattccaaatgaaagcggcccactggaggctgccaaggacggaaatcacaaacaaatcgtcggctcccaagatgctgggagcaaaggaagactgggacaagccccaagcgataccaaatgctgagccagacgcgcaagcacaaagagctgaagcacacttcgactaccacccatgaggaggccgatagcacaagagggagcagcccacataggcgaatcgaaacccggcgccaatgacccattgcccacaaaaactaaatcggcggaaactcccaaggaatggcaccaggacccaccctgggaaaaaattccaaaagacttgactacaacagaacgagagaccggaaggcacagaac

SEQ ID NO: 125632 - DNA, 509 bp, Glycine max
  Clone ID: PAT_MRT3847_84455C.1
gggggcaaaaaaaagggaaaaaaagatgggggaaaaaacaaatccgccaaagggccaagggccccacccctgaacaggggggccctggagggcctaaaacccaaaaaaaccccgccctaaatgggaatttcccccccccccggggggggaaaacccaaagggggaaaccggggccaccgggggaaggggaaaaaaatcctggggggcccgggcccaaaacccggcccaaaaaaacgggggaaaggggatcccccaaaaacaacccaaaaaaggccccggtattttctcctttttaacccccggttttaaattctccaccaccaccttcttctcctggggggggggcttccttttaacgtcaacgggggggacggaaacggccccccccggggggttaacttcgggggggaagttggggagggccttggacccccggaccccgaagggggttcggccgaaggccttgggggtttcaagggggggggcaaaggttcccaccccggccccgg

SEQ ID NO: 125633 - DNA, 333 bp, Glycine max
  Clone ID: PAT_MRT3847_84456C.1
ctgaagagctatattcgatgcagcggatgatgagtgctcatgagtcaactgataatatctgctttactagttgagcattgacatagtagagcttacgaggagcaggtatagctcttccaagcaaaatggttcttgatgataagcttgtgtgggctaacacacaagaattctttgatggaaattttccctcgatgctaggttaccaatgaaggaaaatcttctttatggtcaagattgataaccttgggaatctgtcattgaaaatgctacatgaggcatcatgacgtacaaggcttacccaccaatgctagaattacttctgactttaacaat

SEQ ID NO: 125634 - DNA, 274 bp, Glycine max
  Clone ID: PAT_MRT3847_84457C.1
gccataacgcataagccatatctccttttcccttctctttgattatctttcttttaaattcctgtttggttcaaatatagaaaccagaagaggattagtaataatcattgacaattgtagtgaagtgatgtcaatttcaaggtctcaagtggggtgtctattgctgatactactaagtatttcggttttgaaccatcaagtattgggtgctcggtatgtaaaagaagaagtggaacatttgctcaacaagtctgcagtatggaggaaaagcttt

SEQ ID NO: 125635 - DNA, 396 bp, Glycine max
  unsure (1)..(396): unsure at all n locations
  Clone ID: PAT_MRT3847_84458C.1
gggagaaccatatagctagtatcannncccctgtaattctagcgtcattagcttaacaagtcacaaggcgctcaacacatatccttaaatgattctcttctgaaccaaagagactttcatagcgcgcttggaagaaggttaaatgagggcctttccgaggaaggtcccattgcaccaaagggggggtaaagggttctgggcttcattacactagttgggaaactgctactggggaattactgcacccctgctatctcctgaaaagccgcgatccaaaaagctatgaacactgcagcgcttactaccaacccaaaacactatccttcaaaaaactgctgtgtcaataagtcattctcaagaaacttaaacgcctcatgtgtactttcaacattcatg

SEQ ID NO: 125636 - DNA, 451 bp, Glycine max
  Clone ID: PAT_MRT3847_84459C.1
cggactcggatacgcatcgtgattctaacgttaacatataacaatccctttttcccatttccattttctatgctgcgatgcgaatatgcttcctcctatccttccttctacaaatgctatgtgattttcaaatctagaatctccagtgtggaatgcaccacaatattcatgccaattaattgcttttcagttgctgacagatgctgagtaccgatccattttctctcctttttcgcagtcaccattagaaggaagccatggaatctgagagggaaaggtttgacctctcaagacctttgcatttaacttatgccttatgggaccatgcatatcatcgaatgtcagttgctgctagtttggtccaagggggttacattctaaaaagggacagacaagaaaaacgtgaaggaaaaaatgctcttgcaccaccttggtggacattctttcactt

SEQ ID NO: 125637 - DNA, 379 bp, Glycine max
  Clone ID: PAT_MRT3847_8445C.1
tatagacgggccgcccttttttttttttttttttttgaacacctttgtcatattttgggaaaacagggtctcagttttcgtatccgggagaagaatgttgctgaatagcaattgctaacgcccataataccgtacaatgtctggcttgtactgtaaagaaaaggccttccttgtgtgcagacttttttttcaccccaaagggaaatggcgcgggagcgggaccctcggatttcggcgcccgccgtgcaccattaaaaacaagccgggccccatttggaatggactgcggagcttgaatcggacctacaaggttgaattcgttctttcatgcaaatacgccccacctgttggttacaatgttaagcatcccctgtaagct

SEQ ID NO: 125638 - DNA, 254 bp, Glycine max
  Clone ID: PAT_MRT3847_84460C.1
tttctctattagcgtatgtgtaatttaaaacaccatccccacaccacacgctgaaactaccaccttaactctaaacaaagacaaactaacctaaacccatttacaccatattaataaggctaaattactcccactatacaaactctgccatataataatcatcatcatataaactctaaaaatttaaattccaaaaatttaaaaacactttctttacaccaaaagcaatgttaattttctaacaaccatcttat

SEQ ID NO: 125639 - DNA, 734 bp, Glycine max
  unsure (1)..(734): unsure at all n locations
  Clone ID: PAT_MRT3847_84461C.1
aattcggctcgagccaattcccacaacaaacgcacaacgttacccaacaagagtgagtgtgacccttcgcctaaactaaacttctcttcccttatttcaggatttattcatctctccaaaactcagaatttcaaatcaaataaataccaacaatgccctttgccaccaagcttccaccggctccggaaccgccagctatcttgaaacctgccggaaacagagtaaccgtttcccaagagccgaaacagaagaagaaggagaacagcgtgaagaccagtccacagcgtcccccgcaaattctgaacaccgttgtgcaaagcaacgtgtctttggacagcacgtgttcctcagatagcaattcatcaaccaaaaaggtgaagcccgcaaccgcaactgtggcgagtaggagaaacgtgaagcgtaacgggtttaagccggtaagggttgtgccagacgccgtcgatgtagcaacagtgttgccgcctcttaagagatgtgaatggatcactccaaattctgaccccctttacactgctttccacgatgaagaatggggtgttccagttgatgatgataggaagctatttgagcttctagtctttttacaagcattggcagaacaccgttggccagcaatccttaaccagagagacatattcaggaagcttntttgaaattctgaaccatcaccagttgcacagtttactgagaagaaattgctaacactgaaaata

SEQ ID NO: 125640 - DNA, 1634 bp, Glycine max
  Clone ID: PAT_MRT3847_84462C.1
tttatttatcacttttctatcttactcttttggttattgttttattgtttttacgcattatacctcttgattatgaattctcccaaacatgaaccttttcccacccaataccaaacacagatcctaaactccccacaccatcatagttagtgagtgagtccacccaaatgctggtaattcttggactcattggtggaagtgtgtccatgaagaacgtagtagccagtaacaccgtaatgtctcatctctctcactcgtgacactttcttcatccctaacccattgtcatgagtgccctcaatttgaacgcatggccacgccccagatccagatccagatcccgatccccaacctttcacgccgtcaataagttacccttcttcaccgttaccaaacggagagcattctcgctctctgcggtgctcacggtcgagacggaagagaagccaccaatcttcgacttcaagaactacatgctttccaaagcgtccgcggtcaacaaggccctcgacgactccgtttcgctccgcgagcccaagaagatccacgaggcgatgcggtactcgctcctcgccggcggcaagcgcgtgcgccctgtgttatgcgtggcggcgtgcgagctcgtcggcgggcacgaggccacggcgatgcccgccgcctgcgccctcgagatgatccacaccatgtcgctcatccacgacgacctcccctgcatggacaacgacgacctccgccgcggcaagcccaccaaccacacggtcttcggcgaggacgtcgccgtcctcgccggcgacgccctcctggccttcgccttcgagcacatcgccgcctccacccggggggcctcggcgccccggatcctccgcgcgatcggcgagctcgcgcggtcgatcggctccgagggcctcgttgccggccaggtcgtcgacatcaactccgagggcctggccgacgttggcctagagcgcctggagttcatccacgtccacaagaccgccgcgctcctcgagggtgcggttgtcctcggcgccatcctcggcggcggcaccgacgacgaggtcgaaaaattgagaaaattcgctcgctacattggtctactctttcaggttgttgatgacattctcgatgttactaagtcttcccaggaattgggaaagaccgctggaaaagaccttgtggctgataaggttacttaccccaagcttttggggattgagaagtctaaggagtttgctgcgaaactgaacaaggatgctcaggatcagcttgctggctttgaccctgttaaggctgctcctttgattgctttagccaattacattgcttataggcagaactagattattgttcttgtctctactttacaaacaaatcattgtttgttttaggaatatttagttttttatgaaatgaaaatcattggatttacatttatttacatattgcaatgcaactagggattattaaacagtagcctcccctgcccttcttctatgtgcctgccatagtcgtcaattttgtatgatgaataaatataaatattagaatacctttaatttgtaattagatattatattatattatatccttctacctatattaagttgagtaaaagcatataagtttattgaatg

SEQ ID NO: 125641 - DNA, 459 bp, Glycine max
  Clone ID: PAT_MRT3847_84463C.1
gtgtcttggacggcaatgattagtgggtatgtgcaaaataagagatttatggatgctttgaatctttttcttctgatgtttaattcgggaacttgtcccaatcatttcacgttctcaagtgtgttggacgcatgtgctggttgttcatcccttttgacaggaatgcaggtgcacctgtgcgttatcaagtctggcataccagaggatgtcatctcattgacctcgcttgtggatatgtatgcaaaatgcggggatatggatgcagcatttcgtgtttttgagtccattccgaataagaatttggtgtcatggaattcaataattggtggctgtgccaggaatggaatagctacccgagcactggaggagtttgataggatgaaaaaagctggtgttacaccagatgaagttacttttgtaaatgtgttgtcagcgtgtgtgcatgcaggtcttgttgaa

SEQ ID NO: 125642 - DNA, 428 bp, Glycine max
  Clone ID: PAT_MRT3847_84464C.1
cggttctcggaatttcccggcgtcgactccacgtcgtctcgctagatactatgctacattagaatagtagtaatcggtgcataaggcggactatctgtgacgatgagcatctccctagccgctatgtgtctcctaagaaagtgttctatgggcgtggaccaatgtaactatgattgtactttaactacagaccagcagggccgatcatggaatttgatggattgaacgcttcatagacagcggtcaatgaccctgttgtgtccttaaagacaggcttgtcgtactggatggcacatgtgcggcctgctatcaatccaggttctggttcaaccattatagctatcaatgggacacttgaatgtgattgtgcttacactactactgttcaagctcgacgaaattactacacgcagtgttgctcacaactt

SEQ ID NO: 125643 - DNA, 476 bp, Glycine max
  Clone ID: PAT_MRT3847_84465C.1
aaaacaaacccccacatacaaatcatggggagagatagtttataacaaaccattaagttggcttaacccttaagggcctccatcaaaaaatcggggggacaaaaatcagttttaacctccaatgactaaaagggggagattttgggcttaatattaccaaccacagcattaatttcgggaaaaaaacccaccggttttgtttcttggtggcgggccccgaaaaaatctcaacaacatttaattggcccctgatgtatggcagggatctcaacataccctcaagggggccccttgggagctgaaactttatttttgtttcacctgagggaaacttgctataatcatgcagcttaagggtgattatagctcccctatctgcgggggatgagccacgattctccatgggccacgttattgatttgaggcaaggaaggttttccaagttatcaaaagcaccaacgggttcacactggaag

SEQ ID NO: 125644 - DNA, 321 bp, Glycine max
  unsure (1)..(321): unsure at all n locations
  Clone ID: PAT_MRT3847_84466C.1
gtggttttttttttttttttttttttttttttttttttttaaaaaagcaaacaggtcagcggggtgttatcaaaagtatagatgccgcggtaattacctcccttttgagattggagatttctgccacaatgtgggcgttatgggagggtgctcgttaaagggaggagcttaggactcaggtctactcaaaagatgcccgatgcagacgaagggcggctctaggaataccaacacttgccttnaaaaaaatgatggaagggttccgtattggagtaatgtgtgcgggcagttccaacacgacttcgcggggggaaccaaatt

SEQ ID NO: 125645 - DNA, 277 bp, Glycine max
  unsure (1)..(277): unsure at all n locations
  Clone ID: PAT_MRT3847_84467C.1
agatgtttcgaatgttgtccacggtgatgaatttgngtccaatgatcctgtggatggttccatctcatcacatcagggaatcctttttttgtttgaggatgttttttttttgggtttccgnctttttgttactggatcagaaggtgcatcaattcgnttgtacattgtgccctttgagaaggatccctcngtgattgggagacttttaaacgaagcacttgctcctcttgttgctgttgtgtttgtgcttttctggatggaggaattcactggtcgt

SEQ ID NO: 125646 - DNA, 234 bp, Glycine max
  Clone ID: PAT_MRT3847_84468C.1
tctcgaacagattatacctcttaatatggaatcttgacattccgatctgcatttccacagatagactactgcattgcctttcttagatgtgagttatgtggctgcacataattacagtaatgttagctgtacactgtgcttattgaagttaagacaactgtattttccttgatatcacagtttggatgaatgaagtctcagcagggtatttagtagagtctggcttgcatcctc

SEQ ID NO: 125647 - DNA, 326 bp, Glycine max
  unsure (1)..(326): unsure at all n locations
  Clone ID: PAT_MRT3847_84469C.1
ttttttttttttttttttnattcaaacctattaaatatttttaaaccttaagtgtggggtaaatcccaaaaatttaagaaggcttaattatctaatttgctttgtctatttaacgccctttatttacatccaaattatccaattgccctttatttaaaaataaaaatttaaaattaaaattttgagttgacattagttgagttcaattaactattttttttcctttattctcccggctatatttttctctccccaactcttttttccttttcccttgttgactgtttgtccaacatctcaaaaaccaaagataaaatatcctcccc

SEQ ID NO: 125648 - DNA, 393 bp, Glycine max
  Clone ID: PAT_MRT3847_8446C.1
ggctcgtgcaaccacccatagtgctctgacaacggtgaccacaatgccgggggatgtttcgaacacagcaagctgattcataggaagaccagatgcaaggctatcactcagcatccagcaggcaacgcagtacctgagactgcaccagcaagagggggtgggagtaaggcaactatgagatacgcacgggactggaggctcatccgagattacgaacgatctgaggagaactcatcacctcgataggaagcgtgcgttgcagagggtgcgacaaggaaatgtgcactatatccagagtggtgtcaccctgagaggcaccctgcgcttgcataccaagatgatgatgcagtatacattaaagaggattgtgaggacactatgtgccatgccata

SEQ ID NO: 125649 - DNA, 532 bp, Glycine max
  Clone ID: PAT_MRT3847_84470C.1
tctttttttctttttctttttgttttttttttttttttttttttaaaatttatttttgggatggaacacctatatatatatatatatatataaaaatatatataaatatatatataggacaacccctttttttttaaagaaaaaataaaaaatttgtcaaatgggaccgggggggggaattaaactaattaaacaaactaggtggagacaataggggaaccaaagaaaattagggttggcctttgccattacaatcggggctccctaaagggaaccccaaactgggggtcttggcctctaaatttgaccccgaaaaaatggtgttgagggggggggaaacacacccctaaatttgatgcccccctgatttttgttgggactggaaaaatggggggctgaaaccctctacggcattaaaattattttggggccatgttcctcttctgggtgaaaaattaccccaaaaagagggggtggccaaagaaaagcccatattttgttggaggggtcaaacaaaaaagcttctttggtc

SEQ ID NO: 125650 - DNA, 463 bp, Glycine max
  Clone ID: PAT_MRT3847_84471C.1
ttttataacacaatacgacgtcgataagaaaaacgaaccctatcatcgccattggaatttggaagctacgaagtaggaaccatgacagcgctggtgagaagtggagtgatgaagctcactctccaattccaaaccccttctccttctctgtctctcttctcttcttctctctccattaccaaaacaccatcaccaccctctttcttctccttccgccaccctctttcccattcgagcaacgcttccaaaacccccaccaccaaccctcttccttcttcttcctttgaatcccagctattcatccctccgggcattgaacccgacgaggtcgacgactccacggtcctttccggctccaacatcgccgtcggaccctacgccggcgattcccgaatcaaggacgtccagttcgtcaagagcagcgcccgcgccagggattgccccaaagacgacctacccgaat

SEQ ID NO: 125651 - DNA, 1521 bp, Glycine max
  Clone ID: PAT_MRT3847_84472C.1
agatgaaacgcatgatatgcaaagtgtcatcatcatcatcaggccaacaggccaacatgaccataattccaataatcatcagcaccagcaaaaagttagctccaagagtagaatgaaattcccgggtatggcacctcacttcggtattcccgtccttttttttttaatcattaatatctcctttcatcatattgggaaaacataggacataaaactaaaaacaatgcttacaaagaatttgcggctaaaacatactatatgaacattaaaaaaatcaagtaattaagcatgtcttcttcccccagaacgtatgttctgcagcaagaacaatctttctctcgagtccccttcggcgatcatttctggagaaaaacatctattgatataacgcaaattgcaaagaaattttgaatctaactgcccctatttacaataagaatctcaattctgaactgaaattaaaaagcttgttttccaaaaactaactccatccaaatcaatttcccaaaacccaggctctagaacttcttctattgaagagtgaagttgaaaggctacggcttctagtcaaagccccaattctcccaaacaaattgcggaaaattctcccaaatccaccaccacgactttccctaactctgccgcttccaaccgccagagagattcttctagaaccttcgttggagttcccgtcactctccatctccgtgtaaaccaccggcaagtggctctctccggcgaacctcccgacggcgaatcccccgcccggcaacctccatatggtcaaccctacagcctcctcctcgatctggccggcgactcttgtttccggcgcggtttgctccgacggcaactcgtggcggcacaccggacacgagtttcgcatcgaaagccacgggagaatgcaatcggagtggtagagatgcttacacggcatctcacgcgccaacgcgccaagctcgaaggcttccttgcacacggcgcagatcgtctccgacgcgacgtgagactcggtgatttccaccgtcggcattgactctatagccgccttagacgccggtggattctcagccctcccgaggccgttgatctcgatctgcgaaacctgctccagcaaccggtcgaatcccgatccaagcaagaactccgacatggtggatggcagcgggcggagcccctcgccgtcgaagccgtcgtagtataactcaaagctgctctcctcgtcctctcccggtccgcggagcacgatcaccgggttgaacgccgagtggttcccggcgttgcggcgtcggcggcggaagccttgccttgacgattggggggcggtgaccttttcgacgaagccgccgtggcagcgcgggcaaacgacgtcgttctgttcttgtatgtgaacgaagcgcgtgcagctgtagcaccaataggaagtcgtgtccgaattcatttttgcaacccagaagttaggagtgattgacgaaatgaaatttgaattagcgaagagatcgtgggagcacgcgtgaacgc

SEQ ID NO: 125652 - DNA, 219 bp, Glycine max
  Clone ID: PAT_MRT3847_84473C.1
gattatatttgagttcaaacaaatcaaagccatggccacctccaacttctctattgttctctccgtcgccctaaccttctttttggggccacttaacaagggaaaatccaacggaaccgtttcctttaacctcaaaaagtttaaaccaattcaaaccaacctttagctccaaaaagattctagtaattcaacctctgaagtgttacaactcaacaaagt

SEQ ID NO: 125653 - DNA, 675 bp, Glycine max
  unsure (1)..(675): unsure at all n locations
  Clone ID: PAT_MRT3847_84474C.1
ggctcgagaaaaaaaaggaaaagaaaagaaaaaaaacctgaatcctcttggactctctcagctctcagatctgagttccagaaattaaggattccctttactttcccttctcctcatggatctttttctttcaattttagataaataaatcacaaaaaaaaatcaggcatccttttttcctatttttttttgccgttgaaaaaaatggaaaaggtggctccgcctccgattctgatgcaccggaagcgcgatctatcgtacgacatcgtttcggcgggtccgaacgagagctggaggtgggagtgggacagcgtgcgtttcgcaggaaaaccaccgccgccgccaccactgtccccaaacaacgacgtcgttttcgaggcggaaagtgtcgttcctcctctacagttaaagctcggaggaacaacaagagtgaataacaataacatcaatatcaacgttagcaacaagagagttaggtcggggtcccccggaacggcgtcgtatccgatgtgccaggtggacaactgcagggaggatctgtcgaaggcgaaggactatcaccggaggccaaggtgtgcgaggctcatagcanagcctcgaaagcgcttctcgcgaatcaaatgcaaagattctgcagcagtgtagtaggtttcacccgctctcgagttcgatgag

SEQ ID NO: 125654 - DNA, 478 bp, Glycine max
  Clone ID: PAT_MRT3847_84475C.1
ttaaaccttcctaagaaggaaaaaggaggaaaaaagggattccaaaaattacccccctttcctaacaaccaagaagggagttggaggcttaatacccttgaaggtttaaaacaactaattggtcttaacaaaaacccggcccttaagaaaaggctttctaagtttctttaacgaaaggaaaaaaacccggcccttttcttttggaaatctggtccaccagaaccccaaaattcagaatttttttttttttaatgaattgggaaaggggtaattttggttaccaaacccggggaaaccttcttcggggcccggaaatggggattctttttaaccaaataagggaccccacacctggtacctattggttggaaaagtttttccctaacaaccaaggatattttataacacgccttggtgaaatttacttggcttaaccttggaaccacggacctggttggggctgaactcgaagccctta

SEQ ID NO: 125655 - DNA, 354 bp, Glycine max
  Clone ID: PAT_MRT3847_84476C.1
gttaggaattcccatgttcggacgcaaaaactgggtaagaaaacacattggtgggccttaatgggggcccagctcggaaaaaagctcaatttgccccaaaaggggggcttttggcctccgccttattcaaaagaccctccgggatttcaagagttgggggggcttttggggggaaaagggggctacccttttccggagtatttactaaaaccgggggcccattatgggttattatcccaaaaccgcccattggggcccccggtaaccctggggttttaaaaaagccgtttctcaaagagcctgaatttacgggggggggaaaagggccctgattggggaaaacccccaattggc

SEQ ID NO: 125656 - DNA, 104 bp, Glycine max
  unsure (1)..(104): unsure at all n locations
  Clone ID: PAT_MRT3847_84477C.1
aaggangagcttacaaaattgcgctttctaatccaaaccttagttctctcacagtcacaggtcataataatcacacaatctccgccgcatgcaatctttctttc

SEQ ID NO: 125657 - DNA, 464 bp, Glycine max
  Clone ID: PAT_MRT3847_84478C.1
tcctctagagcggccgccctttttttttttttttttttttttttttttttttttttttttttttttttttttttttttttttttttttttttttttttttttttttttttccaaaggaatccaaaattaaataacccttataaacccccaaaaaaacccccccttaaagcccccccgggggggctaaaaagcccaaaaccccctaaccttgttttccaaaaatcccccccaaaaaattaaagtttcccccccccccccccccgggaaaggggggccaaagatccaaaattccttgacccctaaccccaaagtggaacccaaaaaatggagcccccccatgttaccacctgaccccaaaaccccagtcccataaaaacccccccgccttccctttttataaagcccccccaaattggggccctggggttttgttatccccttaaaaacctttgggggccaaaagg

SEQ ID NO: 125658 - DNA, 1002 bp, Glycine max
  Clone ID: PAT_MRT3847_84479C.1
tatgagtaagaatcgtacgttgtgtggctataattgccatccctccctatgcgcttacggctgcgagaagacgacagaagggggcatcacaaactatatactaatctccatctaatagtgttaatttgtctttctctatctctatcggtcatgggtgcttttgcttttgatgaggaaaactcctccaccgtggctccggcaacactctacaaagctctgacaaaagatgctgacactatcatcccaaagattattggggccatccaaactattgaaatcgttgaaggaaatggaggacccggaaccgtcaagaagataacagctagtgaaggtgaccaaaccagtttcgtgctgcaaaaagtggatgcaattgacgaggctaacttggtatacgactacagcatagtgggagggacggggttgcatgaaagtttggagaaggttacattccaaacaaaggtggttcctggcactgatggtaatggctctatcgccaaggccactctcacattccacaccaaagacgatgcaccactctcagatgcagtgcgtgatgaaacaaaggccaggggtgctggaattttcaaggccattgagggctacgttttggcaaatcctgctcaatgattatccttcaaaccacttgcatgcatgcaataataattatataagcttatgatctggttgttggagttaatttgtatcatgtggctttgtttggtttaattaatttcctttgtgagcaagtgtcggttttatttatgtaacatttttaaagtgttactattataattcggtgaatttggttgagtatacgtatgaaaatgtgcgtgtgttggtgttgacgtgtttggtcatttgtattctgcagtaaatatattactataatggagaggaatcttaattagtaaaaaaaaaaaaaaaaaaaaaaaaaaaaaaaaaaaaaaaaaaaaaaaaaaaaaaaaaaaaaaaaaaaaaaaaaaaaaaaaaaaaaaaaaaaaa

SEQ ID NO: 125659 - DNA, 166 bp, Glycine max
  Clone ID: PAT_MRT3847_8447C.1
cttacgcgttcggagaaagggtgtgtgattttatagcaaagaggaagatgtaagggtcggcgcgactaaagtctcaaagcggccactcactggcacaccacgtcatagcgccttggacgtctaaccaacattcaatgcaccttccgttgagccacaacagctaaac

SEQ ID NO: 125660 - DNA, 1790 bp, Glycine max
  Clone ID: PAT_MRT3847_84480C.1
cccacgcgtccgtacggctgcgagaagacgacagaaggggatcccattcccatttttccttccctccaaaatggaagagaaactaaagtacccctgtctctcttccttgttaaccctcttcctctgcatctccgccacttccactaacccacacaactcccaaacccaaacccttctcctccataccctccctgacccacccacactctcatggcccgaatccgccaccgtagaacccgacccggaacccaccacatccctctcccttcaccacatagacgcactctccttcaacaaaaccccttcccaactcttccacctgagactcgaacgcgatgccgcaagggtcaaaaccctcacccacttagccgcagccacaaacaaaacccgacccgccaaccccgggtcgggtttcagcagctccgtggtatcgggtctctcccaaggcagcggcgagtactttacgcgcctgggcgtgggaactcctccgaagtacctctacatggtcctcgacaccggaagcgacgtcgtttggctccaatgcaagccctgcaccaaatgctactcccaaaccgaccaaatcttcgacccatcaaaatccaaatccttcgccggaatcccctgctactcccctctctgccgccgcctcgactcccccggctgcagcctaaaaaacaacctttgccagtaccaggtttcttacggtgacggctccttcacattcggagatttctcaacggaaactctcacgttccgacgcgctgcagtcccgcgcgtggccatcggctgcggccacgacaacgagggactcttcgtgggcgccgcaggtttattgggcctcggtcgcggcggcttgtcttttcctacccagaccggaacccggttcaataacaaattctcttattgcctaaccgaccgaaccgctaacgctaaaccgtcttccattgtgttcggtgactccgctgtttctcgaacctctccggacacgcctggttcaaaaaattggttaaaaactacaagcttgtatgttgagcttcttgggatcagcgttggcggcgcgccggttcggggaatttcggcttcgttctttcggctcgactctaccgggaacggtggggtgattattgactcggggacttccgtcacgcgcctcacgcgccctgcttacgtgccattatatgtcgcttttcgggtcggggcttcgcatttgaagcgcgcgcctgagttctcgctttttgacacgtgctatgatctttcggggttgtcggaggttaaggttccgaccgtggttctgcattttcggggcgctgacgtgtcgttgccggcggcgaattatctcgttccggtggataatagcgggagcttttgctttgcgttcgccggaacgatgagtgggttgtctattatcgggaacattcagcagcaagggtttcgggtcgtgtttgacttggcgggttctcgggtcgggtttgccccaagaggatgcgcgtgattgaaaaaatgtttaacacatcttttttcctttccccttattttaattattccttttttttttttttaatttatgtatcttactcttgatgtttttatcgtattatctagtgaaatgctacttacaagttactagtggtacaataagaaatagttagctcgttaaaatgctacaaatttctatgtactgatgttatttttatatatgtactctaaaattgctatttaaaatggagggattaatgagaaaacattgttgtttgagtaaatatcaatccatgaattataaattaagcttt

SEQ ID NO: 125661 - DNA, 758 bp, Glycine max
  unsure (1)..(758): unsure at all n locations
  Clone ID: PAT_MRT3847_84481C.1
tatgagtaagaattgtaggttgtgtggctataaataccatccctccctatgccataaaccgcatcacaaactaattaaagtgtgttatattattcatataccactctccttatcttgtagtattagttaatttgcattcttttgtttctctatcgatcatgggtgtttttgcttacgatgaagaaaactcctccaccgtggctccggttactctctacaaagctctgacgaaagatgccgacaccatcatcccaaagattattggtgccatccaaagtattgaaattgttgaaggaaatggaggacccggaaccgtcaagaagataaccgctaatgaaggtcaactcgtcctgttctgctattaacgtgtctttaagtaggatatatgttaatagcaagacgagatgcaatcgacgaggctaacttggtatacgactacagcatagtgggagggacggggttgcatgaaagtttggagaaagttacattccagacaaaggtggctcctggccctgatggtaatggctccatcgccaaggccactctcacattccacaccaaaggtgttgcacccctctcagatgcagtgcgtgatgagacaaaggccaggggtgctggaattttcaaggccattganggctacgttntggcaaatcctgcttaatgattcatgccaaataataattatataaagcttatctggttgttggagttcattaatttgtatcatgtggcttgttcggtttttaattcatttc

SEQ ID NO: 125662 - DNA, 267 bp, Glycine max
  unsure (1)..(267): unsure at all n locations
  Clone ID: PAT_MRT3847_84482C.1
gttcttttttctctttttggtctaagcaaaccaccccaccatggcagcnagagcaacagcaatctttaacactcnnnnnnnnnnnnnnnnnnnnnnnnnnnnnnnnnnnnnnnnnnnnnnnnnnnnnnnncaactttctctctcctcnccctctccctcnatccacgancttctccgctccaaaggcttgccccccggcctcctcccagnggnggtganatcctacagcttctncgaaancggccattggaagtcttccntgacggg

SEQ ID NO: 125663 - DNA, 438 bp, Glycine max
  unsure (1)..(438): unsure at all n locations
  Clone ID: PAT_MRT3847_84483C.1
catcactacttatgttaagtattgctggcagtgctcaggaaaaggtgtcgccattgagagcagacgcatcatttgattgaaagttgaataaaacaaagcaagacaatgtccaagaacacactgcacacgggacgtacgcatcccacaacagagaaagagagagctgatgcacagatttattacctgattatgagaaatgaaggtacgagtactgtgaaaggagcactctctntattaattattatgtttgaattaagaaataaatcaagtgagataatcttttaataagtgttatcccataaatttaaaataagtgaaaatagacttaggttaatcttatcttaataagattctaaaataaagatgatgatttgtgtcaagaaggagaatgactgagttttcaagttattacgagaagtnatttggtgcagatgaatg

SEQ ID NO: 125664 - DNA, 185 bp, Glycine max
  Clone ID: PAT_MRT3847_84484C.1
agaaagacgaccactttataccacttcatagcacctaactataacatccaaggtcgtaaggcacactaacaaatggacataccccataactaaaagtgtacattctatacaatagcaacgtagatccactatatagcacaaaaattttaggcgtgcggggacaccacaaacacaggatgtattga

SEQ ID NO: 125665 - DNA, 370 bp, Glycine max
  Clone ID: PAT_MRT3847_84485C.1
ggctcgaggctaatcgaacagcatgttgattagctatgttcaggcaaaaaaacaaacaaatgaaggaaatccagcgtttcgggtaaaactgtaaggttcgaaaagggaataggatataaagggattgatgatcttcctctctatgactaagtcagttggaatgggctatgacttgatatattatagggcctgaagaatgttgccagaggcaagggcctggttgattatctctttcaagcttcacaggagactgccactcactgtgcaaggatgagctctcttgagtaccttactactggactaaagcagtctgagttgcatgtcaacatgggtgggctctacattgtgcctgcttttatggacaagcttg

SEQ ID NO: 125666 - DNA, 288 bp, Glycine max
  Clone ID: PAT_MRT3847_84486C.1
cgcacgccaatcacatcacatgatactgtaactggtttgtgatcaagcaagaatagttttcccaaacacttcaaccggcttcttcagctttgggaacctggttgtcagatgctttgcccccgcagggagacatcgatataatctctaagtcatatcgtcccagtgggggcttaacccctctgggccccccattacatggcgccgtgggtgcagattctgtgtacaaaactatctcccactctacaaataaagacttctgttttataaatcagccctgcgccacactgc

SEQ ID NO: 125667 - DNA, 582 bp, Glycine max
  unsure (1)..(582): unsure at all n locations
  Clone ID: PAT_MRT3847_84487C.1
ggctcgagaataaaggctgcagcatcattcgctatgtgtgtgcggtgtaggttggtattatcctcctggggcttggatgaatgctacgtgtgaaggtgttgatgtttgatttgtggatgcataggatgcaataattctactgcttctaaatgaatataagtgtcgggtgtataaggggccttctactcccctcgcggtgctttcatctctagattagtactcacaccttataaaagagaaagaaaaagaaaaagagagtgatgaaagcggagatgaaggatggagctcctcaagttgtgatgaatcataatggtaaccacggcaaattctcacacctacttgcttcccaagatcgtgactatcttctctctccaactggggctcaggtgaaagtttctgatcttgaagggaaagtagtgggtctattattcgctgcgaattggtacccaccttgccgtggattcacccaagtcctagctggaatctacgaggagctaaaaagcagagtccctcaatttgagattgtgtatgtgtcctcagatganggacttgatgcctttaatagcttctatggaagcatgc

SEQ ID NO: 125668 - DNA, 149 bp, Glycine max
  Clone ID: PAT_MRT3847_84488C.1
gtaagcagcaaagccttgatgctatataatggaggcctgatgaatcagtgggcaagacatcgatggacaactcgataaaatgcgcaccaaccaacaaagtctacgataggagtctatagtttgtcttataaccacttcaaactaagaag

SEQ ID NO: 125669 - DNA, 230 bp, Glycine max
  Clone ID: PAT_MRT3847_84489C.1
gtactgtatgcaaggcataacgagatcgtcgtcatacatctgtggtcgctgcctgcggcctcggacaaatgcttccatcagtggagtgcgcagtacccggtttcaatcgaacgaggcgccacggaccgcaataaacaccgagtcggacaccacggagcaagagagaagacaagatggagccaggccggagcaagagcagggagcaatgtcacgaagactggaggagatgg

SEQ ID NO: 125670 - DNA, 1895 bp, Glycine max
  unsure (1)..(1895): unsure at all n locations
  Clone ID: PAT_MRT3847_8448C.1
tgtggattgttaggttgtnttgatgaccacatggtcataantttagatagcttcgtgttatttgaaggaagattcagaatgattttagaaaagttgtttaaaattagtagtaaagctggttctgttagagtaggtttgagtcgattttcattgtatagtgataataaaatggcagatttataaggatatttttgtcttttaggaggtaaggtgttgtttttaagaaaggctgcagagaaaccataggacaagagtgatgggtaagggtatgaggatggtacaaagattcagttgcatctccccatgcctgtcgcacgtgtcgggagtaatagaaacctctcagcccctctccgatcaaatggccaccgtaatcgacggcaaagccgttgcgcaaaccatccgatctgaaatcgccgacgaggtgcgccagctctctcaaaaatacggcaaggttccgggattagcggtggtgatagtagggaacagaaaagattcacagagctatgttggaatgaagagaaaggcatgcgctgaattgggaatcaaatccttcgatgtggaccttcccgaacaagtctcccaagctgagaaacaaatcctaggatgtggactttatgcaacaagtctcgtaagtggaacaaatgaaccgagttcgctggttgagtgcaatccctgatgaacatggtttattgtgaaagttagcgttgccaaagcacataaatgaagagaaagttctgagaacattggcaagcttgcaatgtaaggcagggaccccttgttccatcattgcaatcccaaggctgtatatcgaactatcccaatgaatttggtgcaattacaaagggtatattgaagcagtagaggttggtagaagcaacatagttggattaacaggattcatggcttctcttgaaagcaaatgccacagttacaattactctttcactcacaagtcaggacagtaagtttcatactgtgaattaaaacactattcatccagaaagtatcacacctgaagcagatatagtgcttgcagcagcaaaacagcagatgatgatcaagagatattggatccaaatcaggagctgcagtcatagatgttggcacaaatgctgttgatgacccaacaaagaagtcgggttacaggcttgttggagatgtagattttgaggaagcatctaaagttgctggttggattactcctgttcctggtggtgtaggtccaatgacagtgacaatgttgctgaagaatactgtggagggagccaagcgctacattgagcaaaataattgatcttcctttaatttgaataaatgaaaggtatgtactattagtttgaaattctttgagaatcgggtttatccacagttttgtttctgctaaggtagatgaatgcatcctataaaatcacaaggatcggtttcaatgggtaagcagaactggtccaatcgaaactatgtatttgccctttcactatctctgaagaagcattctcgatgtgggtactgagcatattttagattggatttagaccataggtagtccttggagataagaaacgcatgttttttgggagtacttttggagtggactgatctgtagccacagtgtaagttctgttcttatgtaagaatcagttctacaacaaagtataaaaatgtggagtaatatgtagaacacatttttaattcttaagtggttttactattagagtaaaaagttattgaaattcttcctggaccaacttagctatatagagattataatcgcctcattgacgtctcttacactatggactggaatatctcgtgattcaacttatgtcctgtcaccatctctctcccgttgtcgatatcgataagcctatcatctcctttcaaatatctcttcttat

SEQ ID NO: 125671 - DNA, 335 bp, Glycine max
  Clone ID: PAT_MRT3847_84490C.1
gtttgagattggtatacatttcccggaaattcgatacccattattttatcccgacttttctcctgaatggtgagagtctagactgatccgtacagatttgactgtccctcctctttctgattcatgtgccattcgtaacaatgattaacgaaaatgccatcatctctgctgctgctgttggtgctgctgatcagcaacatcatgccttgtcctcctcgtcggtcgcttgtctgtcaccggtgctgtcaaacgacggagagttaaagctacgccatgtgcagccggctgttgctttatgtttagcgcccgtctgtggccatgcaacgtacggcaat

SEQ ID NO: 125672 - DNA, 281 bp, Glycine max
  Clone ID: PAT_MRT3847_84491C.1
cttcgtctcactcgtgactcgtctctgtcccctctctgacaatctccgagtccttctcttttccgatggcttctacaaaggtcaacaatcgaggttcccctggatcaaaaaggtttcgaaacgacgcttcgcgtaaagatggagattggcctgtcctaattgtgggaacttaaacttttcttttagaactgtttgcaaccagggacactgtggtgccccaagaccatccctaactataactccaccagcccccattataagcccatatagaaacagtcatc

SEQ ID NO: 125673 - DNA, 261 bp, Glycine max
  unsure (1)..(261): unsure at all n locations
  Clone ID: PAT_MRT3847_84492C.1
cacccacaacaagaagaaagacagagcaaagaaacaagagaaccgacagaaaaaagccaggcacaaaaagccgcacacaacacggcacgcacgagaaccgaaggagagggacgaagacccacaaacaccaacgagcgcgnacagcacggacacaacacaaacaggagcgcagaaaaccacagcacccacaacgcccaccgggagaacgacgccaccccacagaagaggaacgagcggcccaccaccncaagagaaaagcag

SEQ ID NO: 125674 - DNA, 719 bp, Glycine max
  Clone ID: PAT_MRT3847_84493C.1
agaacgtatttagcatgacatttctcatggtattcttcaatgtcgataaacataaaacaaaagataatcgatcaagtcaataattccccttccacaataatcaacatcaaaaattttaacggcaaaaggaaatgcattaaccctaacatatgggactcaacatacctagcaaaaaggataaattacaaaagaaactagcatgcggggaaaaaatggggcaaaaatcaagcatctgcaatggtgacctcgacctcaacacccggttcaattgtgattgaagtaatctgcttaaccacatcaggggaactgtagagatcaataattctcttgtgcacacgcagctcaaatctgtcccatgtgttggtgccttcaccacacggggatttcctggtggtgatgttaagtactttagttggcatcctaacaggtcccttcaccctgaggcgcttgtccttggcaccacgaacaaggtcggcgcacactttctcgagattcttgacgttcttagaggaaagggtgatcctaatcttatggatctgctcctgaggctcctccaagccggccttagtaggcttcattgcagcgtaagccattgtattgtttcgtcccctctacgcacaaagtttctgaattgcaagcaaaatgcggctctgcagcacttgggggacgacggaacaagctcttagaatttcccccttctgtcgtcttctcgcagaaaa

SEQ ID NO: 125675 - DNA, 1093 bp, Glycine max
  Clone ID: PAT_MRT3847_84494C.1
cccgcgtccgcggacgcgtgggtgatggttatatatatggaaatgaaatattgtcatgcattaattttatgtttaactaggtactgtttttatattattttcaaataagtattgcttttacaagttttgataatttcctaaaaaaataaatttaattaaaaaatataattacctaaggtttcccactgtattatagtgggttcttattgtgtagaaaatacactatattacatatagttaagtcgtttacatcacaatgggtttgatcaaccgtaaaaaattcacagtaatacaataagttaaatccactataatttgttatacatgttagtccagctccattgttactcatcacttattgacgggtaagtcctttatattattgatgatcaatttactcatgactaaatccactatattaccttctacttacagtggactaagcctgtcgtattacaaacgacttctttgtgaccattaataaaatttactgataaaggttttacaaacaaactcatagcccactataaatcgtctgtttacagtaaaatttcgctattacaatgggtttagagggaactcaatcgattttttttatcagttcaataaatagtcaggttttaaaatatcaggaaaaaaattatcttaaattggttgattcttgttaattggacacaatttaaatgattaaatcgatccattttttttaactcttctatttggtggagggatttgtgcaaggtgtgtgctggtcaaaatgagtccaagtggtttgatgagtgtgtggagtggagggtggggagggaaatagggtagaattttggcatgattgttggattggccatgaaccactagctcatgtctatcctagaatcttcttaaattctaatcaaaaggaggagtgttaactcgttggcaagtgtaccaaatttgtcacaagtagtaaaatactcaaaagttcgagtgtcgaatccatagagactttgtttatacttagattaatgcaaacccaatttaaaagcaatagataaagaatttaaaatatagataagaaaatagataagataaagatttaaagatcaaaatagaagat

SEQ ID NO: 125676 - DNA, 499 bp, Glycine max
  unsure (1)..(499): unsure at all n locations
  Clone ID: PAT_MRT3847_84495C.1
gctggattcnctccgtcagcgcaactgaggaagacgatcacggagtgatagtttgtgagttaccgagttagggtttcaaattcaactcactgagtcaatcttacattttaaattttttattttctctttttcaccggagaaaactctgctccgatcccttctttcattgtttttcgattttccggcgagtttttacgtattccggtgacactaggggaacataaatcgattctttgattacgtgactcggttttgacttcaaaagtctttactgaaattttctacttgctagattggctttgaattgattcagtccttctttacggttttatttctggcattttctttgattcgcagcagaataaagataatttttttggaattccaataataaaatttcttgtactttttttagggtcttgtgaaaatgtcatatgcctgaccccttaagagacaattttttgctgtattgtgaaattgtttagtgaatctgcaaaat

SEQ ID NO: 125677 - DNA, 411 bp, Glycine max
  Clone ID: PAT_MRT3847_84496C.1
cacacgcttactgttggacatcaataatttatgtgaatggagtattagttatttagtgtagatcaaatgatgtgcgtacaaagctataggactatgtacgttcaatggccatccatttggtagtccactttcaatgacgaataagtaacattttaataccagattattgtgagttttggttggaatcctgagaagtcttggtccttatagcgttagcataagttagttcgagcattaaacttgaatttaattcttacgtctgcaaatactctgaagcatcagaagacgaatggcatgagccatgcaaattttggccaacatcatatcaccccaggacttacaacattgatggcattactggatttagcgaggatgactcccaatcagttatgaagtttatgcaatcagctg

SEQ ID NO: 125678 - DNA, 235 bp, Glycine max
  Clone ID: PAT_MRT3847_84497C.1
ccacgcgttcgcttttgaatttatcgattacttttttgtcattttaaaggacaaaaaagtaatcgctaaattcaaaaacggacccgggggggcccctctaaatttccaaccttaccttcgcggcgtgccaccttttactttttttatagggttaacaaattggaattaattgtggcgatggtttacaacctggggaaaaggaaaaccctgtcagaacccaacattaatatacgtt

SEQ ID NO: 125679 - DNA, 232 bp, Glycine max
  Clone ID: PAT_MRT3847_84498C.1
aaaaatgggactttcaattaagccaaagatgggtgatgctttacttttctggagcatgaagcctaatgcaactttagatgcattgactttgcatagtgcttgtccggtgattaagggtaataagtggtcatgtaccaaatggatgcatcccactgaattcaaaatggtttaaatagggattactataggagtttatctcccatttcttgtttttaccgtatattaacataaa

SEQ ID NO: 125680 - DNA, 218 bp, Glycine max
  Clone ID: PAT_MRT3847_84499C.1
cattggggacactctcgcgacgtcatcttcattgacatatcgtcagcaatattacagcattatcttgtgactcatcaggcacatcacaccattatgaattgttaacagtcatttggtgttacatcgtcatacctatgatgtttatcaagtctgcagcaatggcgcccgctccatccttaacctggacatgcttcattctgtgcgtctggtgcttttca

SEQ ID NO: 125681 - DNA, 611 bp, Glycine max
  unsure (1)..(611): unsure at all n locations
  Clone ID: PAT_MRT3847_8449C.1
tnnaatgagggaaggaacataaagaataacatgaaagtctaaagcctaacaaagtggatgcttagagcatccgctaaacagatagaactaagttcaggtgagcaaggatcccaaacttggcaagaatcatagaattaagaaaaagctcccttctttagctaaccaatttaaatagaatgtattaatagtttaaatatttttaacactattatacgataatattattgatttttgagataattaatttaaaatcatatttagattggttttaattagctaatagggtagtttggtaatttatctcaagaggaagtggcagatctatgaaatatacaccattctaaagtattgcatagtgtatacaagttacaacaggtgggtccgaaaattctatttctcagcctgaaatcaccatgtttcttaagctaattttctatcaggaaaataaacttgcaatcacaattctcattattttgttgaattcaatatggattaacttgtatgataaaagagtttatttgtttggtaaccaaacttttttaattagtgtttgacaaatttttatgcccctagtggttttttaaaaaacattaattttttaaattttttat

SEQ ID NO: 125682 - DNA, 1260 bp, Glycine max
  Clone ID: PAT_MRT3847_844C.1
caaaaaaataatataaaataattcagtggttattttaaaaaaatataaaaatgaaaactaactaatgttattttataatgagtattcaatttgtagaatatacggaataagacatagtgacatacagcaacagcagcagcatttcggcccgtctgagaatcgagcagcaacgttaacagtgagtgtggtatgttccacgccctctcccaatgcctgtcctccagcacagcctccctgtcccaggcgcggcaagcccacgccctcattctccgactgaacctcttctccgacacccaactcaccaccagcctcctctccttctacgccaacgctctctccctctccaccccccaactctccctcaccctctcctcccacctcccccaccccaccctcttctccttctcctccctcatccacgccttcgcccgctcccaccacttcccccacgtcctcaccaccttctcccacctccaccctctccgcctcatccccgacgccttcctcctcccctccgccatcaagtcctgcgcctccctccgcgccctcgaccctggccaacagctccacgccttcgccgccgcatccggcttcctcactgattccattgtggcatcctccttgacccacatgtacctcaaatgcgaccgcattttggatgcccggaaactgtttgatagaatgcctgatagggatgtggttgtctggagtgccatgattgccgggtactcgcggctcggcctcgtggaagaggccaaggagctctttggggagatgaggagtggtggagtggagcccaatttggtgtcgtggaatggcatgcttgccgggtttgggaacaacggcttttacgatgaggccgtggggatgtttcggatgatgttggtgcaagggttttggcctgacgggagtactgtttcgtgtgtgcttcctgctgtggggtgcttggaggatgtggtcgtgggggctcaggttcatggttatgtcatcaagcaagggctggggtctgacaagtttgtggttagtgccatgcttgatatgtatgggaaatgtggctgtgtgaaggagatgagccgggtgtttgatgaagtggaggaaatggaaattgggtctttgaatgcttttcttactgggttgtcacggaatggtatggttgacaccgcgttggaggtgtttaacaagtttaaggaccaaaaaatggagttgaatgttgtgacgtggacgtcaataatagctagctgctcgcagcggaagaaaggg

SEQ ID NO: 125683 - DNA, 1084 bp, Glycine max
  Clone ID: PAT_MRT3847_84500C.1
gcaataagtacgaataacaaaccaataaaccaaacccacactgctaggttttgtttggtgtgacgcgcagcggaagccatggctgattcttcttcgaacttgaaatccgacgcgataatggagcagatgaagcagcacctcgccaccgactcaggcaaacaagcccccaactgtaacgggacgaaacagagggattataaaaagagaagttactcgatagttcaaatcagaagatggttcctgtcacaccaactcaataacagatcaaaccaaacccaaactgttaggtttcctttgtttggtgtgaagccatggctgattcttcttccaacctgaaatccgacgcgataatggagcagatgaagcaacacctcgccaccgacgctggcaaacaagtcaccaataaaattggactcgtttatcagtttcacattgctcctaagaaacttggattcgacgaggtcgtctacaccgttgatctcaagaaaggagaggtcaccaaagggtcatatgaaggaggaaagcctgatgcatctttttcgtttaaggatgaggactttgttaaggttgccttagggaagatgaatccgcagattgctttcatgaggggtgcgatgaagattaagggaagtttgagtgctgctcagaaatttactccggatatcttcccaaagccttctaagctgtgagctgagatttctgcaactacctgcacaaggttgctagaattatcgtttggctgcagtcaaacaaaatagatagcaatcatagtagcatcaaaagctgaggattataattatatctttagttaatgcatggatcatcattcctaaggttgttggtggttcatgattttaatatatctctgaacactgaaggatatttttagatactcttctgcaaatctgtcataggtttttattctactgtgattggatgtttcaagtttgaaaatagttagttcatcgtgcattatttagagctacttttccattcttttgtcataaattctcaccgagccaataattgtgggatggatgttaggaatcgtgttttctgactaaatgcattgtcaatatacatg

SEQ ID NO: 125684 - DNA, 332 bp, Glycine max
  Clone ID: PAT_MRT3847_84501C.1
attccctcggcgagccgactcctacggctacaccttcaaatggtacattagtgttttttatgcacgcagcgtaacttctaacttcgtgggatactgccctgctgcagattctgtctccgagccctacattgttaactcaccacttaatacttgctcatggtgcatcagccaattgctccctgaacagatacgaagctcatcacaaaggacaaattgtatttaccatagctactttcctcgttgaaccaaaatctaatattgatgctaatcgcaatgcatcaacgctagctcttgactgtattgttggcttgattgcttatcccattacattt

SEQ ID NO: 125685 - DNA, 295 bp, Glycine max
  Clone ID: PAT_MRT3847_84502C.1
ccagaaaggagcggagaaccgcatttattgtaaggggccacaacgcttattcagaccgaaagaccgatgcttgtcacccattggtataaatggggcctcttatagaacaccaccatctctcggttcctgacagggtatacaagaagcacatgtccccctcaatttgaaaaacctctatttacggaaaggggaacatgggtaatcttaaatgaagacaaattctgttatttcccccccgaaaaccatggtcacactgccaccatggactggtcaaccttgggagttaaccgggtta

SEQ ID NO: 125686 - DNA, 509 bp, Glycine max
  Clone ID: PAT_MRT3847_84503C.1
caaaaccaaaaggggttattttttaaacttggcgggttttctttgaacaaattgtttaacattcccttttgggaatttttgttccccccttttccgggaaatggcacctggaaacatttttgtccaatttattaagaacaaattttttgttaaggcgtggaatttttctaaactgggggcaaaggaaactaaggggtttgaatcaaagctaattttgaatttcccttgccctaaaaaaactttttaatcaaacccctccttttgggctaatttttcaaaaagaatttccctttagctaacttggggccacccccaacgtatgaaacaagtctttttttttttaagggttcccaatttggggatcgaaggtttagagaaattaagggtccccttttttttttccccggggcttattaaggatttgttttccacaggaaatgcctataagaaacccttttttggtttgtttattgaacaggctttcctggaccattgggggggacaggggg

SEQ ID NO: 125687 - DNA, 407 bp, Glycine max
  Clone ID: PAT_MRT3847_84504C.1
tttttttttttttttttttttttttttttgtgttttgggtttttttttttttttttttttttaaaaaaaaggaagggggttcttacaattttcccttaaggaaggggtttttatccttccccaggcccactttcccaaaaaactttggtttttttcaacggggggcccaaaatcaaatccttaaaagaaatgaaattttaacccaggtttttcctttttatttgtccccaggggaatccttttttttctttcttgaataaaccccccgggcattttcaaaaactggttgaaaaacttttgtggcaaacctttcgcccccccaagaattcaaaattcttaaaacgggggccaaaaaaggtttttttttaaacaaaagaggcgtaacgggaaaattttttttttgtttc

SEQ ID NO: 125688 - DNA, 438 bp, Glycine max
  Clone ID: PAT_MRT3847_84505C.1
cagcttcaactcctgattgacaactctcctcggctaacgcaacccaacgctcacgcgcgccttcgaatattatgtacttgtcaagattttttcagtatcgatttcatcgtgaaattattctgtctttttattcacttttgactcattaattataaatataaatattaaatgtttattttatattttaagttaataaattatttttatttaatatattttaatattagtttcatcgtggaattattttatctttttattaacttttgactcattaaatataaatattaaatgtttattttcttttttaaggagaataaattatttttaatatttaatacttttgactcgctaactataaatataaatattaaaacaagtttatattattatttgattataaatcgtgattggataagtgtctaaaatattttatactaa

SEQ ID NO: 125689 - DNA, 220 bp, Glycine max
  Clone ID: PAT_MRT3847_84506C.1
cagactacatctccactcttgtctttcatctggtattaaaagttatgatggagcctaccgtcacccacatatgtacctatgaccctcttttgggaattactcttatgctgaactgctccatccctcggagcctacatgcagagataccatggatttgtcagctactagaacatctgactcacccgtttgtaatgctgctacatctcataacggccgttat

SEQ ID NO: 125690 - DNA, 947 bp, Glycine max
  Clone ID: PAT_MRT3847_84507C.1
cacagtttctcatagcttgctcatcaacagtgattgctggatctgttgcctcttactattgggcccatggtgaagcatctcctgaaattccttttctttcagtcttttcctccatgaagaggcttttgcgttacagtcttggttctgtggctcttggctctctgactgtatcatttgtagagtcaatccgctttctgcttgaatctattcgccggaaacttaaaggctctagccacgtgcctgatagctggattggcaaggctgctcaccaatcttctcaatgttttcgaaggtctattgagtggaccatcaaatcagtgaaccgaaatgcttacatcatgattgctataacgggtaaaagtttctttagagcttctgctattgcaacagaattgatcatgaataacatcctacggattgggcgtgttaacgttattggagatgttattttgttccttggaaaactatgtgtcagcctctcaagtgctgcttttgctttcctcatgttggacgcacacaagtacagatctgcacataacaagatctcatctccactattgcctgttgtggtttgctgggctcttggatatattgttgcaactcttttctttgcagttgtagagatgtcaattgacaccatcattctctcattctgccaagactctgaagagcatgggacagcacagtatgctccacctcttctcattgaaactcttggagaccaaaatgagatgcagagacttacacaaggaccccaatgaaatatttccttgtattattttgtctctgatgaattttaatagagcttcaagatttagaattttgttaaggtccttaattttgccacctgagttctgttcttctccattctccttgtatatatgttatatccaatgttcaacaaaggtgccctcttgatttaggtagctttcaaagtatttttattt

SEQ ID NO: 125691 - DNA, 772 bp, Glycine max
  Clone ID: PAT_MRT3847_84508C.1
cgtcccacgcgtccgggattggatgtctgaactggctaggcttgaggccagtttgtctttctttaaatcatttttttttttcaacttttgttacatatatagttattgctgtagtcttgactctggaattttgtcacttatcacattctggttattggtttaaaaaaaaaaaaaaaaaaaaaaaataaaaaaaaaaaaaaaaaaaaaaaaaaaacataaaaaaaaaaaaaaaaaaaaaaaaaaaaaaaaaaaaaaaactaaccccaaaggggccaaaattaaaaaccctgtttaaagaaagggggggggggccctaaaaaaaaaattaaagtgcccccccagcccattttattggcaaattttttttttcgggccaattagtaaaaaaactgggcccccttactaaatccgtgggaaaacaaaaccctctgggaaatctgattttttttaaaaaaaccccccttccacccccttttcaaaaagaaaacaaccctaaacgaaaaaagttcccccccttttttccaccccaaaaacccacttggcctcttctcttttcccccccccttttaacccctccaacttttgctagagggaattaccgcccccggccctcttggaaatttattgcccatttcttttttgccccccaatcccctgcgggatttttctccccataaagtttttaaaaaccggggggggccccccttttttcccccccccaaattttataaattttgggggcccccccctacagcaaaaaaaaatttttatt

SEQ ID NO: 125692 - DNA, 392 bp, Glycine max
  unsure (1)..(392): unsure at all n locations
  Clone ID: PAT_MRT3847_84509C.1
gatgtaaaaagtgtgtgatgttaattagtgagtgaggaancattnaaatttagtggaaattaaagtcaagaatcaaactgaccaaggagtattcaggtatgctaattccttcaacttgaaactcctttcattctttgcttggacctgcatttctcatttctggtcgttaatgcatctatttgcattcaattgaagagttcatttcatttcttacccttcttgcatatacatgttaattgattcccatggtgaaagatttacatatatacctcttatacattcttgcatgcccaaattgatatatgtaagcattttatgaattgatatacatatattaaccctcacattcttcttctttttagtctataaccgaatgcctgacacgctcaagt

SEQ ID NO: 125693 - DNA, 1286 bp, Glycine max
  Clone ID: PAT_MRT3847_8450C.1
cggtccggattcccgggtaatgccgcgcgaatagaaacctctcagcccctctccgatcaaatggccaccgtaatcgacggcaaagccgttgcgcaaaccatccgatctgaaatcgccgacgaggtgcgccagctctctcaaaaatacggcaaggttccgggattagcggtggtgatagtagggaacagaaaagattcacagagctatgttggaatgaagagaaaggcatgcgctgaattgggaatcaaatccttcgatgtggaccttcccgaacaagtctcccaagctgaactaatcaaacaagttcaccagttgaatgctaaccctgacgtacatggtatattggttcagctcccgttgcctaagcacataaatgaagaggaagttctgactgaaatcagccttgagaaggatgtagatggttttcatcctttgaacattggcaagcttgcaatgaaaggcagagaccccctgttccttccctgcactcccaaggcatgtattgaactattacaacgaagtggtgtaagtattaagggaaagaaagccgttgtggttggtagaagcaacatagttggattaccagcttcattgctgcttttgaaagcagatgccacagttactattattcattcacacacaagtcagccagaaagtatcatacgtgaagcagatattgttattgcagcagcaggacagccgatgatgatcaagggcagttggatcaaacctggagctgcagtgatagatgttggcacaaatgctgttgatgacccaacaaagaagtcaggttacaggcttgttggagatgtagattttggggaagcatctaaagttgctggttggattactccagttcctggtggtgtaggtccaatgacagtcacaatgttgctgaagaatactttggatggagccaagcgctacattgaacaaaataattgatcttcctttaatttgaataaataaaaggtatgtactattagtttgaaattctttgagaatcggttttatccacacttttgtttctgtttaggtagatgaatgtattctacaaaatcacaaggatcgctttcgatggataagtagaactggtccaatcgaaactatgtatttgccctttcactatctccgaagaaacattctcgatgtgggtactgaccatattttagattggatttagagcatagctattccttggtggtaagaaacgcttgtagccagtgtaagatcagttctaatgtaagaatcagttcttaacattaaaatattgcttttctacaacc

SEQ ID NO: 125694 - DNA, 295 bp, Glycine max
  unsure (1)..(295): unsure at all n locations
  Clone ID: PAT_MRT3847_84510C.1
gatggnaacctaantntttatattgcatagcaaactttttctatttggggacggncatcannccantgnggatcacacagancatgtcanatcacacagaacantcttctctgagntctngcctagcaagancaagagcaccacttggggngnngatnaaatncaaattgtgngctncctctctgngaagnncacagncaccagntttatgagtcncgatgttatctttctntncattgggaaggggcgggattggatantntctctcncacatagnaatcnctttctcatatta

SEQ ID NO: 125695 - DNA, 396 bp, Glycine max
  Clone ID: PAT_MRT3847_84511C.1
aaccaaaaaccacttacacccctaaagaaaaattttatttaattacacttcactccatttaactttcaaaaaaaaacaaatctcattcctcaacactttattttaatttaaacatttcctcttttttcatcccaattcactttcatatctttaaatcaaaaccaccctacccaaacaaaattattttaaaaatctattacactttcccaactcaatcaattaatcctctcattttaaaatacaatattatcacttttcccatataatatataatttaattccatttttaaataccccttctctttaaccatacattaatcttatcctagatcctataaaaacatccacttctcaaacaaatcatttactttcatttttccttacaaaacacaaata

SEQ ID NO: 125696 - DNA, 175 bp, Glycine max
  unsure (1)..(175): unsure at all n locations
  Clone ID: PAT_MRT3847_84512C.1
attagntntgagggntgaaaatgagaaggatgangatgaagntgatantgttggttgntggaggttaaaagtagagaatgtgattagagaantattgaataaagtgaagtttaaattatttggtaaagattgtatnaagtatgaaaatanagttgaggttgagattaatgtttat

SEQ ID NO: 125697 - DNA, 160 bp, Glycine max
  Clone ID: PAT_MRT3847_84513C.1
ggttccaccagaagcttaaaggctcattcgaattacaagctcttggcattggggggaaaggccaccatctttgttgacaacctgcatcacaatccgaacgtatgctctcttgaattaactgcacaaacctgaaaagcgagcttgcctccctgcgatttgt

SEQ ID NO: 125698 - DNA, 576 bp, Glycine max
  Clone ID: PAT_MRT3847_84514C.1
actaacaaccacattttaccatttcaaattgtcttccattctttcaacatcaatgtcaatttttatgggtacataataaaagtgggcaaaattcaacaagaagatgaatgtagtgaaggactgtaacttgtaatcagtgctcagttaaggatgcagctcagcatttccaatgttcggggatatagtgagtagtgtactctgctgagtgctgagcgtagcaaaataaatatttttcaatagcttgatccctcttcattttctggaaatacaagccgtaagcgttcattatctctataagcttgcaccagaacagcagccttgtagacaaacattccgaacatggctggcacaagctggaaatcaaaaatgtcattggtaaaatactgatgaaacagaatccaaagtccatatattgttgctggaataactagcctaggagatgaaagtgatataccgctacccttgattgtcctctccaagaaatcttcaaggtcttcacttcttatcccatttttctttgacttctttttctttgatatttgagggacatcttcactggataggttggtctgcatg

SEQ ID NO: 125699 - DNA, 177 bp, Glycine max
  Clone ID: PAT_MRT3847_84515C.1
aagctttttggcatacttcctcatcggtaagcatcatcaagaatataacctggctccttgtttgaaaggatatctaggctttctaacctttttgtctgctttgtttggtattagtggggctagtgggcgaaccacctaactgatgactcacattaatgcgtcccgcactgatctggg

SEQ ID NO: 125700 - DNA, 330 bp, Glycine max
  Clone ID: PAT_MRT3847_84516C.1
ctcacgcgtatgatatttactactgacagaaggggcatattaaatctgaagcgtagagtcaattaatcagcgttgaccaaccaggagtaatactacgacgtatcacaaccaaacgccgtactattcttctactggacaaactcacacgcacgcactcttattactgtatccattgtcgacattaccacgagtcatggatattatacaaccctgatcttttcatgtacaaaccatgtgaatgctggaacccacttcagagatgccgatcacacaacatagctctatcccaaaatgatacaaacgctattatggaagagtgtcagatccagc

SEQ ID NO: 125701 - DNA, 439 bp, Glycine max
  Clone ID: PAT_MRT3847_84517C.1
cccacgcgtccgatcatttcaactattgtgttcttcttggccaaataaagccaacccctggtgctgttttggtttgtctgagagagaaatgatggcattggagtgtagtagtttccacttcctaaatggggtttacatggtgctgtttttttgccttggcattgtccttgtaaattcggttaatgaagagggtttgagtcttttgaggttcaaagcttcccttcttgacccaaacaacaatctctataactgggattcttctgatttgactccttgcaattggactggtgtgtattgcacaggttcagtggtaacttctgtgaaactttaccaactcaatctgtctggtactttggctcctgccatctgtaatcttccaaagcttcttgagttgaatttgtcaaaaaatttcatctctggccccattcctgatggtttt

SEQ ID NO: 125702 - DNA, 487 bp, Glycine max
  Clone ID: PAT_MRT3847_84518C.1
gggcgtgcgggcctaaagaggcacatccactggtccgcggagctggcctctaactcaggagctgaccgtgaatcctgatttcaccgatcaataatcataaaacatgaccgatttactaacaccttacttgatattggccctgactttttttcccggcggttcagcgccttaagaatactagccacaaaaaaaatccctacactctggagccctgattgactgatgtcaatcaagatgatgctattgaaagggaaacagctgatagaatgcaaagggaaaaggcatgtgcacgatgctgtggcatgtatccagccgaatatggccctaggatggaataacaaagccactcaaacagttactatctatgaagccatcaaaatagacgcaaacggggctgattacggaatgacgcataccacctggttctgcacatatggcaaccatggatggtcctcggagcgtgacatcatattaaactgcgatacca

SEQ ID NO: 125703 - DNA, 315 bp, Glycine max
  Clone ID: PAT_MRT3847_84519C.1
caccatcaccactgttcactttacattccattccaaaaaatatattgcccttttttcaaggcaaatcccaagtaaaacaagaaccctcacaagttcaagttgagatgatttgatgaacattcacgagattaaaaattggagaaactaaaaaaataaaaagaatccttgtatagcacaggaattagctaaggaggagaaagaaaaagcactcaaaattaatcccatcatcccccaccaacccaaattttaatacacataaatccatcttttctaccgcacatgttcattatcaaattgtgaaaacggaaaaccatt

SEQ ID NO: 125704 - DNA, 478 bp, Glycine max
  Clone ID: PAT_MRT3847_8451C.1
attaagcgtgctaataatgaatatggtgtagcggaacacaccgactgcattgtgtagacactacatcatggatggtgattacgagacaaatgagcatgttcaaggcgacgcccacacatgttacatgagcctatgagttatagaggtataacagaggaggagaactagtgggtggcaggcgacactagatatggaatattgtccggagcaaaataatatatgatggaatcggagccaatgctggagatatcgctgaatcattatgcatgagatgatactctagtagatgctgggagggctgcagttggtgcattgaagcttatgcaagctggacatgctgatgatgctgcgggagcaacactagtatgcttcgatgatacaatgtcggcgttagagtggtatagagacgtaccgctatcatggtagggcgaacttcataattctacacatctgaagtctatgacaagagtatagactg

SEQ ID NO: 125705 - DNA, 340 bp, Glycine max
  Clone ID: PAT_MRT3847_84520C.1
cctttacgaacggttttttctgcggctgaatgggggccctcttccgggagagggcggaggcctaaaacttgggagactcgcaggtaaaccttcactgggggatcatttgtgcttgccccttgctcggaagggctagagacgcattgggaggggaggaccaacttgtggtgggttgtctgctgggtgcagcaatggcggctgtgcttctagagtggatacaggagcctgtatgctcggtataccgactactgttttgacagacctggaggatgctattggggcattacgactgactaatgtacaatgtggggcaagtgccactggatagtgggagtctatc

SEQ ID NO: 125706 - DNA, 537 bp, Glycine max
  Clone ID: PAT_MRT3847_84521C.1
gggggtaaatttcaagtttttaaaatttaatttcgcagggcagttacaggctagctaaaatagaaagttaaagcacaattgttgtagcatgctccatctccccctatttggaggaatcggggacaactcactttactatctctttggtagttagacaatcttctagagctgtgtttgcgcccaacctcagtttggaggaagcatcatcatcttccttgcttctgcctcaaatggcatgctgcagcactggaatagacaacttatacactacaaaagaaactaagaaaattgcatgctgtacttagacgcccacgaatgccctacactgtgaatcccagggttcctttatttgcttaaccctctccaccctctctgtctgaagcctctgctcccagtattcctgacaacttcggcttaacagaatatttagttcttccaagcgcacagcaccttcataaactgcaccctcacgacatagaggacatttcattttaggatctgcagacttaagtccattgacaatagataccgatgcag

SEQ ID NO: 125707 - DNA, 241 bp, Glycine max
  Clone ID: PAT_MRT3847_84522C.1
ttcacacacaactgatgatataaactttgatattaactgagctcaaaatgatgcggggattacatacttcactaaaggggctgacaaatacattaatagccaatccttaaatttgtgctacagcaaacctacttacattcctccttaccaaccacctggtctaacaggactcattaccaaatgtattcatccctacataataggctccaatatcacctttcacataatcttaagtggaata

SEQ ID NO: 125708 - DNA, 730 bp, Glycine max
  Clone ID: PAT_MRT3847_84523C.1
gctaggggtaatagaaaatgctaagcagtgttttaataagtgcatggacagcggttattgcgtttgtatgagtcggagaggcatgtcaataacagctgaactcttaaaattgcctcagatggaagcagaggctctatgtttggctgcttctattccaattatttgctccactcatctttatgcatttttattaatttttgttgttgttgttttgcttaattaattttgattagggagaataaaaggtgcgttttattattgtaatgtcttacagctacaaaagtatgatgcaacaattcacctttgtgaacagagtcagcatcttgcagaaacgaattttgtcttggcaaacaatacagtgaattctgatagttccttatgtgatagttactcaagtgtaaaattgtggaggtggtcattgaaagtaacatgttactttcatttgggaaggcttgaagcatcacttaatgttcttgagaaattacagcaagttgtgtctgtcactgacaactaattcaattgattactgagcaaggataatttttcattttccatttcaatcaagatacattttcttttttcaacagctagggatgccttacgatcaattcaattatgtaggtgtgtggtcgataacattgaagacttgctaacattagcttctacaatacgggaacttctgaagaacaaggtaatttcaaaatgccctaactagagcgagaagacatgt

SEQ ID NO: 125709 - DNA, 293 bp, Glycine max
  Clone ID: PAT_MRT3847_84524C.1
attatacctaaatctgggacagggaggtgacagtggaacaggctaccaatcagaactagatgacttttaaggctcctcctattatgagacttcaatttccaaagagaagaactagcagagaaattgtatttcagtaattttaagctaccttctgtcttgtagagtcttgttatagttgtgtaaatcaaaaacacagaataaggaacatatttaactttttttcattataaaatggttagaggaccctaccccctctagattccctgatttccccaggcctgcagcatacagta

SEQ ID NO: 125710 - DNA, 669 bp, Glycine max
  unsure (1)..(669): unsure at all n locations
  Clone ID: PAT_MRT3847_84525C.1
agacctgggggattgactgatgttgggctaggttacgtaggncaatacagccccaacgtgagatggatgcttcttggttatgtgggagagactgatgcagggcttttggaattctctaagggctgccccagtcttcagaaacttgagatgaggggatgctcctttttcagtgagtatgcactagctattgctgcaactcaactgaattctctcaggtacctatgggtgcaagggtatagtgcatctgcatctggacgcgatcttctggcaatggctcgcccctattggaacattgagctgattccttctagaagcgtggttgttagcaatcagcaagaagagcctgtagttgtcgagcacctggctcatattcttgcatattactctcttgctggcccaagaacagattttccagataccgtaatacctttggatcctggaacatatgttgacacctaaacttgtacataccatttttctttttcttccaaatcttgtttgttagtggtggcagtgttttagtttagagggtttcaattttctctgcaattcctagacaatagtcttgtaataagctcgtgttctttgcttccgatcaactcttgcagcaggttgtttttttcccctgaagatgctcaattttgtgaatataaagcatggattgtttct

SEQ ID NO: 125711 - DNA, 744 bp, Glycine max
  unsure (1)..(744): unsure at all n locations
  Clone ID: PAT_MRT3847_84526C.1
gggattgactgatgtagggctcggttacataggggcaatacagcccccaacgtgagatggatgcttcttggttatgtgggagagactgatgcagggcttttggaattctctaagggttgccccagtcttcagaaacttgagatgaggggatgttcctttttcagtgagtatgcactagctattgctgcaactcaactgaattctctcaggtacctatgggtgcaagggtatggagcatctccatctggacgcgatcttctggcaatggctcgcccctattggaacattgagttgattccttctagacgcgttgttgttagcaatcagcaagaagagcccgtagttgttgagcacccggctcatattcttgcatattactctcttgctggcccaagaacagattttccagatactgttatacctttggatcctgcaacatatgttgacacctaaacttgtacataccattttttttttcttcttcttctttccaaggttttttttttctcctttcaaatcttgtttgtaagtggtgggagtgttttagtttagagggtttcaattttctctgcaattcctaaactggtgttctttgcttcttatcaactcttgcagaaggtagttccttttccactgaagatgctcaattttgtgaatataaaagcatgtattgtttctatttgcaaaaaaaaaaaaaaaaaaaaaaaaaaccncgcggccgctctagaggatccaagcttgcgt

SEQ ID NO: 125712 - DNA, 528 bp, Glycine max
  Clone ID: PAT_MRT3847_84527C.1
tcctctagattggccgcccttggtttgcttttttttggcagtacaaaatcaatcacaacttttatttaatgtggatccatttgaaaatgtagacattaccagcatactgcaattccaagtatgatatgatattactaagtagtaattagctgcggcggcgacaacgattgagacgatataagcttgatggatccttcagctcgtgggcgatggcccgaagcatctgaatagaaacccgcggttcgtgttgattgttcctgagctttgagcagcgctgccgctcggggtgccactagtgccagtagcgagggcgttcgtctgtggtgtagcagggttgggagtactgggagcagtactaggagtagaagcaggctggctgctgtttgcctgaacatcagggaagccaataatttcgccacgatacggatgctcacctttccgtctcggtgaaaaagctgcaggagtgaaagttgcattgagctgcaattctgactcgtactctggtgggaattgctcaaagcctcgctg

SEQ ID NO: 125713 - DNA, 2838 bp, Glycine max
  Clone ID: PAT_MRT3847_84528C.1
actcattctcagacccaccatcactcagaaacacacatccaatccaataaccgcaccttccaaaattgttgataagtttctccttgtttctcgaaaaaatcagaggaaagagattccggatcagtttccgttcagtggttcacagatgctataaccaatagtcatcatcttcagaaaaaaaccaccttttttttgccattctgagctcaccgagctacccaatgcgattttgattcgcgggcttttcatttctgtataaatctgcaatctttgaggaaaataacgtaaccccatctgtttataatcatatggggcacaagtgaacggaaactctcgaggaaattgaggtttgaagcttgtaacgcatcctagaatattatgtctttgcttcgacggagaaaagggtcggaaccggaaaagggtccgagcccgagttcggagccaaaggttttaagcgaagacgagacagaagatgataagaataataagaagaataagaagaagagagatgaggtgggggagaagaagaagaacaaatggtcatgcttcgatagctgttgttggtgggtggggtgcatttgcacattgtggtggtttcttctgtttctgtatcagatgatgccttcttcgattcctcagtatgtgaccgaggccttcactgggcccatgccggacccaccgggcctcaaactcaagaaggaaggactcaaggtgaagcaccctgtggtttttgtgcccgggattgtcactggggggcttgaactgtgggagggtcacctgtgtgctgaggggttgttcaggaaacgcttgtggggtggtacttttggagaagtctataaaagaccttcatgctgggtggatcacatgtcactggacaatgaaacaggattggatccaccaggcataagagttaggcctgtctctggacttgtagctgctgattactttgctgcaggatacttcgtttgggcagtcctaattgctaacttggcacgcattggttatgaagaaaaaactatgtacatggctgcatatgattggagaatagcatttcagaacactgaggtgagggatcaaacactaagtcggataaaaagcaacatagaacttatggttgctactaatggtggaaataaggcagttattattccacattcaatgggggtcttgtacttcctacattttatgaaatgggttgaagcaccagctccaatgggtggtgggggaggaccagattggtgctccaaatatataaagcagttgtaaacattggtggaccatttttaggtgttcccaaggctatagcagggctattctcagctgaggcccgggatattgctgttgctaggacaatagctccaggatttttagataacgatctgtttcgcattcaaacattgcaacatgtaatgaagatgacccgtacttgggactcaacaatgtcaatgataccaagaggaggagatactatatggggtggtcttgattggtcaccagaagaaggctatcaccctagccagagaaagcatagcagtgacaatactcagttaacagaccaagaaacaaatcaaacaaatgttgtcaactatggaagaatgatatcatttggcagagatgtggccgaggcacactcccctgagattgagatggctgactttcggggtgccatcaagggtcgcagtattgcaaataccacttgtcgtgatgtgtggactgaataccatgaaatgggatttgaaggagtgagagcagttgctgaacataaagtttacacagctggctcagtcgttgacctccttcaatttgttgctccaaagatgatggctcgtggtagtgctcatttctcttatgaaattgctgacaatttggatgaccctaaatataatcactacaagtattggtcaaaccccttggaaacaaaattaccaaatgctcctgatatggaaatcttctctatgtatggagttggcttacctactgaaagatcttatatttacaagttaaggctcgttgccgagtgttacattccttttgaaattgacaccacgcaagatggtggaagtgatgaagatagttgtctgcaaggtggagtctacactgttgatggggatgagactgtgccagttctaagttcaggctacatgtgtgctaaaggctggcgcggaaaaacaagattcaacccgtctggtatgcgcacctacgttagagaatatgatcattctcctccagccaaccttctagagggaaggggcacacaaagtggtgctcatgttgacatcatgggaaactttgcattgattgaggatgttataagagtggctgctggagccaaaggagaagatctaggaggtgataaagtgtattctgatatcttcaagtggtctgagaaaatcaagttacccctatgaatgaagcccaatgtaattccgcagttccactcagacacacttctcttgaacccctttaaggatcagatcagactatatataattttttgcagtatattttcactgccaccagagttctatgagttgctggttctgctgatcaaagtccagttccatggaggggtgaactacgcgaattggttatattggaagagcttgcattgaacatttttgttattaaagtaaggattttatttgtcatctctaagaaacctgaccgggggcattattcttaataagttcagctgattagttatgatatggctgaggtgtacaacttaaagcatgtgtaggtaggtggtcttttcattttgtcattatgtgactatgtttagatgaataatttcaataaacacttataaaaaaatgatataatcttctgtgataaagt

SEQ ID NO: 125714 - DNA, 765 bp, Glycine max
  Clone ID: PAT_MRT3847_84529C.1
aaggtggagtctacactgttgatggggatgagactgtgccggttttaagttcaggcttcatgtgtgctaaaggttggcgcggaaaaacaagattcaacccatccggtatccgcacctacgttagagaatatgatcattctcctccagccaaccttctagagggaaggggcacacaaagtggtgctcacgttgacatcatgggaaattttgcattgattgaggatgttataagagtggctgctggagccaaaggagaagatctaggaggtgataaagtgtattctgatatcttcaagtggtctgagaaaatcaagttacccctatgaatgaagcccaatgcacttccacagttccactcagacacttctcttgaacccctttaaggatcagatcaggctatatataatttttgcagtatattttcactgccaccagagttctgtaagttgcacttattagaattgctggttctgctgatcaaattccagttccatggaggggtgaactatgcgaattggttatattgtaagagcttgtattgaacatttttgttattaaagtaaggatttgatttgtcatctctgagcaacctggccaggggcattattcttaataagttcagctggttagttacgatatagccgaggtacaacttaaagcatgtgtaggtaggtggtcttttcattttgtcattatgtgactatgtttagatgaaaaatttcataaacacttataaaaaaatgatataatcttctgtgataaagt

SEQ ID NO: 125715 - DNA, 622 bp, Glycine max
  Clone ID: PAT_MRT3847_8452C.1
aaatcaggatctgttaatgtccaagttgtacctggggagacaaatatgcaacgtggtggctaacgagggcacggaccgggtagagcgtcacgagactttgagtcagtggagggggagattggactcggccgggttcgacccggttcatctcgggtccaacgcgttcaagcaagcgagtatgctacttgctctattcgcaggcggtgacggctatagggttgaggagaataacggctgcctcatgcttggctggcacactcggccactcatcgctacctccgcctggaagcttccctccccgaacgacttgcactgtaaactgtagattaattggctcctggatgggtggtaaataataaaaaatggtttggttgaacttgttcgagtggagtgaatcaatgacccagtgagtcagtgagtcagtgagcgagccagcgaggcagcaagaggataaataaatgagagggtaaaaaaacaaaaaagtaaaaaagaaaaacaaaagactgtaatttgtaattgtgctctcgtaattaccgtttctcctctttagtgtttttttttcctttctctaaattattatataatttgtttaattcttaccccctgatgtccccctcttttt

SEQ ID NO: 125716 - DNA, 848 bp, Glycine max
  Clone ID: PAT_MRT3847_84530C.1
tttcttgcatgcactgcagtgttcaactactctaaagattttttgtcaagaacaggtgcaacagcaaggggtgcaagaactcaaacacgccataaaggatttcccaagcaggtggagcatgaaggagaatgctttgattatgttgtattaccagcagagtttggaacacaggaaccatttttattatgctattgattagggagcaggggcgtcgttgattacattgtatcaaataatgcaataattctactcgcactctcattcgtgtattataagcagagtaggattgaaatgcaggaaccctttgaagcagagaacttctgtgctggagcaggtgttgtgtggccgaaatgggggaggctaagagcacggttttggagacgcaagggacatcaagttaaaaggacaatcgcaaattggcaacaagttttttaaaattggaaataaagaaaactaaaactataaattaaaaaccaaaaattgtttctgttttggaaattttgaaacttgaaactaaaatccacttcaaatggggacttagttttttaggtgtttgtttcagctttttaaaagaatcagaagctagaatataaaatcttattaaaatccaaagctgttttgaataacttctcataaaatcaactgcttcttttaaaaaaaatgattcttatgattgttagattcgattctgctttttctaaaatctataaaaaaaaaaaaataatcactagattatttatattggaatcacttattttttaatcttaatcaaattgatccttaatcagtatggtctaaactctaaaaaggctaactaaaataaatgtttaaatgaactgatgacacat

SEQ ID NO: 125717 - DNA, 392 bp, Glycine max
  Clone ID: PAT_MRT3847_84531C.1
aggggggatttgaataacaaaattaaaccgccgatttgggagttttgaaatacaagccggggaggggacccagccctttttattacaattggggcccctttttttgtgaaaaaggttgcaactcccagcccagtcgaagcaaggaaagaaccttgcccccccacaaccttcaaacgtttggcttccaattccccttttcaaacgcgggggatttaatatcctccccagacgaccccttttgtttaagttcaccaaatttttcaacccacccacgttccttccctttaaaaaaacccttgggaggggcccccctttcccggtcaacaagttttttaacttccttaaaaaactccccgggcaggaaaactttttttttttaaaaaacacccttt

SEQ ID NO: 125718 - DNA, 623 bp, Glycine max
  Clone ID: PAT_MRT3847_84532C.1
cctcgtgccgaattcggcacgaggctcaaaacctatccccttataaaatgcaagctgaacaaatcaactacgctatctgcatcctcaaccctgatggtaattctggtgtctctggtatcgttaagttcatccaacctgctggtggcaaggtcctcgtcaacgcttccatcaagggtcttaaggctggtaaacacggtttccacatccacgaattcggaaacttgactgaaggctgcaagactgctggtgctcactacaacccacaaaagagaactcacggtggccccgaagataatgagagacatgtcggtgatatgggtaatgttgttgccgacgaaaccggtgaatcagctttgatctatgaggatgctttactccaattgtccggtgaattcagcattcttggtagatctgttgtttgccacgctgatgaagatgaccttggcagaggaaacttcgaagacagtaagactactggtcatgctggtgccagacttgcttgtggtgtcatcggtctctccaacgctttcgaatacaagaagatctaagcgaattttattgacaaattgaaatgattttagtatgtctgcataattttggatgatgatgatttatctatctca

SEQ ID NO: 125719 - DNA, 340 bp, Glycine max
  Clone ID: PAT_MRT3847_84533C.1
cccacgcgtccgaattctgaatttgcggtttttggatttggacttggtcgtcaacaccggctaattggtatcttttggctccttcgcttatgaatctttttcttcttcttcttcttgttcctgcaacgcacttaattcgatcaatcaatccatcttcaattcgcttcgtttcgatcggtggaaaatggcccatcagttatcgaagggagaggaattcgtgaaaaatgctgagatgaatctcagctgatggggctcgtttggctcctattatgcagatgccgccgatctcttcaataaaacctccaattgcttcaagctcgcctaatcatgggacaaggct

SEQ ID NO: 125720 - DNA, 361 bp, Glycine max
  unsure (1)..(361): unsure at all n locations
  Clone ID: PAT_MRT3847_84534C.1
tcggcggccgccctttttttttttttttttaataaaaattttaagattttacccaacaaaaaaaaaacanggggcaaggggaaatttttaaaccacaaacgcaaaaatacccaaacataccaccaaaaataaacaagtgtaacatacaacaataactttccctaataccacaacctttgctttgataacataaacatgctttaaaataaaacccacaccaagaacaaaacccaccacacccgcattacaaaaaaaccagacacaatttaatgattctacaaaaataaacaaaacaatcttgtgctcattcaaaaaaaaaaacgtctctataaatgaccaagaaaagtgaaccttctacaac

SEQ ID NO: 125721 - DNA, 1064 bp, Glycine max
  Clone ID: PAT_MRT3847_84535C.1
tgttccctcccagtcctgacgctgtcactgggcatgctggctttggcttagcatgggtgcatccaattgtttggtccagcccacatgcgccctcctctgcccggtgtgttttgtcgggcagtggatacgcaggggctgctcttgctgaattcggcataacgtggaagcatccaattgtttgggttagcccacatgcacctttataggcctgtaggttgccggtgggtggtcgccatgttgtgccttggtatgttaaggtatattatcatactttgcaattattagcttgatgaaaggctctcaagcactcacagattttgttgagattttgcgtgtttcgccttctgaagacaaagtatcacctggggtgatggagctggtcctccaatttccttgtgaaatgaagtcagctgtattgagtatagagtttgataagggctttttgcacattgatgaataccctccagatgctaatcaaggatttgacattccatcagcaataataagctttcctgacttccatgctggtttgcaattttctgataaatctcaaagcaagtcaccactattgtctaaattacaggaaaggagccctgttctctcttacacagaagttttacttgtacccttgacgactcctgatttcagtatgccatacaatgtcatcacaattacatgcacagtttttgccttgtattttggatctttgctaaatgttctccgaagacgagttggagaggaggaaagacttttgaaaaacaaagatgcaaacaaaacagtgttttttcgtcgagaactagctaaactatctgccaagcttagaggcagaccattggaattgactctgccctgtccatcatcatcttcgtcatcatcatcctttgttagtcctaaattgattcttagagtactactggttgcaggaattgccgttgtatggcaatactattcacaatgatatcttccaacttggtagttttacttgtactaaattctaattgcatatattttttgtacaaaacaaaccttccactgcccgatgtgcctgcgtgcattcatgactt

SEQ ID NO: 125722 - DNA, 493 bp, Glycine max
  Clone ID: PAT_MRT3847_84536C.1
agtaatagattcgggctcttgaggtccattatcaaacatgctcttaaagtcatccaccattttgccacccctaccaacttcttcatctctagcatctgaggagctaccattcttacccttgggtttggctgacgagcctccaaaagataaacccaagctgagctcaagcccactctcatcctccatattgtaatctctgagcctatcaaaattcaaagcagatcaaactatttgctcaccaaattttccatgcttactccctatttatcagcccacctttcaccataagtaaccatcctcaaatatctcacccctgaatcctgattcaagtcttccctctcattctgtttttttctctacaatttggaaactttagtgtcccaaagcgttccttgaagatttagaaaagatgggtaaggctccgatccgagatccaaagcttaccctgaaattgggaagagggacgatcaaaaccctagactctgtgaaaggg

SEQ ID NO: 125723 - DNA, 529 bp, Glycine max
  Clone ID: PAT_MRT3847_84537C.1
acttttaactcgcatgccccccttccttaacttggaattccggttgagggaaaattaccaagaaggtcttattaaaccccctggattccaaatcttttgtgaccttgaaagaactttgttcccgggggtggtgccacccggcggtccggatgctggtttggggaatgggggcattaaaaatggcccccaagacttcccttggattggagaaattggttggggtctttcaactgaaaaacttttggcaatgaaggcggccttccacccgccgttccagtggttcttggaagaaaaaggggcaagttacaccacccgcaattttcgccaacttttggttggattggggaccctctattaggattaaggggatgaaaaccatggtaaaattttaccaactggagctaatggtcttcatgaatccggcaaggggaaaaaaggccaccgtggaaaaatcattaagatccttacttccagaagccaaacttaacttggggcgacttttaaacggttccggaatggacatgggatt

SEQ ID NO: 125724 - DNA, 200 bp, Glycine max
  Clone ID: PAT_MRT3847_84538C.1
ggggaggagaaaaatactttgcgttagattaagtactgatcgaactttatttgggcggattgaacaataaaatcactgttcgggagaatatctgcacacagtacagaataacctaggctcttagttaagatggtacctaccctctcaaattaaaaatgaatgctgctccaatttaaatttttttattcactcctaactta

SEQ ID NO: 125725 - DNA, 310 bp, Glycine max
  unsure (1)..(310): unsure at all n locations
  Clone ID: PAT_MRT3847_84539C.1
cttctagttcgggttcttcgtcgcaaatgctaagtcagatctctctttgcttttgtttaggcctttcgcgacggcgtcgcagctaattttgaatgatcttaatgatttgcactaacgatcctacaacatcttgcatcgccggtcctgaacatgaagatatgtttcattggcaagcttcaacttatgaggtccttcagacagtccctatgctggatgtgctttactagngacacagaacaaacctccaaagtgtccctttaaggcacccaaaggtgcattcaggactaatgtggtgcacccaaatataaat

SEQ ID NO: 125726 - DNA, 3131 bp, Glycine max
  Clone ID: PAT_MRT3847_8453C.1
tttttgtttttttttttaaccaacaaaaattgttgtatgcctatattttattacaaaatgacaatcagtccaacactccagtctccagtcacacgcacataatgcatgtttactcccttcttttattttgaaaaatgtaaattatattaaatcaaaaatgatacaacaataaacaggacatacccgcagctagaaaaaaataaaagtctccctaatacaaaaaagggctagatcaagatacttaaacaaattccacaagttcgtttgtttttatatccgaaccatgacccagtggcggagaaattcatagtctaagaacataaaaaacagacaacaaacatcttaagttaaaatgattccgtgtcacgtttagcagccatcaaaccaccaaagcaaattacaatgtccagtgtgtgatctcttctcttcagccaaaggaagaaaacggttttgtgacatctacctcacaacaaaaaaaagcgtaggctcctctcttaaatcttcaaaccccttaccgcaccatccgctgccgccagctctcaacacgcttctatcggaaacggcccactcctgatgttgcacaggtttccgtttctctctttagattctccaatcactgataagtaaatgggtgcggttggttcctcaccgggtgtggatcacatgaactgccagaaggagctagaaaggtcccggtacagtcttgaatgggtgtccctcaaagcaagcatgaataacttcctcaacacgattcagtgcaaaggatgagctttggggtcaggatgattctctacggtaaacttctcgttggactctctctgctggggaacgggacttgatgcactactcttgtttcctctttgctcgtttttctctagctctctctcatttttctctttctcgtcttagtttaaacttcacaatccaattttcttttcctatgtacccaattccaaaatccaaatctagctaattctaattccattcttcaggagttgaattgaattcgtgatgaagagggaccacaaagatagctgcggcggcggcggcgccgccggagggactgtgaagggtgagtgttcctcaatgcagtcaaacgggaaggcgaagatgtgggaggaagagcaacagcagcagcagcagcaacaacagcaacaacaacaacaggggatggacgagttgctggcggcgttggggtacaaggttcgtgcttccgacatggctgacgtggcacagaagctggagcagttggagatggtcatgggttgtgcccaggaagacggaatttcccacctggcctccgacaccgttcattacgaccctacagatctctattcctgggtccaaagcatgttaaccgaactcaaccccgaacccaacaacaacctcgatccatcttctttcttgatcgacaacaacaacaacatcatcaacagcacagcccctgttttcaacgacgattccgaatatgacctcagagccattcctggcatagcagcctacccttcttctcttcctcaagacaaccacctcgacgaaatcgaaacggctaacaacatcaacaagcgcctcaagccatctccagcggaatcagcagactccgccgcgtctgagcccacgcgccatgtcgtcctcgttgaccatcaggaagccggcgtgcgtctcgtccacactctcctggcgtgcgcggaggccgttcagcaggagaatctcaagctcgcggacgcgctcgtcaagcacgtgggcatactcgcggcttcccaagccggcgccatgaggaaggttgcttcctacttcgcccaagccctggcgcgtagaatctacggaatcttccccgaagaaaccctcgattcctccttctccgacgttctccacatgcacttttacgagtcctgcccttatctcaaattcgcgcacttcaccgcgaatcaggctatcctcgaagcatttgccactgctgggagagtccacgtcatcgatttcggcctcaaacaagggatgcagtggcctgcactcatgcaagcccttgcattacggcccggcgggcccccgactttccgtttaaccggaatcgggcccccacagcccgacaacaccgacgcgctgcagcaggtgggctggaaattagcccaattggcccaaatcatcggcgtccagttcgaattccgcggcttcgtttgcaacagcctcgcggatctcgacccgaatatgctcgagatccgacccggggaagccgtggcggtgaattccgtcttcgaactccaccgcatgctcgcccggtccggatccgtcgacaaggtcttggacactgtcaagaaaattaatccccagatcgttaccatcgtggaacaagaagcgaaccacaacggaccgggttttctagaccggttcactgaagccttgcattactattccagtcttttcgactcgcttgagggttcgtcttcttcttcgaccgggttgggctcgccgagtcaggatctgttgatgtccgagttgtaccttgggagacagatttgcaacgtggtggcttacgagggcccggaccgggtcgagcggcacgagactttgactcagtggagggggagattggactcggccgggttcgacccggttcatctcgggtccaacgcattcaagcaagcgagtatgctacttgctctattcgcaggcggtgatgggtatagggttgaggagaataacggctgcctcatgcttggctggcacactaggccactcatcgctacctccgcttggaagcttccctcctccagcgagtctagtggcttgactcagtgaatgtaaaactatagattaattggacttgttccagtgaactgagtcagtgaccgagtcagtgagccttccaggcagcaagaggataaataaatgagagggtgaacaaaaaaaaaaaaaaaaagtaaaaagaaaacccaaagaaagactgtaatttgtaattgtgctctcataattaccgtttctcctctttagtgttttgttttcctttctctaaattattattattatataatttgtttaattcttcagtattatgatgtccttttcgttttaatctttatctttataatgtgttgttgtgacttctgagattgattaacttgaattaactc

SEQ ID NO: 125727 - DNA, 279 bp, Glycine max
  unsure (1)..(279): unsure at all n locations
  Clone ID: PAT_MRT3847_84540C.1
aagaaattagaaatatttattcattgtcaccaaatcttgttccctgcaaganaaagaaagaagggagagaangaaagttgttgggttgantggattggatttctaatctaatctatanctttcttttttcctatgcttttaaggcacaaacccttctttcttccctcttctnnnnnnnnnnnnnnnnnnnnnnntgcctttaccctttagggaaggaagaaggacnaactatannacnattanccttataatggtaatcaanggaattaaaccttttna

SEQ ID NO: 125728 - DNA, 251 bp, Glycine max
  unsure (1)..(251): unsure at all n locations
  Clone ID: PAT_MRT3847_84541C.1
gcaagttgagcagaggaaaaacaagcgaaaagagaaagannagaagaanaaatggtgggagnagangtagtacnaatggacgacanagcgnanangntgcgagatctgctanngagtttctactcccctganccttccatctccaacaacacctccataacacgcttctctcgacgacatcaattcnncttccntcgnncccgatcagtacntgnncatcctggnnnacnngtccaatttggaaggcntgc

SEQ ID NO: 125729 - DNA, 355 bp, Glycine max
  Clone ID: PAT_MRT3847_84542C.1
tcttatttttggtgacacctcctgtcatcctatgcaagtgaggcactgctacctgatgtacgaaaactctgtgacggatggacaccccgcacatgatttgatgatgtctgattttctatactccgaatcttcggtgcttcatttacaacctaaaccaactgtgggaactccatcatatattgctacataagtattgctgatgcaacagtatgatggctagactgcacatgtctggtcgtgtgaagtaacctctcttgcgatgcatctgttatcatattctttacaagatcctgatgatgcccatgatttgctgaatacactccacatggttctcggtgtgcagcattgcattcca

SEQ ID NO: 125730 - DNA, 465 bp, Glycine max
  Clone ID: PAT_MRT3847_84543C.1
cattttaaaaatgtttatacattgaatccgcgattggctcttctcttggaaaagtgaaaaccagaagtacgaacgaaagagaagagcgatttataagggagagaagatggggttgtggttcactaagctgttcagcaggttgtttgcgaagaaggaaatgaggattctgatggcaggtttctgatgcatggtggttagacaacctgtcttgtacatgctcaagcttggagaaatcgtaaccactatgccctccatgggatttaatgctgagactgtggagtccaggaacatgaggtatactgtgtgggatgttggtggtcaggacaagatccgtgcactgtggaggcattatttcgagaacactcagggtctcattcttgtggttgatagcagtgatcgagactgtgtggatgcggcatgggatgtgctgcacagaatgtggaatgaggatgcacttatagatgc

SEQ ID NO: 125731 - DNA, 380 bp, Glycine max
  Clone ID: PAT_MRT3847_84544C.1
cctgtatagcgggcgctacccacgcgttcgtacggttgctagaagacaacaaactgggggcatggtgacgggaggatataaatagatgggcttagggggacctgctttgaagtaacaaagattgggtgacgcattaggatgacatgtgcgccatgttgtctgcggagcgagaccaaatggtcttggatgtttctctggctgaattatgaatgataggttcttcggattattagcatgatatctgaggggggataaagatcgagacgtgcatcctccttactcccaatggaagacatttttaactctaaccatggggtctttttcagaataaataaactgggagccgaaatatgatgttgtgtcaacacaagatgaaaatt

SEQ ID NO: 125732 - DNA, 342 bp, Glycine max
  Clone ID: PAT_MRT3847_84545C.1
ggggaaccaacactttattttttttggtaccccaaattaagttactaaccccaaaaataccccatggggaaagggacaagaaaatatgactttgggaggtggggtataagtttttttaaaaaaaaaatacattatttttgggattgggccccaaggaatactataggggaaaaggaacaacttcccattttgcaaagaaacaacggggggagtggcttcaaggtcatgggttttgaaaactttcatgggctctgggtttaaaaaaggggggggggggaaaatggtgggtggggccccggggaaccgttggggggggggccctgggggggggcggggggtggg

SEQ ID NO: 125733 - DNA, 296 bp, Glycine max
  Clone ID: PAT_MRT3847_84546C.1
ggctcgagatcctatattctcttcttgaatcatcttgcttatgctgcctatcaaaatggacttattaggaccggagatcatagggccactcatttggttttcttgcttggattgagcatgacactatttgccggcgtccgaacccaagacgaaggtccatccacctatcatgctcctcgcacacccaaagcatcttcacctgccgtacagagatctgcgtcacctgttccctcttgacctccaccctgtgagtatgcgacaccaggtaccactcgccctccatccacactcaacta

SEQ ID NO: 125734 - DNA, 393 bp, Glycine max
  Clone ID: PAT_MRT3847_84547C.1
ctttaatttacgatttcccttaaaattattccttaagcgttaaaatgatacattaacttagggactaacttgatgaatattcaatattgtaggggataacttgaatagtatcatgaccttatgaattatctaggagagagagtaatagagagaggatgaaattggtgattaactcgtatatatacttctgtatattgagttgaaagtagggtatgcacataggagaattcaagggcctaagttaagccctcagattagacttgaatcttgacgagtgcccagagcttagagtaaatgatccttaaagtgaagcaaactacttaggtagcttttgaagtattacaaatcaaacaatgaagtccctttagtattaaataccctttaaattacccc

SEQ ID NO: 125735 - DNA, 603 bp, Glycine max
  unsure (1)..(603): unsure at all n locations
  Clone ID: PAT_MRT3847_84548C.1
cttctttagctttctctcgtcctacatcgaaaaaaatcatgggcagaaatctcttcatcagaggcgactggaaatgctatgggaccactgaggaggagaactaaaattggtactacttaaaatgaacctaaggaacctggacaagcatgtactggtaatttgtggagagcactgcttaagcgatacttccttaagtaaaaaggcgctgctccctgatatccatgtctcagcccacattgaagtcccagcaaagtggtgcttatactgtagaggtctttgctgaaacgctggtacctttgccaataacttggatcattattggatcactctcaacagaggccatttttgaatgaatgaaatgagtttgtcggagataaaggtgcctaagcgctttaacaaggccgtgaagccatagcatgcatagccgaaactcttaaacaacgtgaagctggtacaacaaccgctggcgatcctgaccaaacacatgcaattgccactaaaataatctattgcgacaatgtcattttgatctatgacccagatggttccattagaacaggaaaggctgctactaatgctcctgctcaanaggttcatgctgat

SEQ ID NO: 125736 - DNA, 463 bp, Glycine max
  Clone ID: PAT_MRT3847_84549C.1
ggaggagttattccatgaaactggtgcacgaaataatttgttttggattctttgatgttcaaaccatagaaaaaacgagtcacaagtatcattaatgtgttcgacatatttttaaaaaaatgcagcacatggatacttaaccatagttgcaagggttcaaatcatagttttttttcattttgggcttctattttgaggtgttattccatggaactggtgcacgatataattttttttggattctttgacgttcaaaccatggaaaaagtgtgtcactaatatcattaaagtgttggacataatttgaaaaaaatgcagaacatgaacacttaaatatagttgcagggtccaaatcatatttaatgatgtcgttacaggggtacttaaacatatttgatcccattatcacaacattttatacttcaatgaccaagacgatgactagtcccacaaggtggtggac

SEQ ID NO: 125737 - DNA, 336 bp, Glycine max
  Clone ID: PAT_MRT3847_8454C.1
ttcatctacttcaagaagatgaaataaactttcttaataatgcacaatcatatctttttgtgggacttatcttattcgcaagagggcaagtgtcataaattaaatgaaactatggtttgtacactctaaaaggaattcgtattttaacaagtttcttccattcaggatccaaatcaatgatcaaatggggcctcttttcttaatccttgatatttttttaaatatcaatatatatataaaaatatcaaggattaagaaaaaacgaccacatcggactttgaagttgctcttgtaggggtgagctgtgatttgaaatgtttactttgatcaattcaa

SEQ ID NO: 125738 - DNA, 119 bp, Glycine max
  unsure (1)..(119): unsure at all n locations
  Clone ID: PAT_MRT3847_84550C.1
ctcaattcgagcatatatccaaaatcccaaagggcaaacactttntttttacgatatggccatgcttctgatctatgcagccataacagcatcattgttctgcttcctatacttgtttc

SEQ ID NO: 125739 - DNA, 416 bp, Glycine max
  Clone ID: PAT_MRT3847_84551C.1
caagatgacaatagagtcatgataactgatggagtggtgcatatgatatcataaaatgtaagattgttttcacaatctctttacgaagattcagacaggtatgcaattttataaacggattattttattatcgttaatggatcagatgcttgtcttcataattcacttttaaacaagacttagttacatctcttaacataacttatgctttcaaaaaaaagttacacctcttaacaattgattcttgtagacatcaaatctgaaaacaaaattatattaaatgatgagcgcattagtttaatctgatgtgcgtgtttacaaaatttgcaattacaaaacttcatttgcattttaacaaactacggatgaatttcagggagcagaatttgctgctagggtattatgtagcttacacc

SEQ ID NO: 125740 - DNA, 439 bp, Glycine max
  Clone ID: PAT_MRT3847_84552C.1
tcgcaaaccaatctaaccatcaaatgttggctcacactgtggtaaaattgctgtacgcgtgttgcccttttgttgaacagcgcactaaaattggagaggggtttctaaaggtgaacttacattgcttatttctttgtgcgggggagaggaaagggtaggagagtttagttactctggaggattgcatgggttctactcatccattgggtaattttcagatgactgatttgagtgtgattttttttttctttactaaaagtgtccagcacctttcttctttgtttttttgcccaaggttagcctattcttataatttggatcatttattgtattcgggggcttgatatttaggagtggcttaaccgtgattcttttcgttccattgggcgtcaacaagattgtgtttttggtatgttaaacgaacctgctccggctttta

SEQ ID NO: 125741 - DNA, 1323 bp, Glycine max
  Clone ID: PAT_MRT3847_84553C.1
atggaaaactcctctttccctcgccgattcgccctcctcttcgccatctccttcaccctcattctctgcggccacatgatcaccgccaccaccgaaggattcgaagctcccctcgctcactcaactcctccaccgcctccgcccgctatccatgaacactcattcttctcccacaccgcgctccttcctccgatcttgtctcacctcggcttccaccagctcgcaacggcggcgccgtcgctctccgacaccgctaccactggttccgcagcctggaccggtccttccactatttttgctccctccgacgcctctctccgcacatgcttctcttgctccgttccgaacctccttcgcgaacacatcgttcccggcctcttcaccatcgattatctccggaaactcgctttcggcactaagatcgagaccttgagtccaggccattgcatcaccgtaacctccgatacgctccatcggaacacgaacaacaccgccgcgaaggtcttcgtcggaggcgtcgagatcacgcaaccggatctgttcaacaacggcatggtcgtggttcacggtcttcaaggcttcgtctctccgttatctccgttctcttgcgacgtggagagaatgaactcgctctcgtttccgttccatccagatcacccatccggtcacgctcggcatcatctccaccactccaacagccccacggcgcagcctgctgctatgatgcgcctgatgctccgagacgcgatgcttcgtctccgcaacaacggcttcagcatcctcgccctagcgatgaaggtgaagtacgcggaactcgtgacgctgaacaacatgaccgtgttcgccgtcgacgacctctccatcttctccggttcgcacgcatacatcagcaacgtcaggttccacatcgtgccaaaccattacctgtccatcgcggatctcgagaagcttccggtcggaattgctctgccgacgctggagcgaggccagtcgctgctcatcactacctcagggggaggagagaccttggcgccaatgaggattaactacgttagggttagggtttcggatgtgattcgcaacgtgaagatcgtggtgcatagtgtgtacttgccgtttccgcatattaatcctgtggctgccgcttatgacagtatcttaggcggcagtgaaggagcggagaatattccagattctgcagagcagacgacgcaagggacgtgctctgctgttgacggacgtggaagttgcgtcgtgcctcctatgcctgatcaggttcaggtcaagccaatggtggagatcgaagaccaccatggcctgtga

SEQ ID NO: 125742 - DNA, 764 bp, Glycine max
  Clone ID: PAT_MRT3847_84554C.1
gcaagcagttacttttcttttctgttttcaatcatggattcaagagtagttcaaagtgtagtgcatgagaacgatgaacattacccccacattgttgccttagagcaagtgacacacggtgcagaagaagaccactttgatcatgagaagaagtctgttctgaataaggtcaaggcaaaggctaagaaaattaatgacacgattaagaagcatggccatcaagtgcttgatcgtggtcatgagtataacaatgaagatcagcatacccttgatgatcatgacttagactacgatgatgaaagggctgaagacccacaagttcataaaacaccaattcacgaaagtgaagatgttaaaactgcaacacctacatctgagcaagtcgaaaatttggggaagtcaggaattgattctggaggcacaagaggtacaacagttatgggagaggaaccccgtcatgatgcactacttggaggtgtttcttcaactactgaaattgatcaaaacatagccactgactcggccaaaacattttctgtggaagaaaaggcagggccaccaaaggacaatttggagaagtcaataggcttggacttggaggaagagcctcacgctccaggaagtagacctgaggcatatccccctaccaattatcaaaccaaaatcactgatccaagtgtgataggaaaggatgaaatagaagaaatcacacccgttgaggaatcttttgcaaaaatgaatatgcatgatgagccaaaacctac

SEQ ID NO: 125743 - DNA, 275 bp, Glycine max
  unsure (1)..(275): unsure at all n locations
  Clone ID: PAT_MRT3847_84555C.1
ggatatttcagggnnagaggagcntgtnncaacnaaggttctgatnccnngtcctgcctgatgattcatnaaggngcntgctggtgctccantanntagttgtttnggggatgganacctaaactcaatgtncactatgaganggccgggtgcgaaaacgtcaatgatttgnctcgtgttnacttttaccaggtttnngngtnaggctccttccattatgagaagcaattaaggnttggggctgatatngagngtaggctctggatttnctagnt

SEQ ID NO: 125744 - DNA, 193 bp, Glycine max
  Clone ID: PAT_MRT3847_84556C.1
ggctcgagcaaacatttttggaaacgggctcactagtctgcttaatccagtgtgcggtgaaagatccacctttgaacttttagttcatgaagggcgtatcaacagcgcaatatccacctctctatatgctgtaatgacatctgcaactacatatcaaatgcagtctgaagttctgtgcctaaaagctgctggg

SEQ ID NO: 125745 - DNA, 525 bp, Glycine max
  Clone ID: PAT_MRT3847_84557C.1
tgcctacccgcccttcggttctgctggcgccatttggagagcttcgcgaaagggtggtactgaacataccacacgtggaattgcttacagctgggtcaacgcaggtgcgttctgcagcaactgggctggctgatgggtgtccatatctgtatgctatggtgcatgatagccaaacgtgaacactacgaggagattttggcattcgagttacagtggcaaccataaacaatgtgtgtgcatatgggctcaatcctggtatttcaggtgtctctgctgttgggcaccattcctcagtccatttcacagcaaactggttggaatcaaatggcaacagcgagaacaccattgaattttgatcctagcaagcagagcttttgtcaattttctattgaccttctcagtggaagaattttagtggacaaaactggagattggatcacacttatcaaaatactccaattagtaactcgttgagagttgcttgttggtagaaggctgctaatggtaagattggatgtctggaat

SEQ ID NO: 125746 - DNA, 359 bp, Glycine max
  Clone ID: PAT_MRT3847_84558C.1
aaaaaaccagaaaggcccactaaaaaagggggaaccccttttaaagggggttttctttggagggtccgaaaaccccgggggggttggcccatttgggatattggggtttcatggtcaaagggaaatttggtggagttgctaggaaagcatttggggggaacaaaaggggggtataatcccgggccgcccccaaggggaattttttttttttcccccggggaaaaaaaccacgatttccccaaatattcctggtttttgaatccccccccggttgaaagaccccccataaaaccccttaaattttgggtttccaccctctttgaaacccgggggcttaaacggggatttttttccccttt

SEQ ID NO: 125747 - DNA, 869 bp, Glycine max
  Clone ID: PAT_MRT3847_84559C.1
cccacgcgtccgggaagggggaaaaagagaggaagctgcatttatatcaaagagattgccaagactggataacttgaatggatctatgccgaatcatagcactaagaagttcaggcctattaaagcattaggaagctagaatgtcatgaaaagaggtaagggacccatcaactgctgcaatcaggatctgagtcaatgtagatcggggaagctcttgttcagaattagacgagctctatgtctaaatgaatgtgcaaagcacaatccaaaggtggatggagacactgaaaacaatgttgcggagtaactgtcggaagaactaaatcttcgggaaactgaagctttgaaaaatcagcatcgtgctgacatggctctgctggagtctaagaagattgcatctcagtatcaaaaagaagcggacaagtgtaattcaggaatggaaacatgcgaggaagccagggaaaaagccgagatggcgttagtggctcagaagaagcactctgcattgtgggaacagagagctcgtcagaaaggatggaatgaagggcttgccaaatctaagaaacagtctaaagggaaagtacacactgcttagacttggtgtggcctccatctagttattgcatactagtttcagcgaagtgatatttagtactggaagtagtaaatcatcatatatagttcatataattaaagtattcataaaatgtcaaaattgtaaaaagccaatagagatgtcattgtatttctaacctccatttttggtacttattacataagaaaatttttgtaagtttgtgacaaatttcttacaaaaattgtgttactagttttttaaagatctgcaagttagtgacaaatttctacat

SEQ ID NO: 125748 - DNA, 164 bp, Glycine max
  Clone ID: PAT_MRT3847_8455C.1
gacagcataaacaattaatacagatcactttgttgataaagatagtggtgcgaaaagtatgtttagttgttcttttcctatgattgcgttagatcatgacacatagaactcagcttcagcaaaagtgatcattcatcaatttataatgatgaggattattcaaa

SEQ ID NO: 125749 - DNA, 697 bp, Glycine max
  Clone ID: PAT_MRT3847_84560C.1
ggatcaccacagacaagatgcttctgattctcagaaattaacatgaagggcatggtggatttgaagtaaataaattcagctgtgtcttgattgatgagtttggaagcatttgcatttacatttggttgttgctctctatagccatttctgaagtacactatagtgtatgtgtgtgatagagagtgtcaagtttgaagattaagctacgaaggcttggcttgttgtcttagtaactaattcttaaagaaacagtggagaacaacaatgatagctctttacaagatcaagtcttttgaagatttagcaagttaagttttgcttgagctttgttgatcatcaattcaattctactagaccagtccacccaaatttgaaatcatggtggaagctactcaagctagtaaagataaccatgtggttgcatttgaagcccgttccacagaagactggttgttgcatgcacaggaacttgttcctgttgctcttgctaatgcaagggaggttaaggggtttcctggtaggtggaagatgatcatttcaaaattggagcagattccgtcacgtttatcggacttgtcaagccacccttgtttctccaagaatgctctttgcaaggagcaattgcaggctgtgtcaaagacacttagagaagccattgaattggctgacttgtgtgtgaaggagaagtacgagggat

SEQ ID NO: 125750 - DNA, 236 bp, Glycine max
  unsure (1)..(236): unsure at all n locations
  Clone ID: PAT_MRT3847_84561C.1
tcttccattggtccttaaancattcatcagtcatcaaccatggcnaagctagttttttnccnttggttttccggtttttcaagtgggtggnggnttcggnttcagtttccagaggagcaagccttcagcaaaanggtgccagntcccaaaaactcaatggccctcaaaacnggntaaccgtataagagtcagaanggngggnctantngagacntgggacccttaacaacaaggct

SEQ ID NO: 125751 - DNA, 327 bp, Glycine max
  unsure (1)..(327): unsure at all n locations
  Clone ID: PAT_MRT3847_84562C.1
tgnnnaacatcattatttagaattacgtttttancctttacaccggtcatttgcaccttctttaacacccatccttctcaaaactgaactatgcctattcattggtgccaacatctacccatgaaagggcatcacatttgttcgtggtgattctcacgttttcctgtttgcaaactcaaaatgtaagacgtatttccacaatcgcctgaatccttcaaagctcaccttgactgcaatgtacataaagcaacacaaaaaggacattgctcaataatcttttatgaataggatacgtgctgccaaaaagccttactctaagtccatttt

SEQ ID NO: 125752 - DNA, 1305 bp, Glycine max
  Clone ID: PAT_MRT3847_84563C.1
acggctgcgagaagacgacagaaggggatggtaattgatcatggtttgttgtatgtatgtatgcagatccagatgcagaagtggtgtccctctcgccgaagacgttgttggaatcggatcgttatgtgtgtgagatctgcaaccagggattccagagggaccagaaccttcagatgcataggaggaggcacaaggtgccatggaagctgttgaagagggaaactacagcggtggtgaagaagcgagtgtttgtatgcccggagcctagttgtttgcaccatgacccatgccatgctctgggtgatcttgtcggcataaagaagcatttcagaaggaaacacaacaatcacaagcaatgggtctgcgagagatgctccaaaggctatgcggtgcagtctgattacaaagcacatctcaaaacttgtggcacccgaggacactcttgcgattgtggccgcgttttctcaagggtggagagctttattgagcaccaagacgcgtgcaacgtagggaggctggggccagaaacacaatcacaggcacaggcagtgcaagcagctgcatgcttgtctcgaacagcttcaagcgaaaccaatttcagcactggttccccttggccacaaagcggtactataataattccaaatcccaccgttacggtagtagaaccctcctcatacaccattgtcactgccgaaaccaacaacaaagtccaccccaacctggagcttcagctctctaataccactcctactgcatcatcacaggaagaaagggttcatcaagagcagttgaggattgcgaaggcgaagaaagcgttggcggaagaggcaaggaagcaagccaagaggcaaatcgaactggccgaacttgagttcactaacgccaagaggataagacaagaagcgcttgcggaacttgacaaagcctatgccttcaaggaccatgcaatcaaacacatcaattcaatcatgcttcaaatcacttgccgagcttgcaagcaccattttcattcgccaaccgacgaccaaatcttctcctacataacacaagctcgccaagtacaaaaacatcgtctcaaacccattattaattaactcttaattagacgacatcgatcccttccttcttttactattactactatgtcaagtgagtgctatggttatgtacgtgtgggattaatagccagctagcgaggtggtggaaaaaatgtgggttattattaatgtaaatgtaaattagttgcagcttgtgccatgttatttaaatgcagactataatatgatgagcaggttttgctgg

SEQ ID NO: 125753 - DNA, 247 bp, Glycine max
  Clone ID: PAT_MRT3847_84564C.1
ggcgaatacatgattacttctcttgattcttgaaaaagcacattagcttttaattaacagttgctgcaggattgtttccttaatgttatcgcttagacaagactttgatccaacaaaaatacacagcatcaatcgtgctctgaacgctcaaatggaattttatccttataagaaaaaaacgaaaatgattgaaaaacagctatttgatttagaaaaaccaaagttggctgtcgatactttgcaacta

SEQ ID NO: 125754 - DNA, 685 bp, Glycine max
  unsure (1)..(685): unsure at all n locations
  Clone ID: PAT_MRT3847_84565C.1
gggaatagattatctccttccttggcaagcatgcgtggactctcatgaacgaatccacaaggtatgggttcaaatcctgcccccaaactatcttcataatggtcatatcttaaacgtcgacttaaaaaaatgagaattcttacacttggagatctattctgaaagttgttgatcctcttcgagaggcttttaagtttcgtgtggggcgtggtgatgtatcattttggtttgatttgtggtttcatgaaaaattcagtgcgacgaggttatgtttgtgcatattactatacctagttgaaactcattgatatgtatgtaaatgattcttggaactcatctactctctatattatggttccttcggaggtttaggaattagttcagaaattagtcttataagctcatttttttaaattttattttactcttagtttgttttattttttgttattcacttcatgaatttattttgataaataattttcttgttgttgagttctatttatctcttttcttccttttctattatttattgnatttattttctaacaagtacaggtaactctatgcaataaattagtataggattgttttgttttgaacttggatcctcatctannaanaattgaaatatgacananactaaacttatttattcatcatgcaacgntaggactactctatg

SEQ ID NO: 125755 - DNA, 462 bp, Glycine max
  unsure (1)..(462): unsure at all n locations
  Clone ID: PAT_MRT3847_84566C.1
tttcattgtttttcagctcattgcatgttatttgtcttccttatcttgtgtaggtggtcatgagcttagcagaactactggaaatgctggtgggagaggagcttgtggtaagtatagactgcaatattaaatgctgtcttttttgacattccttattaccctgcaaaatcaatttttgacgtggttgtgatgccacaattaaccttacaaagatctttatagagattatcaagtatcaactaaccattagtgtcagggtatacttttttgatgggtttgtggtaaccttgtacccaattaatatatattaatttgccgattaaaaaaaactctctagttctttcaattccttcatggtcgagattntattgttgcttatgttgacagtgtattgatatcctcttttttccgtttgttggtgtaggtatcattggtctgcaaggataaactaatcacatgaag

SEQ ID NO: 125756 - DNA, 387 bp, Glycine max
  Clone ID: PAT_MRT3847_84567C.1
ggctcgaggtggttccttcagacatactggtatcggtggtccttccgagaggcatcaagggagacaaaagttatgcacttcgttctgcctctaaaggacctgaccaacatccgctgcacttccaatacgccacatgctgccgtcaaagataccgactatacgcgcagacgctcttcgttggcaagtggagagaggcctaggaagaattcagaagctagacttgagctggaagatggctcaattcggcgagcacaatcgtttggtgcttcagggacccaagtgggcgaggttgatgacaatcataattgacagaggatcaagaaaatttgactgatgctaggtatgctgaccagcttgagctcatgacaaacccacatattgggaata

SEQ ID NO: 125757 - DNA, 193 bp, Glycine max
  Clone ID: PAT_MRT3847_84568C.1
ggctcgaggcggcgcacagaacccgttgaaggcttgaagtctcaccccgacgccgtcgaaggtaagttaccttctttattgttttccaaacgtttttccgaagtcttctagcactggtagaagagataaaaacaagtgttctgcgtttgcgttgcttaaaccttagaaagagtttgattttgacgttctcgac

SEQ ID NO: 125758 - DNA, 361 bp, Glycine max
  Clone ID: PAT_MRT3847_84569C.1
accacaaaaactcaaaagtgacttaattgagagaattacatataccaatatacacaatctagaaaagtatcttaacacactgcagtatatactacatacatatcgaagaagaagctgaacaaacacaatcagcaccaatccactgataaataatctataatagacaaaagaaacttgaacaaaaaccatgccacttgataagcatatactttcctccgatcttctttataagaaacaaatgacagtataaaatagactgtcatttatttcttatagaatggataggaggaaatattacaaatcaaatacatcaaacattgtttaagattgaagaagaccctttgtctttcctattggcgat

SEQ ID NO: 125759 - DNA, 298 bp, Glycine max
  unsure (1)..(298): unsure at all n locations
  Clone ID: PAT_MRT3847_8456C.1
gtggttagcaagatgaacaaagatgcgcagatgagagcagcgattaaccaaannttaatagaaactggagaaagagaacgcntcaaagagttgctgagagctanattaattgagtgcggctggaaggatcagttgaaggcacactgtaaagaggtaattnaagaaaaaggactagaacacgttactgttncatgacttggtggctgaaatcactccaaaaggcagagccctggtacctgacagtgtaaagnaggagctcctacagagaatcagaacttccttgntcagcatgccagtc

SEQ ID NO: 125760 - DNA, 298 bp, Glycine max
  Clone ID: PAT_MRT3847_84570C.1
ataaaaacaaaaattcatttaaggaaacagagggggggaaaaaaacgggaatcacgggccatacccttgttgtataaagaaaaaaaattgcataattggcttttggaaggggaaaaaaaaaagggggaaaaaaaaacccggagaacacaaaatctccaagggttataaattaggccccacaagggggagcaaaaacaaaatttacggggggtgtccattttattgggaactaaaaaaccctttgctaattatgcccggggcttcaatatatcgacctccccccctagagatgcaactg

SEQ ID NO: 125761 - DNA, 276 bp, Glycine max
  Clone ID: PAT_MRT3847_84571C.1
aagttctctccattgtcgatgaacactcatcaccatggccacagcctgtacattccctttgcaatccttctgattacagtggctgcttcgctctgagactgcaggcacagcatgatgagtgccagatccagaagctgaatgccctcaaacggataaccgtatacagtcggaaggtgggttcattgagacctggaaccctaacaacaagccagtccagtctgccggtgttgcactctctcgctgcacccttaaccgcaatgcccttcgtagaccttc

SEQ ID NO: 125762 - DNA, 460 bp, Glycine max
  unsure (1)..(460): unsure at all n locations
  Clone ID: PAT_MRT3847_84572C.1
ggatattnnnnnggccattaccttgtcatacacattccttaacgtactcattagcggccacannagcagcacgtacanncgcacttacagtcacaattagcgcttaccatcattggcatcatctgttacaacatccatgacnncnctcttgacataatttttctcnncctctacaatgacaccatagctgcatccattgttgcaactacacttgcaagtgcagcatgagttgcagaaggtggtctacaaggaagaatgcgaggaacaaagcatgaccctaggattgagcttaagattttgaactcaatttctggccgaagtcctatacactgggtgaaccactnnctctacagcggccgacacccagctgtagctccatctattgatgcctttatggaggcttaattgagcgctgggcgtanctatggccatagctgaatcctgagccaaacagatatcc

SEQ ID NO: 125763 - DNA, 390 bp, Glycine max
  Clone ID: PAT_MRT3847_84573C.1
agaaactcaacacaacccaaggccgggagacccattttttttctgtatctcgacggaacactggatctactctgactcgccaacagacacgactgcgagcaccacgaagactacgactccgcacacgcaccctacgtgcaaacaacaccttcacagagtggagaataccgttacgcctgtgacgaacacacccagtactgtgtcacgaagcctgcggatgaccgcatccatggctcaacaagggcatgcatgagccacggccgctacaataggtatgcataatgaacagagagtatgactaccgatacaattgaacaggacaaacggtgatacatgcgtaggactcacacatgcacaggttgagggtggagccagaagattgaagttata

SEQ ID NO: 125764 - DNA, 356 bp, Glycine max
  Clone ID: PAT_MRT3847_84574C.1
cacaactcggggagttgttgttgtggttcatcttcctcctctattcactggcacttgatagatccctctctcacagcttccattcgcaatccagtttctctttgatcgatgcctttgctggtttttctttttctctttgttttctttctcagctgagaaactgcagtgtggagctgtgattttgctttttctcgttttcactgagacttctgcttttcgtttctcttatcgctgaattgaaattcaagcttcggtgtggattttgtgctagttgctgttgtgtctgcatgtttgtgtgtttctggatttttattggccagagattgtgaaacaagttcatgcaagtgatttgaaaa

SEQ ID NO: 125765 - DNA, 267 bp, Glycine max
  Clone ID: PAT_MRT3847_84575C.1
agcttcaatccataatttttttacggggcggggcgttattggtttaaatagacaccaaaattatcccatattcaaactataatccccatgtccatgacatgacaaaataagctacttactagcacatcaaagcttgatcacaaaagagatcgatttttttttttttaaaccctgttttatttataattttgtccctattaacatttgatatagaccgattccactgcaacccttgactacttttgaaaatagactatttgaattttt

SEQ ID NO: 125766 - DNA, 160 bp, Glycine max
  Clone ID: PAT_MRT3847_84576C.1
cggacgcgtggggtgaatgtagctggtcaaggcggttatgtctttcattacattggctcttgcacatttttcttcggcagaatttggttccctaccgaagatttgtttctctttggcagaatttgtttccaactaattgtgagtactaggtaccatatcc

SEQ ID NO: 125767 - DNA, 327 bp, Glycine max
  unsure (1)..(327): unsure at all n locations
  Clone ID: PAT_MRT3847_84577C.1
tcgcangcncgcgtacgnnngcncngnagtcngctcgagantcaagctgtctnnnacatctctcnctcccntcacacntgatatctattgatnnacntnnatggntanncgtatcagggttngacccaattgcngcaanaagcnatcgaangaaggtagnncgtggnctgntcctcngttatnatcttcctccannggcacggnnnccaaganccangtgtcagggnatatgnntaggtttnntcnagagtntagggnngtngtgncccccattnntntgnnncngatgaantccgntgnntnnngccatncgagttacggnccccn

SEQ ID NO: 125768 - DNA, 473 bp, Glycine max
  Clone ID: PAT_MRT3847_84578C.1
ccacgcgtccgaacacacatacatagtgttatgacttttagtatcggaaatagttcttttgagtcaaggcaaatcttaaagggaaaatgtgtaggtttaatgtgcatggcgtgcatgatgtgcaccaatgatggtgcaagcagggtcatgctttgatgtttctgacaacctactacagctcctatattacctgttgcagggtggcatatttccaaactctgactttacctgattgaagaacattatagggtctgccagctgacctttgtcatcttccgctgctatgttttacaagctgataataactatggcatgaacgacgaatacgctcacgcactcaccaaccgctgtaatgtgatccactcctgtataagatcaaacgatccaccaactgcgactccatcaagctgtaatagtacgactacctctgacaatttacttcgagcttattgaggcatcggctgctgcaacac

SEQ ID NO: 125769 - DNA, 1043 bp, Glycine max
  Clone ID: PAT_MRT3847_84579C.1
ccacgcgtccgccctgatggacccttctgctcatcactcttcttctggtgacctgtttttgcattccagcgaattttttggcttcttaactggtcatcggcgcaacttaagtgattttcctagcgaccatccaccttttttggctctcttgaccctatctacagaaccccaaaacgatttcctaggcatgccaaacagcttcatgcaggatgtgttcctggtgtttgagattgatgttcaagccacgcttctggcgtggtggttgcccatctcagtgcacctatccccagagtctcgtctcaacccatgcacgtttgctggtactcgttatccagatctgatttctgttgctgatatctagtgattttttgtcactgtttgccttcattttctctcatgacattggcttccattagccctatctttgtcccaattgcactagccccatctttttcctagatacattagcccctgtctttgttccaaatgcactgaccctatctatgtcccaggtgcaatagttcccgactatgtcccagatgcattggtctcgtttctactccagaagcagtagacttagtttcaagtttaaataatttggatctcctatattatttgtttgaagattccgaatgtggtttcaagaagaacagaccttgctttgcttaccatgaattttctttcgcagatggtcattccagcgatttggcaaagatattttttgtagcaattctctctggcttctccagcaaccctgagttgcttctcaaactattgtttttttggtggagttcaatttttttgttttccactttgttaggaataaattattttcttgtaacaagttgagagcttagtaagctttagattgagggggagtgttgaaaatcagaatataatattctgattctattaataatgttggtttataggcacataatctttgatttagaggaaacatgatatcctctattaatgtataattaatgtaatcaacctatataaacacgcattcgctgtgtattcaaacacggtcttcattc

SEQ ID NO: 125770 - DNA, 328 bp, Glycine max
  Clone ID: PAT_MRT3847_8457C.1
gaggtccacacaccttgtctgttacattggtccaactctgcttgatgcatttgaccatattagtgagccctacatgctctctgacaagcccctgaggcttaccctacaggatgtttacaagattggaggtattggaactgtgccaattgtacgatgtgataccggtgtttttgaatattgaatgtcgttgactctttcatcaactgtactgacagctgtctgtaattttgtatagatgctccatgagtctcttacacaggcacatactgatgacattgtggtatctaatgttaagaatgttgctgctaacgatctcaagttaggttat

SEQ ID NO: 125771 - DNA, 490 bp, Glycine max
  Clone ID: PAT_MRT3847_84580C.1
gggaggaggatgttgccgattgaaagttgggaagactaaatatactacagcttccataattacttatacagcaacctacaaggatgaatgatgaactttgaacattaaagaaacttaatctttgcttatagccagctccctttgtccatgacttgcttgaaatactttagtcctgaccgcgcacctattggacaggacggggctggaggtgtattttatgaaggaggtgggtcgggatggctaggcctttaaaggaagcacccgtacgattgcaagctgaattgccgaaataacggggaaaggcggcgtccgcggtggttcctgagagcacaacccggtactccctgatggggagcagagcgttggggccaattatgggccaagaggcaaacggaccaggtgtacatattctgcgatcgtttggacgactctgctgtttgtccagccctttccgtggagtgagccctgatcatggcagatttggggaggg

SEQ ID NO: 125772 - DNA, 418 bp, Glycine max
  unsure (1)..(418): unsure at all n locations
  Clone ID: PAT_MRT3847_84581C.1
gggagtgggaaagccttgttctccggttggttgctcgagtttcatggtccttgggtttctagaagtagtattctcctcagggagggagcaaaaaacattccggggggatgctgaaccatttggctaccgtactctagccaaaccttacaaggtgccctcccaaaaagggggtggggagccccgaagacaaccacaaacggaaaaaagccccgaagaccgggggggacaagaaccaaagctgcaccagcccganccgggagggacagncgagaagaacacnaccaaaacacacaaaaaacgggggcccgcaagcgagaccgacacgcaacaacccacaaggccccccaacgcgggcaaaggaaaaacacaggcaaggcccgaagaccggcaaaacaaagggccgacaggagcggccacc

SEQ ID NO: 125773 - DNA, 745 bp, Glycine max
  Clone ID: PAT_MRT3847_84582C.1
ccacgcgtctcattcacaacacaaacacattcaacaacatggtagcaattctcaagagacagggagaaaacgaatccgaagaaaccatcataggcttggcaaaaagtctcatgcaactctcgcgtgtccaacaacaaagcaataagcctcttctcaaaaccttttctccaacggagttcgagtgcaaaacctgtaaccgcaagttttcatcttttcaagctcttggtggccacagggctagccacaagaagcccaagttcgaagctgaagaactcaaagaagaagccaagaagactaaacccaaaatgcacgagtgttcaatttgtggcatggaattctctctgggccaggcactggggggtcacatgagaaaacacagaggtgccattagtgagaacgacaataataatgaagcgttgtcttctataaagcaagcaattgcaaaagctccggttttgaaacgatcgaatagcaagagggtcatgtgcttggagatggacctgaatttgacgcctttggagaatgacttgaagttgttgttcggaaacaaggctcctagagtcgatctttctttgtagaggattaattaattattcctgtatctttcgattcattatattgtttaaaaaattagtcattgacttctttcagttcttcgtgtagatcgattaattttggaattgatttcgttgtatagttgattgattgattaaataggaatattgatggttgatcggagtttcgt

SEQ ID NO: 125774 - DNA, 713 bp, Glycine max
  Clone ID: PAT_MRT3847_84583C.1
cattcacaacacaacacaaccaaatccaacatggtagccattctgaagagacaaagagaaaccgaagccgaggagagcatcataagactggcagaaagtctcatgcaactgtcgcgagtccaacaaaaaagcaagcctcttctcaaaaccttttctccaacggagttcgagtgcaaaacctgtaaccgcaagtttccatcttttcaagcccttggtggtcacagggcgagccacaagaagcccaagttcgaaggtgaagaactcaaagaggaggccaagaagggtctgagtttggggaacaaacccaaaatgcacgagtgttccatttgcggcatggaattctctctgggtcaggcactggggggtcacatgagaaaacacaggggtgccaccagtgagaataataacgaagcgttttcttcttctataaagcaagcaatttcaaaagttccagttttgaaacgatcgaatagcaagagggtcatgtgcttggagatggacctgaatttaacgcctttggaaaatgacttgaagttgttgttcggaaacaaggctcctagagtcgatctttctttgtagaggattattaattaattcctgtattctttggattcattactattgtttaaaaaattgtcattgacttctttcagttcttcgtgtagatcgattagttttggaattgatttcgttgtatagttgattgattgatt

SEQ ID NO: 125775 - DNA, 247 bp, Glycine max
  Clone ID: PAT_MRT3847_84584C.1
agctccaattggctcggcctggtcatacgctttttcttcagtttctaagacccgctccgggggtgcggggacctttaggtgcaccttgttcctcacaaaggaaagagaatatgtgcgagtgtgatagtgatagctgaatgctactgttaaaggaggaaaaggactttgctaaaccgcattttttttggtcctttggaaaaaagcttttgataaaaaaaaggataaacccaactttaactcaataatg

SEQ ID NO: 125776 - DNA, 394 bp, Glycine max
  unsure (1)..(394): unsure at all n locations
  Clone ID: PAT_MRT3847_84585C.1
gcgagaagacgacagaagggccatttaatagatgcaaacaacatgctcaaaggttttacatttgattcctcctagtaatttttttgttgataatataataataaaaaaaattgtcatatactcacaattatttgacgttaaccaagagcaccaactcaataacaaagatctagcacaccatccaaaatgtgtcaatttggcaggaaagctgtttaacaaaagaaatgacagaccctatacaacttttttaaccgagtatccagaagtttggatacaattntaaaaatattttcaataagaaaaatatgtataaactcacccatatgtggacttcctttttgggcaccagggaaataaaagaaggcanaacgtcatttgggagcttagcaagcat

SEQ ID NO: 125777 - DNA, 395 bp, Glycine max
  Clone ID: PAT_MRT3847_84586C.1
gaagcaacactggcaagatctggttaattcatgcccaaagcctttatgattcatacctacagaggcgaccattttactttttctgtgtacaataattgatatctatctccatatataaggccttctcgctgaacttcagcctattgtaataataaactagcaaggcgatataagtatacatgcatattgaaaaacaattacgaaacggactcgggcccactaaccttaccactgaagagcctactacattttgaggagtaccatcctatttgaagtcattcatttcaacacaggccatccatttcagctgaacgcacttagactaacaaccttatgcttttcatttaaacatatctattgccctgaaatggttattccatacagtgtcccaatac

SEQ ID NO: 125778 - DNA, 242 bp, Glycine max
  unsure (1)..(242): unsure at all n locations
  Clone ID: PAT_MRT3847_84587C.1
catcaacgancgtnaaactggaagatccaganggtttggntttgtgaccttcnccacagagcangcgatnagagacgcaattnaaggaatnaacngccagaacctcnacngtcgtaatataaccgtgaacnaggctcaatcccgtggaaaannnnnnnnnnnnnnnnnnnnnnntacngangagntngcaagtggttacggtggcggcggaggttacagccgcggtggaggaggatatggtg

SEQ ID NO: 125779 - DNA, 227 bp, Glycine max
  Clone ID: PAT_MRT3847_84588C.1
cgaccgacacgtgcagaattaggcacaggccagcgttctaaccgattttccttatgctccatacggtgtctgctgcgattagggggccttcatctcaacgagtgccatgctatatgatataaccagactcatgctcctattacgagatcaatcctcaccttgagtctttaacaacagctcattatttgcattacgcgcttgatttttctggaactactgcaatattc

SEQ ID NO: 125780 - DNA, 182 bp, Glycine max
  Clone ID: PAT_MRT3847_84589C.1
ctttcgcgttttgtcaccgctccctgcgctggccagagacgttgagaatcatttgcgcttccatacacagctcattagctgaacactttactgttgatactggcgtacgtggcagaaacaaacgccttctgctcctctatcaacgccatgactgataacctgtacaagccggagaaagcttg

SEQ ID NO: 125781 - DNA, 306 bp, Glycine max
  Clone ID: PAT_MRT3847_8458C.1
atggcaaatgtaaggctttttattaatttcttgctttctatttgcaactatgagactgagaaggcttttcttgttgcatgccatcatcaggttgtggaagtgaaagtcggtttgcactgtgatgattgtatcaagaaaatcctcaaggccatcaagaaaattgaagatattgaaacttataacgtggacacaaagctgaacaaggtcattgttacgggaaacgtgacaacagatcaagtgatcaaagtccttcaaaaaattggcaagaatgcaactgccggggaagatactcaaaccaataagtga

SEQ ID NO: 125782 - DNA, 910 bp, Glycine max
  Clone ID: PAT_MRT3847_84590C.1
ctcggctgcgagaatacgacagaaggggatccggatctcaaactaaacagcacaacacttttgcacaagcaattgcatcaaaccaacgttgaatagtgtctcacctctctttttacgtttaatctttctcacagaggttctcctcttcttcaatcaagagaagaaagaacacaccctaagatgtgttggaatgatcattacccatagctgactaggctgcgtcctagcaaatatcgtcgggctgcatggataggcctttatgttctcatccttgccttctcacctggcatgggaactgttccatgggttgttgacacagagatcaatcccttgaggtacagaggggtttgtggaggaatagcatcgaagactgtttggatttccaacctcattgtgcctgagtccttcttgtccctagcaaaagctctagggacagcatggacattcatgatgtttggaattgtggccattgtggcaatcttctttgtcattatttttgtgcctgagaccaaaggggttcctatggaggaagtggagaagatgctagaacaaagatctgtgcagttcaagttttgggagaagagagattctggctctgagaagcattgactcaaagaacaaaaaaaaaagcaaaattgtttgagtcatttttattagttttatagcttaaaatagtgaaattaagtggcttgtgaagttatggttatttgatgacaatgattgttctctctgggtaagatttggtgatagttagcattttagctctaatgtgtatgtagttgtctagatgattagttggattgatgaaaatccttatgaaattccttagaggattggaatatgagaattggtaataagctcttatttgtgatataatgaagaaaaaaagtgtatcaagaatttgatcttc

SEQ ID NO: 125783 - DNA, 394 bp, Glycine max
  Clone ID: PAT_MRT3847_84591C.1
gaaacgttcaagatccagtcgtacattttcaattaaatgttaaaaagggtatatgcctatatacatcactggatgacacatcaaaagaattctacgaataaggtcgcttccttacaaacctaagagactcagcttacaattttgcacgctcctatgtacaaatgtgcctgcttttattatgtcataatgcatgcccttaccaccaattgtaacatgttattagtcacgtgttatataccaaggcccaggaacactatctggaattgtggctcgccaaaatcaaagcacccctaatgttcacttccttatcaaccggaatacctgccgcaactttcatgagaggcatttttgcgaatttcctacaacggagaccagttccaacaagcacaacacc

SEQ ID NO: 125784 - DNA, 2316 bp, Glycine max
  Clone ID: PAT_MRT3847_84592C.1
tacggctgcgagaagacgacagaaggggatccgtatctcaaactacacaacacaccacttttgcacaagcaattgcaacaaaccaacgttgaatagtgtctctctctttttctttttcttatttttctctcatagtgtctctctttttctttctcttatttttctctcatagtgtctctcttgttcttcaatcaagagaagaaagaatacaccctgaagccatggaaggtggtgtgccagaagctgatatgtctgccttcagagaatgtttgtctctatcatggaagaatccttatgttcttcgccttgctttctctgctggaattggaggccttctctttggttatgacactggagttatttctggggctcttttgtatatcaaagatgaattcaaagcagttgataggaagacttggctacaggaagccatagtgagtactgcaatagctggagcaatcataggagcttcagttggaggatggatcaacgatcgatttggaagaaagaaaggaattgttatagcagataccctcttttttatagggtctgtcatcatggcggctgcttcaagcccagcaattctcatcgtgggtcgtgtatttgttggcattggtgtcggtatggcttcaatggcatcacccctctacatttcagaggcttctccaacaagagtaagaggggcccttgtgagccttaacagttttctcatcactggaggacagttcctttcctacctcatcaacttggccttcaccaaggcaccagggacatggaggtggatgttaggggtagcagcagtgccagctttgttacaaattgtactaatgttgacactcccagaatcgcctcgttggctttaccgcaagggtaaggaagaggaagcaaaatcgattctgaaaaagatttatccaccacatgaagttgaaggcgaaattcaggccttgaaagaatcagttgacatggaaattaaggaagcagaatcatcagagaagatcaacatagtcaaacttttaagaacttcagctgtgagaagaggtttatatgctggtgtgggcctcttaatcttccagcagtttgtgggaatcaacactgtgatgtattatagtcccaccattgttcagttggctggttttgcatctaacaggacagcattgcttctgtcactcatcacagctggcctcaatgcatttggttcaattctgagcatttacttcattgacaagactgggaggaaaaagcttgctctaatcagtttgtgtggtgttgtgttctcccttgctctcctaaccgccgcttttcgcgaaagcgaaatccactcaccaatggttagtgccattcaatcctctcaattcaacaacaacaacacctgccctgattacaaaacagctttgaactctgctgaatggacttgcatgacatgcctaaaggcttcaccatcttgtggttattgtgctgctgatgacaagcttttacccggggcatgtttgatagccaatgttgacacaaagaagatgtgtggcaatgaccatagggcatggtacactacggggtgtcctagcaaatatggttgggctgccctaataggccttgctctatacatcatattcttctcacccggcatgggaactgttccatgggttgtgaactctgagatctaccccttgaggtacagaggggtgtgcggaggaatagcatccacgactgtttggatttccaacctcattgttgctgagtccttcttgtccctcacagaagctatagggacagcatggacattcatgctgtttggaattgtggccattgtggcaatcttctttgtcattgtttttgtgcctgagaccaaaggggtttctatggaggaagtggagaagatgctggaacaaagatctgtgcagttcaagttttgggagaagagagattctggctctgagaagcactgactcaaagaacaataaaaagaaaaaagcaaaattgtttgagtcatgttttagtttttatagcttaaaatgttgaaattaagtggcttgtgaagttatggttatttgatgacaatggttgttctctttgggtaagatttggtgatagttagcattttagctctaatgagtatgtagctctctagctgattagttggattgctggaaatccttagaggattgaaatatgtggattggtaatacgctattatttatgatataatgaacaagaaaatactaaattattatcaattgctttaaaaaaaaaaaaaaaaaaaccctcgtgccgaattccaatcaaaaaaaaaaaaaaaagaggacgtaaggccggccgccg

SEQ ID NO: 125785 - DNA, 793 bp, Glycine max
  unsure (1)..(793): unsure at all n locations
  Clone ID: PAT_MRT3847_84593C.1
cacgcgtccggtcaagctactcaaaaactctgaccctagtggactatggtgtatcttgggagactttatcagcattagagatccagttgagagactaagtgtgtcttagagggtggtggacgacaataccattagtgagttcaatgactgggttgcggacttagaagtagaagaagtacagtgtgtggggagaaaattcacatggtatagacccaatggggcagcaaagaacaaattggatagattctttgtctccgatgcatggatatctaaatggcctggaagtacatccttcatcctgaatagaaacttctcggatcactgccccgtcttgcttagatccagaattgttgattggggtccccaacccttcaaggttctcgattgttggctgaatgacaaaactttcgaaaacctagtcaaagggagctggacaaacttacaaataagggggtggggggatactcattgaaagaaaaaattaagaaactcaaggaaaggatgaagcagtggaacaaacagcagttcgtagacacatttaataaggtacaacagatcgagtatgatctcaacaagttggaagcaggcagcaacggtagacagctgtctacacaagaactggcaatacgtgaaaagttgcaggaggatctttggacagcggcacagtcgcatgaatccctgatgagacaaaaggcatagtcaaaatggatcagagaaggggattgcaattcacgttacttncacatgctcatgaattctaccgncggagtagtgcagtcaatggaatgctcat

SEQ ID NO: 125786 - DNA, 364 bp, Glycine max
  Clone ID: PAT_MRT3847_84594C.1
aaatcaaaggggtgataatcatgagcaaagcaactttcaattgtacaaacattatatcgcgcacacgcatacatgctcattgctaagaacgctcacagcaccatgaaactgctgccagattccaactgattgaacaaagatgaatgacttgtgaaagtgggtttgtggatacaagagactaaaatatccattgtctacaattgcaacctggaaaggctctccttcacaacggactcgtgaagagcttgattaaaaaccatggcttgctgacaaacatgctgtggagcgcctgcacaaggttaaagcggaatgatgcacggagaaattcccggcgctctacacgcgtggttgcctgtagttaaaa

SEQ ID NO: 125787 - DNA, 335 bp, Glycine max
  unsure (1)..(335): unsure at all n locations
  Clone ID: PAT_MRT3847_84595C.1
tcnattnactggnccttgctctnacacgcgncagtanangacncnagnnanntnaacgcgtcganncatacagttttaggnnnctngnttgtgtacnacnctnagnannccnnaacnagncnaccgtcgngctnnngncnnactnnccnnntgtgagtngctnatnaannnncactnatnnatgannnttgncaatcngacgncatgatccatnntttcgtatngnccgtnctcagcntcngagtcnnntgtgctntcncnatagagncncnnatnaccgnngagggnattncnnntgngcncagnccaangntngtagnnattnncnnnttnnn

SEQ ID NO: 125788 - DNA, 1975 bp, Glycine max
  Clone ID: PAT_MRT3847_84596C.1
ttgattcatttccattaaaagagagaaaaaaaataaaaagaaattttacaaaaatgccttcctcttccaccaccatagtctccaaatgcgtgatccaccccgaccagaaatcaaacatgaaacccttgagactctctgtttctgaccttccaatgttgtcatgtcactacatccaaaagggcgtgttactcaccgccccgccctcctcttttgacgacttaatactttcttttaaacacactctttctatcgcgctctctcactttcccgctctcgcgggaaggtttgagaccgattccaacggttacgttaatattgtatgcaacgacgctggcgttgattttattcatgctaaagcaaaacacctaactttaaacgccgtcgtttcgccgtccctcgttgatgttcacccttgcttcaaggaggagttttttgcttacgacatgactatctcctacgccggccacaacacacccctcgccgccgtccaggtgacggaactcgccgacggagttttcgtcggctgcaccgtcaaccactccgtcaccgacggcacctcgttttggcacttcttcaacacctttgccgccgtcaccaaaggcggcgccgccaaaaaagtcctccgagcaccggactttactcgcgacaccgtcttcaactccgccgccgtcctcaccgtcccctccggcggccccgccgtcacgtttgacgtaaaccggccactccgggaacgcgtcttccacttctcccgcgaagcaattcagaaactcaagcaaagagccaacaacaccgtcaacaacgaactaacggaagttatgggaaaacaagtaaacgacggttggaaaatcgttaacggtaacggaaaaattaacggtaacggaagaaacgagatctcgtcgtttcagtcgttatcagctcagctctggcgagcggtgacacgtgcgaggaaattcaacgacccagcaaaaacgtcgacgtttcggatggcggtgaattgccgccaccgtctagagccaaagatggacgcgttgtacttcggcaatgcgatccagagcatcccgacggtggctaccgtcggagaaatcctctcgcgcgatctgcgcttctgcgcagatcttctgcaccggctcgacgtcgcgcacgatgacgctacggtgcgccgcggcatagaggattgggagagcgcgccgaggctgtttcccctcggaaacttcgacggcgcgatgatcaccatgggaagctctccacgttttcccatgtacgacaacgacttcggttggggtagacctgttgcgattcggagtgggaaagcgaacaagttcgacggaaagatttccgcgtttccagggagagagggaaacggcagcgtcgatttggaggtcgttttggccccggccaccatggcggggctcgaaaacgacatggagtttatgcaatacgtaacgcaggtcgtttgaataagtttgttcattaagttgctgcacagtagtagtgatagtgaaaactcgacgagggagtgaaaaaaaaatataagtcggtgatgaaattaaggacagggaaggtgggtgattgcacgacaatagtaccatggggtgtgggcgtcgttttgtgttggtcaaaggtcaaacgttcgcagggtggggtctcagtgttttttttatctaaggctgtgtttgggtgtttcggtggttggccctactgatataatggttttctgaacgtgattccggggaggtttttcaggtgaccaatactaggacgaaatgataataaataaataataatatggatgatgatgacgatgatgaaaaatggaaattggaaaataaaaggaaaatatgttgaagccaaaataggcttttggaatttggagttttcgtttagctgttttgtaaagtgttcgttctgtgttactttttcctttatataatttaattattatattattattttcatttgagaattgagtgaaaaa

SEQ ID NO: 125789 - DNA, 744 bp, Glycine max
  unsure (1)..(744): unsure at all n locations
  Clone ID: PAT_MRT3847_84597C.1
attgattcattcccactaaacaaaaaaataaagaaaaatttaccaaaatgccttcttcttccaccaccatagtctccaaatgcgtgatccaccccgaccagaaatcaaacatgaaacccttgagactctctgtttctgaccttccaatgttgtcgtgtcactacatccaaaagggcgtgttactaaccgctccgccctcgtctttcgaggatatgatactctcttttaaacactctctttctatcgcgctctctcactttccggctcttgcgggaaggttagagacagattctcatggttatgttaatattgtctgtaacgacgctggcgtggattttatccatgctaaagcaaaacacctgactctgaacgccgtcgtttcaccgtctctcgttgatgttcacccttgcttcaaggaggagtttttcgcttacgacatgacaatctcctacgccggccacaacacccccctcgccgccgtccaggtgacggaactcgccgacggcgtcttcgctcacactctcccaagcaatggaagttccttcggaagcgccgtctaccggcatcgccgccgaaaccataagcaaaaatgcgctgaagcgcgaactcaagaacaaacagaaagaaaaagaaaggaaacgcanggaggaggacaagggcaaaaaggcagctgaaatgcagaaggctaaggatgacaaaactgggcctgctggagaagatgatgtgggcggggctggntacctt

SEQ ID NO: 125790 - DNA, 375 bp, Glycine max
  Clone ID: PAT_MRT3847_84598C.1
gtaagctggtaattgagttctggcgttatcgttcaagccatagtaggattctcagaactttgacctcttgcactgctgaggagtgggcctatcactaataatatacaggctgcaagcgcgaaagctggcaatccgactcttgctgcgggatggacaaggcaactgtctgacgctttcaaggcccaacttgattcaactattcaggctctgggcgtaacttgggtgcaactggatctgtgcgatcatcaaatgatggtgaaaagtataacgctgaggggtggttagatatgaactgtgagtcggacgcagatctgggttcatctcaccaaaatgcgtggccttacaggaggtgactgagcaaataagggttaagct

SEQ ID NO: 125791 - DNA, 581 bp, Glycine max
  Clone ID: PAT_MRT3847_84599C.1
ggctcgaggagagagtgtagcacagagagaaagagagagagaagcattggttgttattaatggcggagggtaaggaagagagtaaatctagcgaggagagcgtgaagctgttcgtaggtcaagtgccgaagcgcatgtcggaagacgaagcgcttgcaattgttcaaggagctcgctttggttgacgaggtcaacatcatcagagacaaagccactcgtgcctcccgaggttgttgctttgtaatttgtccgtccagggaagaagcggataaggcggtcaatgcatgtcataacaagaaaacgctccctggggtgagtgagtgggcttccgtcccgcacgcatcttcattctttgcttttcagaacgttcagcgtggaatggatttttttttctttcttttaaccctctggtttatcaggaaaaagatgacattgattaatgcagagttcagccagaagaaaaattaagcctgaccaataattatttctcccaaagatggaatgaaatgttttgaatcctagtttggaatagcagaatgagtggctgcttctataaaagtcgctgatgctgaccaccacca

SEQ ID NO: 125792 - DNA, 1467 bp, Glycine max
  Clone ID: PAT_MRT3847_8459C.1
ttttttacttaaaaattcaagcaaatatattagattttgcttcttttttttaagtaaaactatttttatgttgctatatctcgcaaatggtgaccaacttttgtcactaaatctaattttatcaccgctgtccataataacagggaataagctcgatcgatggaacacagcagcaatatttatatcaattattctcgtactacttttgccttgtttatgttatactggttaaactttgaaccaatccaaagcaatgatctatgagaagacaacaagaaaagaaaacacatatcaacgtttattacacaatccattcagaaaaacaaaaaagaacaccctgagcaaaaggacccaatacaattatatctcctgagccaattccactacttcttccaccacagacgccatagaagatcttctcttatttgcaacaaagcacttatcacgaatctcccctttcccaatacgatccgttatcacatctagctggctcaccttcacaaaagcatcggaaaatttcttaaaaaacagtttctggtctgaagcgaactggttcacgatttccttggttttggggctgcccgcgatgtcctggtcagaagtgaacactccttggcggttcaagaggttgatgtaatacatgttgtcgaacttcacgggggttctcacgtccaaattaacggtgttgggggactcggcattgggacacgtagctatcaaattgttgttgaagtttgggtcgattggtgggtccgtttcgatggttctgttcactagggagggacagtgggcacgaccgtaggtgtgtgcgccggagagagcgaccacatcggtggcatcgaaacctctatttccgaatcctctgagaagatcgtcggttcggaagaatggtgccggtaggttgtccggcgcggtggcgtttggtcctagaccgtcttttcttcccagtggcacgtcaaaatcagggcctcctaattggcgaacagcttcacgtgctgcgataacaaggatgtctgagcatgagacaactggtagacactgcttgtaaatgagaacccgaaggttttcaatggcgtcaatggcctcttgccttaaaccaaagttagcacggtgttgcttctcgtcaccgtctccattcaacaatatagacgcatcgcatccattaggaaagcagtcatggaagaagagtcgaagtatgccaggagctactccactgtccttctcgaagacatcctcaagatgcttccttataatcctctcaagcttgggacatgtcaacaaatagtaattccatgatagtccagggactagtttcccagaggaaacatggatttgagaagccaatacaagggaagaaatcaagagcaaagagtgaaacaaagcactaaccctagccatgtttgattaatttgctatgagtgtgacttccccttctgtcgtcttctcgcagccgtacggacgcgtggg

SEQ ID NO: 125793 - DNA, 458 bp, Glycine max
  Clone ID: PAT_MRT3847_845C.1
aattcggctcgagaccggaccctgcagccgcagagatgttgatgcctaagaagaaccggattgccatttatgaactcctttttaaggagggagtcatggtggccaagaaggatgtccacatgcctaagcacccggagctggcagacaagaatgtgcccaaccttcatgtcatgaaggccatgcagtagttttctgccttacagtctctcaagtcccgaggctacgtgaaggaacagtttgcctggagacatttctactggtaccttaccaatgagggtatccagtatctccgtgattaccttcatctgcccccggagattgtgcctgccaccctacgccgtagccgtccagagactggcaggcctcggcctaaaggtctggagggtgagcgacctgcgagactcacaagaggggaagctgacagagatacctacagacggagtgctgtgccacctggt

SEQ ID NO: 125794 - DNA, 665 bp, Glycine max
  Clone ID: PAT_MRT3847_84600C.1
ccggtccggattcccgggtcgacccacgcgtccgcccacgcgttcgggctggctttgaggcatgcgagtagagagaggaatcgtactacccaagtctcatacttccactgattttgttactgtatacgggactctacactcttctccacaccttgatctcagacaagttaccctagcccagagacaaagccgggtgcttggagatgataatgctcaggaagaggaacagggcacagcacaaggagcaacacctcatgtgtgaagactattctgagcactattctgaatcggatcatgccatggggcgagacaacattaagggccacgcactttgcaatgtcccttgtctttgtgcgggacgagggccaaaaggctagttagattctgactcaactaggagcctcactgatgcactagatgatgctagagtactttcaaacctaggcaagaaccctgtaacgaagccaagatcttggcaccatgaaaggagctgagattgtcgcagagtagggctaggcattgaagactgttcgaaagacaggtctagtgctaggatttctgagaaaactctgcactcaccagagagcatgagagctagtctgatgccgcacatgatgatgatcagagccccacattgccaaattcacatggatggatctattgag

SEQ ID NO: 125795 - DNA, 536 bp, Glycine max
  Clone ID: PAT_MRT3847_84601C.1
tatacagggctgaggcaagcccgaggagaagaaggaagcaaaggcggctgctaagaagggaggaaagaaggagggtgttgctaaggagcccgaagtggttcaccttggtccccccggcgttgctcctggcgagctcgtctttggcgttgctcacatcttcgcatctttcaacgataccttcgtccacatcactgatctgtcgggccgtgagactatttctcgtgtcactggcggcatgaaggtgaaggccgatcgtgacgagtcttctccctacgctgctatgcttgctgctcaggatgttgccgttcgctgccaacagctcggcattaatgcccttcacattaagctccgcgccaccggtggcaatggaactaagacccctggccctggtgcccagtctgccctccgtgccctcgctcgcgctggcatgaagattggccgtattgaggacgttaccccgattcccaccgattccaccagaaagaagggcggtcgtcgtggccgtcgtctgtaaaggagtaatgcaggatttgagg

SEQ ID NO: 125796 - DNA, 300 bp, Glycine max
  Clone ID: PAT_MRT3847_84602C.1
ctaaactggggagaaccccgtgcgcgagctaatagctgatgatgcctggctgaatggccgaatcataactactggtcaacaacgtggcgctgcaatgatcaaagctagaaggctgacaagtgcactaatagatggtagtgctgctagtgaccatattaaaaactgggttcttgtaactaccaatggcacctgattataaatgggaggatattctgatgggaactacaatgtaccagctggacttatatattcattccccgtgacttgatgccaaggggaatgggcaatacgtcaaggact

SEQ ID NO: 125797 - DNA, 527 bp, Glycine max
  Clone ID: PAT_MRT3847_84603C.1
gggcaaaaaaccggggagcaaaccccaggggtgcctttcaaaaaacaaaaataaaacggcgggacattaaaggacctgggttttcccgagttatcccccctcctatgttaaacaaacccgggactaagggccttcacaaaggggggataaattcaattcatactaaagggggggcatttttgggacaggggcaagcttgaaaagccgcccccaactaagggaaaaaatcattttttaccctctagtccccaaaaacggattttttctcttcaaagaaacccgggccacccccagtttttttaacatgggggttcacaaaagcttcatgaataaccattatcctttgggcaacggggggagaaaaaaaattttttgggctttcgagcaaggggaaaatttccctgcccttaggggtcccataggggtctaggtcacaatttaagggcttttcaaaaacaggcccctgcccaactactggaatattgaaaggggggaccatggcgtttggaattccccaaggggaacca

SEQ ID NO: 125798 - DNA, 636 bp, Glycine max
  Clone ID: PAT_MRT3847_84604C.1
gacgatgatatccatttaaatctaggtatgttagtgagtacacttgctaagtaccgatcaagacccaggatttatattggttgcatgaaatctggtcctgttctatatcaaaaaggagtaaagtatcatgaggctgagaactggaagtttggagaggaaggaaacaagtattttaggcatgccactggccaaatatatgcaatctccaaggatcttgctacttatatatccatcaattggcccatattacacagatacgcaaatgaagacgtatctttaggttcatggttattgggcctagaagttgaacatgtcgatgaacgctctatgtgttgcgggacccctccagattgtgattggaaggcaaggacaggaaatgtgtgcgtggcatcttttgattggtcgtgcagtggtatctgtaagtcggtggagagaatgagagatatacacaaaacttgtggggagggtgacggagctgtttggaacgttgacctttaattctcaaattgagacatagaaaatcttactttactacttttgcattaagaggaattgaatacattttccttttattttgatgaaaattgttagagtttcgttgaggaacaatatctatagtattagtaactgaataac

SEQ ID NO: 125799 - DNA, 344 bp, Glycine max
  Clone ID: PAT_MRT3847_84605C.1
tggctaaagactgctaggattgacactgcatcctgaggccgatttgagtacttaacggagaaacactcggttcaaagagctgttctatgattactccgaaaagagaaaaagggggatgctacattgatagttaccaggataccctatcactacccacagaccacttaacgctaaccctggacaagcaatgctcattagccacgcagagttgaagataacatccaaggggttcggaactgacaatgaccttacccttttttgccagataccaagaatcaccggtcacagtgctacacattgtgccagaatcgacgacgctttgaccccttgtgactacctataag

SEQ ID NO: 125800 - DNA, 258 bp, Glycine max
  unsure (1)..(258): unsure at all n locations
  Clone ID: PAT_MRT3847_84606C.1
ctgttttatgtggaaagangtcttggggcatggggtagcaattgtnttagctgcaagtntagcatctcagtacacatccctggtgangnttggtaatcttctggaaatggtaaatgtttctcaaaatttcaatcaaacccaattcccgntccaatgcnttcctccgcnnggtaactagctgggcngataaatggtggcaaattaaaactttgggcntggtttcnagcnagganaggnngcngnccattcnggtctttc

SEQ ID NO: 125801 - DNA, 570 bp, Glycine max
  Clone ID: PAT_MRT3847_84607C.1
ggcaaacgttcaacgcctctcccccgccattgtctccgtcaaactttttaccttgcctccctgaagctcacccacatggtgtccctgaacctcacccacatggtgtacctcaaactctgaacctcacccacattgtgtacctcaaaccctagactgttgtctcaaaaatattaggttatacgccatcgacaatgtttgcacgcgcgcatccatgctcacctcgtcaaacaggttttaagtgcaaatgcagtggctggtctgagcattgagtgtttgatggatgaaaaagatgttaagggctttatcaagagggaagaatttgagaatttggcatcaggattactggagaaatttaatattccctgcaacaaagcagggatacacttgatattcactactttaatcataattacatgcttttaacttgaaagtttcatatcctttgcaacatgaatttagctaaatttgtttagctgtattgttccccttgatttattaaagtatgttaacaagttacattttgattttaagataatttgaattctgcagctttgtaattgagattcagaa

SEQ ID NO: 125802 - DNA, 474 bp, Glycine max
  unsure (1)..(474): unsure at all n locations
  Clone ID: PAT_MRT3847_84608C.1
ggttgctcttggaattgttatctttgaggtaagctaagaagttgtatgattggcaattgaaagaaagctatattgttttgcagtcatatatgtctttgtgcttgtgcccacagataaatagtctctaggattataattcactaatcaaactatccattttataaaggatttaactagattggaccaataacaaattgagaatgcttgaactcttgataaggagaatacactgtttattttattgataatttgatatttgataggaacatctagataccaggaagacaaggaaaatgaattgattattaccaccatcctgttaataatttcatgggagtcactcgtcatcgacattcaacaataggattcccctgccccctatctccccctttctttattgacgagaaatgaagtgataggggtatatctagggacttaatttcttgacccanaaaaatgaagatgcagttttga

SEQ ID NO: 125803 - DNA, 246 bp, Glycine max
  Clone ID: PAT_MRT3847_84609C.1
attcataaattacccccgcacggaccctatctagctcttaacagcggcaattcagttcagaactcagacatgcatggcttcctcactgtcttccgttgtcaaccaacctcacttagctcacgcctcaagcttcaccgtccatcttctcttaccactctcacaattttcttccacaaacacaaacaccaacaccaacacaatgcttcatttccacacccatatacgatctcgcctcgctcacgccct

SEQ ID NO: 125804 - DNA, 2039 bp, Glycine max
  Clone ID: PAT_MRT3847_8460C.1
aggagccagaagtgataggtctccaagtgttgaaccacgacgatctgctcctgctggctagacttggtttatgggcatttagactcaacgaaaaataatgtgtgcaaacaccggagcttcaagttctttggcgtgtcaagaaaaacaagcactgcctttgtctgatgaccacaaaccaaatagagccgatgaatggaaaaggatagaagctgcaggaggaagggttatacaatggaatgggtaccgagttctaggtgtttaggcagtgtcaagatccataggtgataggtaccaagagccatgggtaattccagagccagaagtgaagtgtgtccaaagagacaaaagcgacgagtgcctcattctagccagtgatggtttatgggatgtcatgacaaacgaagaagcctgcgaaattgcacgaaagcggatccttctttggcataagaagaatggcaacaactcagtatcatcagaacaaggccaagaaggagttgatcctgcagctcagtatgctgcagagtatctttctagacttgccctccaaagaggaaccaaagataacatctctgtcattgttatagacttgaagcctcagagaaaaatcaagaaaaaagaataatatagatacccataatctagaataattgtcagatatattttattattttagaataaactatcaatttggtccctcgagctctctcctaagtagcccttaaactaatgaaattatataagtaatctctgaagtattgaatattcatcagtttagtccctaaactgatatactatactaacattcagggactaatttgaagaattttccgatatttgggagactatttagtatgatttatgatacttgaaggattacttgtaccatttttactttgtgggttatttaggagagagtgtaatacttttaaggatgatattgatggtttattcattacaagtatttttcagtccataacataatttatttattctattagccctttttaaacagggctatgtaatgtatgctaaaatttcttgtgcacagtgatgcctctgcttaagaagcgatcgaggtgtcactgttgtgctgcccccatcagaaagttaaattattttttaatgaataatgatgtaaaagtttcaagttgtctactcaagtaatcaaaacaaccactattcaattacattattatctatttgactgtatcataacaacaaagtacataatctttgacaaaattttagaagctgatttccttggctccactctgcaaatcctggtcataggcaactgggaatcctcttcaagtaaatgaatacaaattgaagttacatatgaagtgacagttgtagtttccatttgccaagttgacatagaatgccatatctttcactgttcagatagtccagaatattagtatggaaagaaggttgaaaacgagcacatcccacgtttacttgtagtttaggtaatatctgtgaatgatattgactttagaagagaattccaatctcataagtagcacaatacaagctctaaacacaattcattttaatacaaaattggaaatcagtcatataatttctaagcaccaaagcatgaacacctgtacttgttaccaaggttttaaaaaagaggtgtgctgctagcaacacacagtctaactaaacacctattttataattggttaaaatttattgagaactacaaaaatgtgaaatttttttttggatctctttaaaaaatggtccatgattgtgatttaggccacaatgtcagtttttggagtctccaaactacattgaaaccacaacttcaaccgcatttgtcagtaattctctgcaatattaaggatctcgacaaaattgcaactgcggccacaatttaaaaccttagtgcttacaattcacactaataaatcactccctcaatatatagaaacaacaatcctgacagatcaagacattctgactccgtttaaatagtaatttaattcaagaatgcctagtgaacttgcacacagcgcaaattcgaa

SEQ ID NO: 125805 - DNA, 816 bp, Glycine max
  Clone ID: PAT_MRT3847_84610C.1
ataaccaagaagataattcaaaaaagaagagaccaagagagagagagagagatggggcgcaagaacacaattttcttggcattggttgttactttgatcactaaggagacaatggcagaacaacatgtagttggtggaagccaaggttgggatgaatcaacagacttcaattcttgggtttcaggccaaacatttaaggttggcgatcaacttgttttcaagtactcttctttgcatagtgtggttgaactaggtagtgagagtgagtacaagaattgtgatcttggcaatgcagtgaactcaatgagcagtggcaatgatgttgtgaaactgaacaagcctggcacacgttactttgcatgtggtacaatgggccattgcgatcaaggcatgaaggtgaagatcacaacagtgtctggctctgagacctcttcccctgcatcatcatcttcttcttcatctaattcatcttcggcctcacaatgtctcgtttatcttgtgctcattgttggattgttgattgcctctcttcttaactaggtttggtccatgatttatgaagtttggccatggatttcattgtctatgttgaaataatagtttaataagagtggtcatgtgaaatttcttttaatcaatttggaaatgttattcatagaatgtcaatagggttggacttttggtcatcttgttattttgcttttgtcggagaaaaattaagaaattatatcatagaaatatgtaagatatacagttttatcatttatctttcatacaaaagattttattcgtaataatactacgtgtgttatgctt

SEQ ID NO: 125806 - DNA, 552 bp, Glycine max
  unsure (1)..(552): unsure at all n locations
  Clone ID: PAT_MRT3847_84611C.1
attgtctctgaagaagctaagcttcaagtctgtgaagcgctctctcgatctcttctctcccattcacggacacctcactcctcctgatgctgaaagttttgaattagtagcacacttgttgccgttggatttttctcctatttggcatcctcgacgatttccgcgatggggtttccaaataccctaattttttcaatagtggttgaaaacaacgagaggagggtgctggagatggttaactgggatccacttttgacagtgagtgccttagagaaagagttcgttgttgatgaggattccgcgaagaggaaatttaggttttcggtgaagtatgagaaggatttggatttggaattggatgatagtaggaagcttaatttgctcaacacgcttcctttggtgttttcgtattcaaatgttgcggaagtagctacgagcatcttacttgggcggaaccgagatgtgttagggtttgttcttgaaggatgtgtatgatggaaatgnaggtttgattgagaaagacccccattattgtttgatgagaagctttat

SEQ ID NO: 125807 - DNA, 198 bp, Glycine max
  Clone ID: PAT_MRT3847_84612C.1
acggttgtgacactggaaccaaatgtatcatttataactttaaagggccaattacaaaacctgaatgaaaattgctatttccaacatttgggccacaatattttattgatctgcttctaaaaaggggggcgttaaagctgccttgaattaccacccttccaaatatgtatttatcccccctggaattgatacccgggt

SEQ ID NO: 125808 - DNA, 335 bp, Glycine max
  Clone ID: PAT_MRT3847_84613C.1
tgtgggctcggctcgagcaaaccccggcgacctcaaacctcacatgcgttactaactggagcatggatggtcgaacagagcaggctgtgtagggggctaccgatgaacactgtccatcaaacaggcaaataattcagctgcttttttttatcacacagaaaatatgcgagcatgaggggttctaaccctatagtgaagagctcaaagaaaaaaagagaaggggggccgctcagatatgaactatgggaggccctgacatacaatatcggactggctcacggcgagcatgccaatattgaccaattggaagccacaaacacaagctgaccaatcca

SEQ ID NO: 125809 - DNA, 1314 bp, Glycine max
  Clone ID: PAT_MRT3847_84614C.1
cccacgcgtccgcaaagcctataaaccttgaagagcactatgctgctattgcacttatttgcactatttctattttgtgtatcagctaagcttaatataccttcaccagggatcaatacaatataatggttcaaacatgctaacggtgtatgctcctagagctattctgaagtgtcatttacaccaagattcagcttctgctcaacaagcatatccatgcaagatcaataataatgctaatttggtgaattgtaatcctaaaccttttggcactccttgtagtaatatattgtttcatagttcctcctctgggaaatgtgataagctacaaaagagccttcatctattccatcatgtcgccacacataaatggctgtgtgggttacaggattccatttcatctgatgatgagtatcgttcttcccgcaacatagccatcagcttgttcaggcgatacaggaacttcattgatcgtggtggagccgacaatctaaaagagttcatcactgccggggtaaatgcatatgcactaggatgcaccgatgaaggattaaggaaagaacttatggatatgaagaattctgggatcgaaattgatgtaatgcaaagttatggtggaagcacaagcttaaaatctaagataatctcagaggaggttgatgaatgcattctctggttaagcattatattcatcaccatcttgtgtacaccccaaccaactattgttagatggtcatctacacctccagtgtcagatgaagttagacttcagtggaaaggcttttgtgcccttatagcaaatgcatattttatgaagggaatggcttggcttcctgtaaagactcttcagttagaacagacggctgtgatgggtcaggctgagaaaccgtcagttgttgctagcagaatgcgattaatctttagcacacttgaggtagtgagtccacagtggccaagagcatagataatgggatcattttaaaactggctcccaaccatttcacattgagttgtattccatatttgctaacagatgtagcaatatcgtgccagagaggatattaaaaaggaaaagaaaaaactggatttctattttgtatgtatgaaaatgagatacatgatatattgcaattttagtgatatactaaattagaggaagactaattatcaattggtccaaaaaagaaagtattgtttaattcttacattcatttcaaaaaaaaaaaaaaaagggcggccccgagtagtagctgtcgtaccggtaatgagatcatccttgcatcttttcttttcttgacatgcttctagtattgc

SEQ ID NO: 125810 - DNA, 494 bp, Glycine max
  Clone ID: PAT_MRT3847_84615C.1
ctgatgtccctttcttgttctcatactcatcgctcgtgcgagagagagccatatccagattcgctgatttttgccatgcatagttgctcacacactccaatttcaagcccagtgcgagatcttgtcaagcctgtccctgcatgtgatcgaaagctgcatatcacgctatctcattcggacaacacagtgcgcgagctccttgtactgtgaaggtgaccatcatccacgcagactatgagaggctgatcaccaagccttcctatcagcaacaatggcgtgttggcacatgcttaaaggaacttaaagacactactcaagaaggatatagctttgaagagctatgcatcaagaaagaagccattgagggagatgagaagttttgtgcaaaatccttgagaacagtaattgggtttgccatttcaaagctgggaaagaacattcaagtactttcaagttcctttgcaatatgcaagaccaataacactgtggaagga

SEQ ID NO: 125811 - DNA, 264 bp, Glycine max
  Clone ID: PAT_MRT3847_84616C.1
taatgggatcgcaagccacgtcagataaaatcagggtacctctgctctcgagcaatatcgtcgacaagacgatgaaggggttcaggaggcctcagggtgacaggaaaagttccgtcaacacaaactggcgtagaccaaagggtatacattcccgtgtgaggacaaagttcaatggatgcactttggggccaaacatcggttatgggtctgacaacaagaccgccagtatctccctaagggttttaagaaatttgttgttcacaa

SEQ ID NO: 125812 - DNA, 137 bp, Glycine max
  Clone ID: PAT_MRT3847_84617C.1
ttcggttggagctaattttgagctctatctctctattttaaagccatttttctaccccaaaccaataggggggcataggggaacatgatatcagctggttccactgtcgccggtcataggaatggaacattctatgt

SEQ ID NO: 125813 - DNA, 759 bp, Glycine max
  Clone ID: PAT_MRT3847_84618C.1
acttcaaaaacaaatacaaaaagtagcttcttaatcaattggaatagaatatttttgacatggattgagaatacaacagaaaggcctacttactactctagcctgaattacaaaacatatacaacaatgatttataaaaacgactataagaaggtagtgaatccccctcctttctattccccaagaacctatcctcaatcacaaaaatgtacacctccccactacattatgttagcatcctacataactagcagagcaatgcagatgagaagataaatgattaaagatgaaaaatgaaagagtagatattaagagtaaataagttagaaaacaaagcaaccaaatacaagataaggaagatgatcatcatcagcataagaaatatccttcccaaattcagaatccttgtccacaacaactgttgctctggttgtccacaactccttaacaaagactcatatattctgtaactgcgaaaaggagatacggattactgagccagaaagtgtacttgcatgcttgcacacaagggcttcagtagcctgctcctcattttcaaactgaaccagagcctgctttttcccgttcatctcgaagactttgctgttgacaatgattccatgttcctctacaaggctcacaatctcctcttcagtgatgtctagtggaagtgtggacaaatgaatcatctttgttggggggcagcaataccgatagtttttggctgcattacggttgaaacgattgagatctcgagcc

SEQ ID NO: 125814 - DNA, 888 bp, Glycine max
  Clone ID: PAT_MRT3847_84619C.1
ttctggtccggattcccgggtcgacccagcgtccggtttggacggtcaaggtcaaatagtggaagacgtattgacatctggcttgtcagctaagctaatgcgttatcttcgtataagcgtgctgggagagacaagtggcaaccagaaagatgttactcatataacagagagtaggcatgcatctacgaatacttcagcaagaggtagagacgatggtcgtggtagatttcgccagctcctcgaatcaaatcatttagatgatactaagatgattgatgagagatctttagatgacgtaactcttgaaagggtagatggtgaaccacccgatgggcttggtgaaggtactgatgtccacaaggtagattctgatggggaggatacatggcgctgtagagatatacgtgatggaaggataaaatatggtgagcatgacgataatattagagatgactcttcaaggcggcgtgcaaaccgtggatggggaagatctagagggaaaggtagggtcaatgaaggggctgtagaaagtgatcctattttgtcgtctcctggatctggaagtagattaggacaggggcggagtgttagagacagaagcatattgaggaatgctgacgttaggaggggggctgattctaagaagacccttggcaggatcccttccgaggcttctgcttttgaaagagaggatgatgatgattgtttcgaagagtgccgaattggtagtaaagatattaccgatctggtccggaaggcagtccgatctgctgaagctgaagctagatcagccaatgcacctgaagaagctgtcaaagcagctggtgatgctgccgctgaccttgttaaaactgcagcttctgaggaatataaatccagcaatgatga

SEQ ID NO: 125815 - DNA, 358 bp, Glycine max
  Clone ID: PAT_MRT3847_8461C.1
tgaaaaaatgtaaacattaaaaaagcatttttagggccatgttaaatagccaaatcatattcactattttctatgacatagacatgaccatttttaattatggaacaaaaggactactccctaaagggagcggctttgagccaaagatgagcttttttgggtatggatataccaattgcttattgcatatacaagccttgcattccaaggccaccaggcaggttccatttaaaacgaaacagatgaattgggagtgctaactcaacaactggcatggcatagtgcactccaggacaacccgttttaccaaccccaaacgggaacatcttagagtgtcggccctttaaattctattgga

SEQ ID NO: 125816 - DNA, 1857 bp, Glycine max
  Clone ID: PAT_MRT3847_84620C.1
tttttttttgctgcaaaacggaaagagtagaccaattgatagatacttcaaaaacaatcacaaaaagtagcttcttgctcaattggaatagaaaattttgacatcgattgagaatgcaacagaaaagcctacttactactttagcctgaattacaaaacatatacaacaatgatttataaaaacggctataaggtagtgaatccccctccttctattccccaagaacctatactcaataacaaaaatgtacacctccccactacattatgttagcaacctaaataaatagcagggcaatggagatgagaagataaatgattaaaggtgaaaaatgaaagagtagatattatgagtaaataagttagaaagccaagcaaccaatacaagataatgaagatgaccatcatcagcataaaaaatatccttcccaaattcagaatccttgtccccattgtgttcaataaccgttgctctggttgtccacaactccttaataaagactcatatattctgcaactgtgaaaaggagatacggattactgagccagaaagtgtgcttgcatgcttgcacacaagggcttcagtagcctgctcctcattcccaaactgaaccagagcctgttttttcccgttcatctcaaagactttgctgttgacaatggttccatgttcctctacaaggctcacaatctcctcttcagtgatgtcttgtgggagtgtggacaaatggatcatctttgttggggagcagcagtaccggtagtttttggctgcgttacggttgaaacgattgagatttgaattgatgtattcatgtgtgtcagcaccttgggttatgttcggatgcttggagaagttgacctctaatcgtttctcaaacaacatggctcccttcagaaagtgtacagccaattctgcttgaaaaccatctcccatctgaataagtgcatgatctggtttatttcggagaagtttaattctcacaatattcccataaatagagaacaggttgaatagtttatcctcatcaattctatcaggattaagatttgatacaagaactgtacacctgtcatttgtcccagttattccaggaggtagacctcccccaaaggcagctgcaatggctgcagcatttgccatctgtggaaatccaactgccctggctccagaaccttgagcagcatacatatttcctgcatcaccatatccaggttgtgaaggtcttcctttctgctctgtagggagatttgggtttgtgaagtccagaatcaccttgaacggtcattattgtagttcacttgtaattcatcaaggtttgagaactgaatgtccagctgacagcaaccatcataaatattgcgtccctgaagtgtacttcttgccgcaacagcactctgacgtgattgatactggatgagagcctgaaagcctacacagtttttaaacatgggatgaaacaagtaatagaacacgtgcacaaatcaaatataaagatagtcttcttccataaaaagctagaaacataatttcgtcaatatcaaataactcattttcctatttatctaaaaaaaaaaggatttatatatctcaaaataaattattacatgaaccaaatatatcctcaattcaccccgtgaaggcccctaagacaaaaaaaaaatcttaataggaaaagaaagagagaggaagaaatctgagagaatctgaccagctgacttctggaatgttacaatcttttccacaaatccatggggagaaaacacttgatgtagcacatccgctgttataggatacagcatgtgatgaactgtaactaagagaattcgatttggctgtgcatccagagagttgcc

SEQ ID NO: 125817 - DNA, 473 bp, Glycine max
  Clone ID: PAT_MRT3847_84621C.1
ttgtatactacataaatcctggggagaatcaattcaagccttgcatatgagctcagcatggtaaacatgcacaccgtacaaaatgagttacatgaactagctcactaactcgctaggtctccacagggatgaagaattgaacataataatgcgcatgcacagactgctgtgggaaaaacaaaataatctgtttcaccatgtcactatgtcacgagaggaaagtgacacctataaaaaaaaaggggacactgtgaaacttgctagtcatgtctagcacaaccctttcacaggagggaaaaaactaaaatttctatagctctcgctctggcgatgtgtcgcttcaatatagccgaacagctgtggttcctctatccaagactgatctccgaatgcttctgagaggctgcccctcaagtctcaatgcctgtatgcttgactccagcaaatccatttagggcagaaggactgacatg

SEQ ID NO: 125818 - DNA, 398 bp, Glycine max
  unsure (1)..(398): unsure at all n locations
  Clone ID: PAT_MRT3847_84622C.1
gtcaatattgcaatccatcacacgggacatctatgtgatatatatatttagaagcttcaactgaaattatctgaagaggcattgcacaacagcacatcgttttttctccatctaaattcatttctgcaggttccgcaagctttttgtagccttgtccagttatacctatatgaacactcttagaaaggtataaataataaagttgcagtgctgaaggagttgtgttgcttgagagatcagctttcatttgttgcaatcctgctcctgctctgtatctatcaactggcttccgggttcaagctaatacgttgtgtggattgtaccctgtggctcaagcagcctttcactttctcatgacatgatcgaacggaatcactgctaattntcttccaattatc

SEQ ID NO: 125819 - DNA, 142 bp, Glycine max
  Clone ID: PAT_MRT3847_84623C.1
gcatacaaaagaagccaatgatggtaaatcaaacactggtaccgctattatttctggtgccaacttagctgtatggttactgtctgttcttgcttgccatgatgaaaaaagtaaaattgcaataatggaggcaggagcaatt

SEQ ID NO: 125820 - DNA, 2612 bp, Glycine max
  Clone ID: PAT_MRT3847_84624C.1
aaatgggccacgcgtcgtgaagaaacagtggtcgttctctctgaaatgggtttcgctttggcatacacagcatctggttgttgctcaaacctacaatttcagtctctgttattcgctgctgcttcattgagatcaaaaccgtgtctctctctctgcaactctacttatcgacccaaacgcattctccagcgttctccaattgttggcgctcagtctgaaaatggagctctggttacttcggagaagcccgacactaattacggaagacaatacttccccctcgctgctgttgtaggccaagattctataaaaactgctcttttacttggtgcaattgaccccggggttggaggaattgccatatcaggaaagcgaggaactgccaaaactgtaatggcacgtggattgcatgcaatactgcctcctattgaagtggtagaaggttccattgccaatgcggatccaacctgcccagaagagtgggaagatggtcttacagaatgcctggaatatgattctactggaaatattaaaactcgtattatcaagtctccctttgttcagattcctcttggagtcacagaggacagactcattggatcggttgatgttgaggagtctgtgaaaacaggcacaactgttttccagcctggtttacttgcagaagctcatagaggtgttttatatgttgatgaaattaatcttttggatgaaggtatcagtaatttgctcctcaacgtattgactgaaggagtgaacactgtttgaagagaggggatcagtttcaagcacccttgcgggccccgcctcttgccacctataacccagaagagggtgctgttcgtgaacatctgctggaccgcattgcgattaatttaagtgcagatcttccaatgagttttgaaaaccgtgttgcagctgttggaattgccacagagtttcaggagaacagtagccaagtatttgagatggtcgaagaggaaacagacaatgcaaaaactcagatcatcttagccagagagtatctaaaagatgttactcttaacagagaacaattaaaatacctggttattgaagctttacggggcggttgccagggacatagagctgagctatttgctgcccgtgttgcaaagtgcttagctgctttggagggacgtgaaaaggtttatgtggatgacctaaaaaaagctgtagaattggtcattctaccccggtcaatcgttactgagaacccaccagatcaacaaaaccagcctcctccccctccgcctcctccacaaaatcaagaatcaggcgaagaacagaatgaagaggaagaacaagaggatgacaaggatgaagagaatgaacaacagcaagaacaattacctgaagagtttatctttgatgctgaaggtggcttggtagatgaaaaactcctcttctttgcccaacaagcacagagacgccgtgggagggctggaagggcaaaaaatgttatattttccgaggatagaggccgatacatcaagcccatgcttccaaagggccctgtaaagagattagctgtagatgcaacccttagagctgctgcaccttatcaaaaattgcgaagggcaaaagattctggaaacaatagaaaggtatttgtggagaaaacggacatgagggcaaagagaatggcacgtaaggcaggagcattggtgatatttgttgttgatgcaagtggaagcatggcattgaacaggatgcagaatgcaaaaggtgcagcacttaagcttctggctgaaagttatacaagcagggatcaggtatctataattccattccgtggagatgcagctgaagttctcctgccaccttctagatcaatttcaatggcaaggaaacgtcttgaaaggcttccatgtggtggagggtccccacttgctcatggtcttacaacggctgttagagttggactaaatgcggagaaaagtggtgacgttggacgtataatgattgttgcaatcactgatggcagagccaatatatcattgaaaaggtcaactgaccctgaagctgccgcagctactgatgccccaaaaccttcagcacaagaattgaaggatgaaattcttgaggtggccggaaagatatataaagcaggaatgtctctccttgtcatcgacactgaaaataagtttgtctcaacgggttttgccaaggagattgctagagttgcccaagggaagtattattatctgccaaatgcttcagacgctgttatctcatcggcaacaaaggaagctttatcagctttgaaaagttcatgaaaccttgtaaaagtaaatcagccaaacttgatttcttccccctttttgtcgtaaatgttaatgtaaatcattcaactatctatgatgggaagaacgcatattgtaatagccaagagcaattttgaatcataccgatgctaacaaaccatagacatgataatgatcaatgttggctaattccaaaagatttaggctgagcacttcaagatttaaagcataattaccactgagaagttctaagatactctcaactgctgaaattcaacttcaaaattgtcaaataattctatgtggcgcattgatatttctattttt

SEQ ID NO: 125821 - DNA, 290 bp, Glycine max
  unsure (1)..(290): unsure at all n locations
  Clone ID: PAT_MRT3847_84625C.1
ttcctctatccctgactttatccccaaccatcttccacttcctcatctcttnccttttccaccatttcttctcatncctcacattgttctgcctccctcttgcttccactgnctcttactgatngtnaggatgtcctcaacatatgtnctgatcctccttgccactcatcgaatgcagactagatgaagtctagcatctacaaacctcagccttnatntactctcttgtcacacgggaaccctcttctgtttagaaagcncnatattcagctcttcttnccaattagtac

SEQ ID NO: 125822 - DNA, 547 bp, Glycine max
  Clone ID: PAT_MRT3847_84626C.1
ggggggggaatccaatcaaaaaaggggaaaaaaaaccaaaccccaccacccttttttaaaacccatttttggaatccgggcggcccaattcaataaaaaccaaagcgggcccccccgggaggggggggggaaaaaaaaaccccgggccaaacccccaaagggggccaggggaaatcatcaaacaaggggccccccccccgggaaaataaaggggccaattcaagaaaaacccccaggcggccaaaggtcttgggctttcagctttcccctccccctaaaaaaaaggggggcctcccaaaaacccggggggggcaaacaaaaaaatccctgggcaacctcgggaaacttggcaacatctttttcttcaatggcggcagcaggggccgccaccaatttaaattcccgggtcccggaaaaggggggaccccgccccgggtttcgcccaaaggcgtggggtaaaaaaacaacgccctttttaaaaagttgggggagcgccccctaaaaaagggggcctttacccccatactcagcaaattatggggggggg

SEQ ID NO: 125823 - DNA, 329 bp, Glycine max
  unsure (1)..(329): unsure at all n locations
  Clone ID: PAT_MRT3847_84627C.1
acacggtacacggagaaacccgggccgacacaggcgcgcgattccagggggacgagacgcaagcacaaacccagttttttcaggagcgcaataggaagccggacaactgcaaatggcaagagacaacagggaaaaaccgactacgtaagcgggaaggcacggcaaaagagcaagcaactcctagaaacactgaccaagcccgacgggaaaaacccagcaattcactcgaaacctcacccatgaaagtgtccactccagggggggagttaacggatccggngcattgcaagaaatgatcatgacaacgaacatagcattatcaaacacgc

SEQ ID NO: 125824 - DNA, 161 bp, Glycine max
  Clone ID: PAT_MRT3847_84628C.1
caaagccaaattcccaatagtcctttcacttttcaatcctacattaatatcattggcaactcgttccatgcattaaagccttgtcccaatattactcactatgcattactccatcttcatatattcacgcatcttcaacactaacaattacattacacttc

SEQ ID NO: 125825 - DNA, 340 bp, Glycine max
  Clone ID: PAT_MRT3847_84629C.1
aaacaagtagttgagaactaagattaatgaaatggcttcctcaatgatctcctggccgggtgttaccaccgtcaagcgtgccgatgccggcatggttgcttcattcaccgggctcaaatccatggctggctttcccactagcaacaccaacaatgacattaccttcattgctatcaacggtggacgacgtcgatgcacgcaggcatctccaccaatcggcaacaagaagttctagactctatcctacttgacagacctcgacaatgcccaataggctaaagaagtcctattccttttaacgaaaggattgattccttgctttaaattcgagttggaacac

SEQ ID NO: 125826 - DNA, 1031 bp, Glycine max
  Clone ID: PAT_MRT3847_8462C.1
cctaaatcgacgcatttgttacttggtttctgtgagtgttcgtgaaccactcagcgaactcgactctgtgtggcacattatctcaatttttaaagcagatcaacagacaatggtgaactccacccccacctccttctaccgcaccaccactctcactccctctccttctcttctatccactcctcttccttcttgttcttcttcttccacccatcatcattcatatctacacccccgccactcctccttccacactcaacctcttcgcttaagcaacctccgctaccacacccatttgccatcaacccccaagacactcaaagtgaactgttccaccagcgagcctctgaaggtcatgatatcaggtgcacctgcatcgggcaaaggcacgcaatgtgaattgattgtccaaaagtttggattggtgcatatatcaacaggggatttgctaagagcagaggtagcggctgggactgaaattggaaataaagcaaaggagttcatgaacacgggtcaattggttcctgatgaaattgtgacagcgatggtggcagcacgattggctcgcgaagatgttaggcataaagggtggcttcttgatgggtaccctcggagttttggccaagcccagagtctggagaaaatgcagatacggcctgatgtgtatatcgtattagatgttcctgatgaaattctgatcgacagatgtgttggtagaaggctagacccagtgacagggaagatatatcatctaaagttttttccaccggatacagaagaaattaaagcaaggctgataactcggcctgatgacactgaggagaaggtcaaatctcgcctaaacatatacaagcaaaatgcagaagcagcatcttcctcttactccagcataacacataagattgatggaagtcattcaaaagaagcagttttcaaagaaattgaatctttattatctcaattgcaacaggataaagtgaaaataattgaatcaggagaaaaacaattcctgatacaaagaaggacggaca

SEQ ID NO: 125827 - DNA, 420 bp, Glycine max
  Clone ID: PAT_MRT3847_84630C.1
ctgtcgaaacactttttttttttttccctgtattcgggggggcagacaaacacagttaccgctatttgttcattcgggcccccgttaaagttttgaaacaccccatcccgcgccatttttatagaaaagagcttatctggcacaataaaaaggaccacacatgggggggcccccccccccccccttctcttagcattggggtaccgaggtcaaacaagggatttgccctgggcctatcccttttgggggcgggtgcggaaaaaaaaaaactggacactcctttgcgagggcaccacataaccttggcgggggaaaacctttctgacacggccctcccagaaatttttttttactgggttaaggaaacaactggggggggaaactattggcggcacccacaaatacccgggacccctcccc

SEQ ID NO: 125828 - DNA, 334 bp, Glycine max
  unsure (1)..(334): unsure at all n locations
  Clone ID: PAT_MRT3847_84631C.1
tatgactcgcatgcacctactaactcggattattcccgggcagagattantnnaagnatttactgcctaaaaggggactttacagggatagtgctaggctagctatctagaaacccaacaaggctgctcctgtgcatgcatcagcccatggtatctggataatgtttgtctttctacatagttatgttttgtttatttttttcattttttacatactgattatttcaactatcctatgatattcatcttttatcttgatatttatctttcaagtttaacttttttccttatattttattaatttatgattctcttattttcttctattttatat

SEQ ID NO: 125829 - DNA, 820 bp, Glycine max
  unsure (1)..(820): unsure at all n locations
  Clone ID: PAT_MRT3847_84632C.1
aattcggctcgagacggctgcgagaagacgacagaaggggaggagaagaaaacagaacagcattgcaacacatgggtgcttctggcaacaattttctccaagtggtcgccaagaacttcgatgttcttgctctgcccttggtcacccttgtttaccctttatatgcttcaatcaaggccatagagaccaggtctagtactgatgatcagcaatggctgacttattgggttctctattcattgatcacactcttcgagctcacatttgccaaagttcttgaagtgcttgccatatggccctatgccaagttgatactcagttgctggttggttcttccaaactttaatggggcagcacatgtttataggcactatgttagaccattctatatgaatccacaaatgcctcaaatgcctcaaatgcctcaaatcccaggaacttctcaaatgtggtatgttcctagaaagaacatctttagtaagcaggatgatgtccttactgctgctgagagatacatggaagagcatggaacagaagcatttgaaagactcataaccaaggctgacagagaagctagagcaaggaggaatggaaattatatgatctttgatgatgattatatagattaactttgttaacccttaaacttttctctgtagtatactagtatcactatgacaattccttaaatagttatttaagtgtatgacttatgaacttagtgactttagatatgtttagttcaggttcatacagccaacaccaaannaaaacacccaaaaaaccaaacaaaaaacaaacaaagccccacacacaaacc

SEQ ID NO: 125830 - DNA, 196 bp, Glycine max
  Clone ID: PAT_MRT3847_84633C.1
aaggtgatagcctttctgttgtgtcacgtataatctgtgctgtgcgcctgactccaccttgcacagaatagcgaatacccttgcccatccctgttccctggtgcaacatcaattgctgatttgatgatctgcgtctaagagagtgggagggaccagattccaaatgcctttatcagcttgctcggacagtgaaaag

SEQ ID NO: 125831 - DNA, 235 bp, Glycine max
  unsure (1)..(235): unsure at all n locations
  Clone ID: PAT_MRT3847_84634C.1
atagctannaanccgaagaccaanaacnaaaatagacacnncnanaancattcatcnaaaaagtaagnanaaggncaaagannanaagaagctcacatagacacaggataaanaatacnagancacagactacgaccgncgncaacataagaagnanagaancataangaaanaaanancagggncnanaggatcgnnnaancaggaatanannaaaaagattgaatangtggtn

SEQ ID NO: 125832 - DNA, 374 bp, Glycine max
  Clone ID: PAT_MRT3847_84635C.1
aaattccacggcattctctatgggatggggtttattttagaagatgaaaatagaataaaagtatttaaattaaaatagaatgtaaaagatgcgaaacccacgtaaaatcaatattatttcctccctatttctctccccctcccctcagacaaacaacacaacataagtgtgacagcataaggatgaatatatacccaaattagtcccggataaaagaattcattggtctgttttgtcatgtcaattaaccattatgttcttgtatatgctgctgttgttgaaggctgactaattagtagtatgctccatctgtgttctctacaaggcttgcatgaatgcctatctgaattatctttccatactataatactgct

SEQ ID NO: 125833 - DNA, 331 bp, Glycine max
  Clone ID: PAT_MRT3847_84636C.1
caacccccttaaaaccaaacggacccatataaaaaactaaaacacggtcccttggcccacaaaaaaaaaaaaaaaactaaaacacggtcccttgggccacagagggagacccaacggggtttttggtttggttaaaagggaacaactggaaaaaaacagagttggcaaacggggttaagggggggccttaaatctaaacgacccggacattctaataaaagggggggggagaaaactgggaaccggggacagggaaaaccccgggacccaggggggtttggagtggtccggggtacccggggggggggatctaaaccctcgaaaggaagtc

SEQ ID NO: 125834 - DNA, 354 bp, Glycine max
  Clone ID: PAT_MRT3847_84637C.1
aaaaatgacccaggtggaccctctggaagaagccaattttgatcaggagctcaaggctgtagtacaggagagtatggaacagcgaaggcaggagctacgaggtcgtcctacattgaacatgatgattccaatgaatgtatttgagggatctgccaaggatcaccatgggaggggagttggtgggaaagtggtgatgaggccctggatgaggaactggaggaaacaaagaggttcaggtgagagttcttgtgaagcgtggaaacaagcagcaaacaaagcatatgttcatcccacggaattcctcactggtgcagagtacaaaacagaaagaagcagcagagcttcaagagaaag

SEQ ID NO: 125835 - DNA, 592 bp, Glycine max
  Clone ID: PAT_MRT3847_84638C.1
ccacgcgtccgcccacgcgtccgtacggctgcgagaagacgacagaaggggacactcaagcccctcactccaaaacaaaacctaaacattttactcttttcggttttttttttttgtttcacacatgccgtcgtcgaattccggcgagagtcgccgagcgagcaagccgcagagctcgggcggagcggcgccgccgccgccggagcaggaaaacccgccgtgcccgcgatgcgactccaccaacaccaagttctgctactacaacaactacaactactcccagccacgccacttctgcaagtcctgccgccgctactggacccacggcggcactctccgcgacattcccgtcggcggcggcagccgcaagaacgccaagcgctcccgcacccaccacgtcgccgccacatcatcctcctccacctcgtgcaccatgacgtcagcacaggaacaccacgcacacactttattggcccccgtcgcctccacgcactacggagtacttgacggcgacgttaaacagactagcaacggcaacggtaacgtgtgcgggagcttcacttcgttgctgaacaacacccatggctccggg

SEQ ID NO: 125836 - DNA, 162 bp, Glycine max
  Clone ID: PAT_MRT3847_84639C.1
gccacgcgtgcgctcttatctactctatctttatgagaatattgctatgcttgtggctaggggcactgctgcaagtgcgactgcatgaacctcacatgcaacccaccatcattgaacattcaacccaaacgcaaactgcttacactttatctctttttaatt

SEQ ID NO: 125837 - DNA, 487 bp, Glycine max
  Clone ID: PAT_MRT3847_8463C.1
cggacgcgtgggcggctgcgagaagacgacagaagggggcaattaatctgcatttgcacgaacctaacctactatcgaaagtcgaaacatcccctgtcactttgactcaactcacacaccaatctccatatccctaccaattttccctattcactcatcaattttctcgtatcaggtttgatctgaaatccaggattgctacttaggtttgcatcaatataatctgacaagagaataattttgtggtagtgtagtccaactgtccaacttagagcaggcagcatggaggatattctgttggataccaggtgggaagatgtaatctgccccatatgcttggaagttcctcataatagtgtgctccttcagtgttcatcttatgataaggggtgtcgttcttttgtatgtgacacaagtcagttgcactcaaattgcttggatcgttttaaaagcacacatagcatgccatcctctttcacatatgatt

SEQ ID NO: 125838 - DNA, 378 bp, Glycine max
  Clone ID: PAT_MRT3847_84640C.1
ggggaattcatgcgatcaatgatgggatactactaccctttaggtatctgcgctttgaacgggggaggatgcgctgagtatcaagtttgctaggatggaattgaccgcgcggcacgatgctttagttggctgtcacaattgttaatggattgtattatgaatctttgatatgctatacatgattgacctgatcgaacatttacgtgcttatgattggatcgacaagctaggaacgcacctgataggtgtaagaatcaaggatcctgcattgggatctacatctacagatgatgagttcaggcataagagcatcatgtggagataccatcgtggacaatgttctgggatcacaaagtgatcatatgatgggtatgaata

SEQ ID NO: 125839 - DNA, 444 bp, Glycine max
  Clone ID: PAT_MRT3847_84641C.1
aaggagacctaaggaggaatgatcctatgagaggtagttcagtatataactccctatgggataggtctccagggttaatccataataacaatgttctcgagtttaggtctaactctgaggatcagactgtagattgagcatcaaaaggataaggcatatatcatatgtaagaatcatgcaggacctggcaatgactaagggccacttagaagatctaagatttgagagctagaataggcacttaactcatctcgaggatcataccccctaatagataggacgatagaggctgatcttctcttgctgagagaacattctgccagcaaatctatggggagcatctattaacaaatactgattcagaaagcttcagcattgtctgccagactatagagactttacatactacaccatcatttcagactcctaacaacagagccatag

SEQ ID NO: 125840 - DNA, 129 bp, Glycine max
  Clone ID: PAT_MRT3847_84642C.1
ggcggcactcgttttcgttctcatgctggtttatacatctttgctaacgaggtttacagcgctcaacctacgatgcagaacgacgacggacggatcacatgatctttacattcctatgaagtgctccgc

SEQ ID NO: 125841 - DNA, 211 bp, Glycine max
  Clone ID: PAT_MRT3847_84643C.1
tcgaaaaaaaaaaaaaaaaacaagaaaaaaaacaattgacaaaaaaacaattaaacaaaaagattagggaaaatcacaaacgggtttacgagctccaaaattacgtacccttcctttacagtcatactacaattttttagctgcccctctgtttacaaaactgggtctcgtccaacacctgtgcaactgcaataacttttgttttccccca

SEQ ID NO: 125842 - DNA, 197 bp, Glycine max
  Clone ID: PAT_MRT3847_84644C.1
gtgacatccttcatatttgggacgtcattttaagtgatccagagggtccacagcctatgccaaatggctttgataggcctttgccagctattatgcccagtggaaggacctgagattcttgctgctgcccccaagatacggtgttggaaaaggagacacttctcagaatatgctgcgcaatgctaattctggttcgt

SEQ ID NO: 125843 - DNA, 210 bp, Glycine max
  Clone ID: PAT_MRT3847_84645C.1
acggaagggggggagaccgccgcattttggcagctacagagaggaatgagctcgactcgtctaaattgaccttggatcatcgtctttggggccgtctccaatacgtttttcgttggtcatcttaaggcttcttccagcatgaacagcccggccatggttgcttacgagctcaacgcttcgcacaataacgtttcccacttcgtgcttttt

SEQ ID NO: 125844 - DNA, 355 bp, Glycine max
  Clone ID: PAT_MRT3847_84646C.1
tttcgataagatacaaaatcttgcacattctgctgccttgctgggtaacaaatctgtgaatagaatttgttacagcagtgagtggatgatgatttgaaacgacgggttgactcacaaggatctctcaactctaatagctctacctatatatatgagttgtatacttatatcaataagacagggttgatgcagttataagagttgtatctttgcctcaaatccttttataccatattcgcactcaatctttcaattttgattttcctccttgtgatgttaaggtgaaatattgtgaataattctgaagtatttgttctctattagtagtaaaagaatggttcatttgctatcaaaa

SEQ ID NO: 125845 - DNA, 298 bp, Glycine max
  Clone ID: PAT_MRT3847_84647C.1
cttttgcatacaatgatattttcatgaaggtgccatgtgctatcttttaaatgttgagatattaatgtgggatatctacaccacaaagttgatgaaacgacttgcgcctagatctattggacaatctctttcttgatagcatttggaaagcaggctgatgacaccatcactcttgaggcattaaaggacagattgagacggtgggcacagatggaatacctgagaatacatgaaatagtaacaggatgagctatgaacagcttgttcaaggtgcgtgccagctgtgacatctacacca

SEQ ID NO: 125846 - DNA, 440 bp, Glycine max
  Clone ID: PAT_MRT3847_84648C.1
gtttccgtctatctacctccctctctgccctcacttcttcccctttcccccacgccacgctcgcgagtaagaggacttgctacttcaattcaagggttccacaaacaacaacaagccttttttttttttttcatgtttaaacaatgaaaagcaagcttagacgatattattcactctgactccgagctatacaccaccgagaccgagcagtgtttcactctcatttcacttttctcctccctattcccaaactcgcgcttaatcacgtcgagggcaaacaaacctcgaatttgaataaaaaaaatgaggtttgacgagaacgctatgaattggattggcgctaccgttggtgacctcgtgggcacagtgggtgcaatattatcactaaaagataccaaagtggcgattccgtttaccttcgctgcaaacaatagtagctt

SEQ ID NO: 125847 - DNA, 268 bp, Glycine max
  Clone ID: PAT_MRT3847_84649C.1
ctctctgaaagactctattgtggccttgtgactaagggacttcactactttaacttgatgaccagtgtgtataagattgttcctgattcaggtcagtctacctgccttgctgaccttcttggacgacgaggtcttattgcgtggtttgggaagccttgaagttttgccgagggatgctgattcttaacgttaagagcattcattggatccggcagtatacttgtcctcctcgactggctaactgggctgcagaacagctgtctatcca

SEQ ID NO: 125848 - DNA, 660 bp, Glycine max
  Clone ID: PAT_MRT3847_8464C.1
aatccggatatgctacctaacctcatactttccctaactgcaattaatctgcatttgcacgaacctaacctactatcgaaagtcgaaacatcccctgtcactttgactcaactcacacaccaatctccatatccctaccaatttccctaattcactcatcaatttcctcgtatcaggtttgatctgaaatccaggattgctacttagttttgcatcaatataacctgacagaggaatgtaaggagcatgccatagactatacaaacacacactgctgttatttacttgatgtaagtggcctgtgcttggtttcagattttgtggtagtgtagtccaactgtccaacttagagcaggcagcatggaggactttctgttggaggcctggtgggaagatgtaatctgccccatatgcttggaagttcctcataatagtgtgctccttcagtgttcatcttatttggatacctgtcgttcttttgtatgtgacacaagtcagttgcaaaacttaataggatcgtttcttcagcacacatagcatgccatcctcttcaacatatgattcaaccttgtctgttgcactcaaattccatggcaaatagtgagtcaggggtatctgattgtcaatacaagctgagttgtccgttgtgtagagggggat

SEQ ID NO: 125849 - DNA, 468 bp, Glycine max
  Clone ID: PAT_MRT3847_84650C.1
ctcccgctcgagatcggacctggagaccagtttcttatgtacgcctatgccacggacgagaccctatatttgatgccattgagttatgttcctcaactaaactcggtgctctgtttacccaggcttgcaagatctgaacctgaccatggctgacgcctgatgggaagacccaagtgactagcgggtcttacaatgacaacgtttccatggctccagatgagactcacactgagcttatttacacccaacatgtttggactgagaccagcgactaatttgcaagtgaccttaccgtgcacgtgagcaacccggggaacccggacatgctccttgatcagaagaccatcatacactcgaacccatccggccgaatcgtcattggtggcccttacagtgatgctggaatgaccgctcggaagaccattattgatgcttacccaggatgagctgctcatggagatattgcct

SEQ ID NO: 125850 - DNA, 719 bp, Glycine max
  Clone ID: PAT_MRT3847_84651C.1
ccacgcgtccgaagaaattgaagataagaaaactgatagtgtggaacaggtagaagaggacaagaaagttggtgttgtggaagaagcaaaagaggataagaaagaagatggggtgaaagaagcaaaagaggataagaaagaagacggggtgaaagaagcaaaagaggataagaaagaaggggtggaagaagcaacagaggataagaaagaagatggggtggaagaagtaaacgaggataggaaagaagatggggtgggagaagtaaaagaggataaggaagttgatggtgtgtcatgtgtgaaagaagttgaggaggatggggaagttgatggtgtgaaaaaagtagaagataaaaaaggtgatgagttgaaagaaatagaagaggataagaaagatgatcatatatctgaaaatgataaaatggatgaagacactgagattaaggaaacaatggaaggtgaaccagaaaatggaaaagaggaatctgagaaaccagtagtagatgctatggaagtggagggtggtattaaggagaaggaggagagcaaagaaaatgagaaagttgaagtggtgatggaggaggatgagaaggatgaagatgaggataaggataatattgataagtcaaaagaagagaaggcagaagatagtaagggtgagaaaggatcaaaaaaacgtggagagggaagatcaatgggaagaaagtgaaggaaaaagg

SEQ ID NO: 125851 - DNA, 1493 bp, Glycine max
  Clone ID: PAT_MRT3847_84652C.1
gactgacagtgccagagagagaaagacgtgtgaagtgtgagtgaagaagctcttgatgttttctcttgcaacctctgaatctgtaggcttcagttgtgctatttaacagtgtagggcattgtgtgcttaggaaatagtaagtttgtataattactgtaaataaaatcagtatgggtgaggaagaatcagtgaatgaagtttcaaagactgattcaaatggaaagagctttcaggagaaaactttggatgaaattactgagaaaaaggacttggaaactgatggaggaaaagtcttggagaacaatggtatcaaaaagaatattgtaaaagaaattgaagataagaaagctgttggtgttgaaaaggtagaagaggacaagaaaaatggtgttgtggaagatgcaaaagaggataagaaagaagatggggtgaaagaagctaaggaggataagaaagaagtggtggaagaagtaaaagaggataataaagaagatggagtggaagaagcaaaagagaataagaaagaagatggggtggaagaagtaaaagaggttaaggaagttgatggtgtgaaagaaatcaaggaggataaggaagttgatggggtgaaagaagtcaaggaggataaggaagttgatggtgtgaaagaagtagttgaagataaaaaaagtgatgagttgaaaggtcttttcaggaaaaaaaatgaagaaacttgataaaggaggaaagcaaaagacttcaacaccaacaaagtctacatccaaacgcaaccctgaaaaggttactagaggaaaaggcaaaaagaaagagaagtcgagccccagtgacaatcagttgcgtgatgcgatatgtgaaattcttaaagaagttaacttcaatacggccacatttaccgacattctgaagaaacttgctaaacaatttgatatggatctcactccgagaaaggcatctataaaatccatgattcaggaagagctgacaaaactagctgatgaagcagatgacgaggacagagaagaggatgctgagaaagatgaagccccatctacaggccaagaggttgaaggctgattgaagagtagacttaactgcttggagataggtttagcaaggtactataaccctaattatgcatgcttcatctgtacactatgttgagtggaagtggctatagcttactcttagcattcatccaatctgaagagaacaaacttgtatttatcaatttaggcttttggtgggctgccagtgtgcagcttcttgtttatatatcaacagaatttgtagggttttaaactgttcatgaatactactgaccaaaactgcaccagtctcaagaatctgtctctagtttaataaacattttacctttgtagttgacaaaaaaaaaggacgacgggcctttccgtgtatattgataactagtcccgggataaaagtaattatctcgggtgtcaatagatggctcgttcattaccagtaactgcaat

SEQ ID NO: 125852 - DNA, 1519 bp, Glycine max
  Clone ID: PAT_MRT3847_84653C.1
accaataaagatgtcgtgctaaagcacagtgagattcggggagaacactgactgtatttatatattaaacgatggaagcacgcgcacaccttgtgatcagagaaagtgaaagtgtctgagagtgtgtgtgtgacttatggagtccaattcagagttcgacgtgattatcatcggagctggcgtcatgggcagctccaccgcctaccacgccaccaaacgcggccttaaaacccttctcctggaacagttcgacttcctccaccactgtggctcctcccacggcgaatcccgcaccatccgcctcacctatccccaccactactactaccctttagtcatggactcttaccgcctctggcaagaggcgcaggcccaagtcggctaccagatctacttcaaggcccatcacatggacatggcccatcacaacgagcccgccatgcgcgccctcatcgactactgccgcaacctccaaatccccttcaaactcctcggccgccaagagctcgccgacaaattctccggccgcatcgacatcccggagggttgggtgggcctctccaacgagcacggaggcgtcatcaagcccacaaaagcagtggccatgttccaaaccctagcctacaaaaacggcgccgtcttgaaggacaacaccaaggtcatcgacatcaagaaagagggcggcacaggtggggtcgaggttttcacagcggggggtgaaaaattccgcggtagaaaatgcgtggtaactgtaggggcgtgggcgaagaaattagttaaagccgttagcggggtggaactgccgatcgagccactggagacgcacgtttgttactggagggtgaaggaggggcaggaagggaaattcgcgatagggagcgggttcccgacattcgcgagcttccagaaagatatttacgtctacggcacgccaacgttggagtttccggggctgattaaggttggtgtgcacgggggggagccgtgcgacccggataagaggccgtggggagcagcggtgatgatggaaaaactcaaagaatgggtggagtttacgttcaaggggatggttgaatccactgagcccgtcatcaaacagtcttgcatctactccatgacgccagatgaggatttcctcattgatttcttgggtggggactttgggaaggatgtggttcttggagccggcttttctggtcacggcttcaagatggctccggttattggcaggatattgacggaccttgctgtccatggagaaactaaatcccatgatatcagttactttaggattgcaaggttccgtataacctctatgatttagccttcttttcttctatttaaataaatgcatctccttccaccctttccttttctaattcttgtttaccagccaccagcttttgctttgcttattattattaatgtaagaataaaacaactgttgtcacgatatctgcagataaaaaaaaaaaaaaaaatttataaatataaaaaaaaaaaacaaaaaaatatctag

SEQ ID NO: 125853 - DNA, 472 bp, Glycine max
  Clone ID: PAT_MRT3847_84654C.1
ctatctttttgtttgcctgttaattggtgccataacctgctgaaatgcatcgaatatgacgcctgtgcacggcgggaccagtcccgaacccgacagctgggagagggctgttcttgctgcttccgaaaaatgagctggacggcacatgcctgtcgggggcactgattgctaacgggcccttcaatgcctcaggcctgtccgtctaacataccactcagggcaggctctgacataggcaaagctactgtgtaataaaagcactgcatggcgatggctcctgcttatggaccctctttgtgattactgaccagatctgtgagtgtcaaaatggggacctgcaaccacagcgctgttgagcatgctgttacaactatggactctgttatcggaccctaaggcctctatatgtaattagtgcctcccccgaagggatgagcgagaccctctcacgacctggatgctatccagtaca

SEQ ID NO: 125854 - DNA, 271 bp, Glycine max
  Clone ID: PAT_MRT3847_84655C.1
cgacatactcagcgtattaccagatggctctaagatggatattaccaaagtctatccattgaatgcatgttttgacgatcgcgatgatcttgcctgtggatatatgcacaactagagctatggcggatcatctaaacggacagttcacgaagttgctcaacttgctaacgaagactttttcagtataaatatccttgagcactcacttgccagtgtagccaacgtgatccgaccattggtggagacatctcggaatgaggatctcgatgca

SEQ ID NO: 125855 - DNA, 655 bp, Glycine max
  Clone ID: PAT_MRT3847_84656C.1
attccccggagcgacccacgcgtgcgtgttgaaccggctcaggtgattggaagtgagggcctccgtcacactcacagtcagcatcgaagatcggagacgaggcatgagttgtgtgctaactactactcttcaaaccaaacacgcatcgccacaaaaccccatcagcggcgcaatttagcatcaatccgatacgacgccgtgtggagcacgatggagaagatgcagcacgcggaggagcttgtgagggagtttctggtgttccgcggcttcaccaacaccctcgaatcctacgaggccgaattgcgcaccgacatcggaaaaggattcgaggtcgacaagatcctcgacctaatcttctccctctacgtccccaagttccacgccgatagcctcctcgcgctcctcgctttcttcaagcactacctctcttcctcctccgacgcgccgcttgcctccacgctctctaagttggagacttctcttctacgcttctacgtcgtccacgccgtccagtgcaaccgcaacgacaaagtcgtcgacttcttcacgctctacggcgccgaattgctgcagaggtcccaagattggactaactggttcgctattccttataagaagaatccacacttggatcccgagtttcgggttttttttt

SEQ ID NO: 125856 - DNA, 278 bp, Glycine max
  Clone ID: PAT_MRT3847_84657C.1
ggctctgtggctctctacatgtcagcaatcagcgcgaaacaggctctcgaagttgccgttaacgctgctgtttgtggatcaaaaggtcacagatattgtccagtttcccaaagggtcctcctaagattaaacgacaataaaatcgcttacacactccacctcaacgattgcagtagtatacccgtaaggtttttgggtgtgaatcccaaagggaacgttccactggttccttttgatggcaaatgggtggctgactctgatgtgattgtggggatact

SEQ ID NO: 125857 - DNA, 1317 bp, Glycine max
  unsure (1)..(1317): unsure at all n locations
  Clone ID: PAT_MRT3847_84658C.1
cgggccggaataccccgntcgacccacgcgtccgtgccctggaaattgtttctgatgtgtctgattctgtggatggggttggtgaagtgcttcagcctgattctgaagacagagatgcccgtcctgtaaattgggagaccgatgcatcagaagttcatcctcccactgaggctagtagcaatggtattgttagtctttcatctgtacaaaatggaatggctgagaaaaggagcagtttagtaatggatgacagttcttcaacatgttctactgattcattaccatcaatggtgatgaatgaccactacaaggggaactctttttcaaattacaaagtccaaaagtcacctaacagaggtaagaaccaagtaaaagcatcgtgtaatgtggacagttgcacaacagaaatggatagtcagccgtccggttcttctgcagatgctgtagatgttaatgagtctggaagtagcaagttaggtggatctgagcctgagggtgctgttctctgcttgcaggatcgattaaagtggcttgatcagcctgtcatcagaaaggaagaggatatatcttcgctacaaaagaaacaaaccatcaaagaccaagttaacatagaaagaactgtggataatgaaagcctatcaaaagagaagaaatcagcggtgccatcctcatctagtagtcctccaagaaacttacctgttcaaatgaagtcagaaaaccaaactagagttactggagatcctgttcatgtcaggaaaacatcttttggtgtctcacaatcaactgataaagaggcgtcttcatcttcaacttctgtatcacaagtaacaattggtccaaaaacagaaatccagaaagcttcacccccaagactaaccgaaagatccatggcacaagtggctatgttgtcaaggccatctagtgctccactagttcctggtggtcccaggcccactgctgctgttgtctccatggttcaaactgctccactacttgcacgctctgtgagtgcaactggtcggttaggtcctgatccctcacctgctactcatagttatgttccccagtcctatagaaatgcaataatggggaatcctgtggtgtcaactgctgccagtcttcctcattccagctccagttcaggagtaaacccatctcctggctattcacatccacccatggtatcatccccactatttatctcccggagctccgacaaaatggattcaaatacttcccagtctggtgttccctttggtatgatttcacgggatgttttacagaacggacctaattggattgatagttctcaaaggg

SEQ ID NO: 125858 - DNA, 484 bp, Glycine max
  Clone ID: PAT_MRT3847_84659C.1
ggcggccgctccctcgcctaacgaagagaacgtgtacatggcgaagctcgccgagcaggccgagcgctacgaagagatggtggaggtcatagagaatgactccgccgccgccgacaacgaggagctaaccgtctatgagaggaacctcctctccgtcacgtacaaaaacgtgatcggagcgcgccgcacctcgtggcgcatcatctcctctatcgatcacaaggaagagagccacagcaacgacgaccacgtctacgtcatccgcgactaccgatccaagatctactccaatctctccaacatctgcgacagtattcttaaactcctcaactgtctcctcattcccttcgcttcctcctacgagttcaaagtcttctacctcgatatcaaagcagattacccacagtacctcatcaagttcaagaccagcacctaggctaatgaagctgacgacaacactctgtttacatacaaacccgttcac

SEQ ID NO: 125859 - DNA, 346 bp, Glycine max
  Clone ID: PAT_MRT3847_8465C.1
ataatttctgcaaaaggactctagttatagatggttagtttcactgttcttaatattctactgaaaatcggtcatttaaaatggccaagagttcacttccaggtgttgctaggtgcacccagcattattgctggtgcacccaacacttaacatgaaaagacagaaatacccctatatatttttaaaaatgtttttgtgcacccagcaactccccagccttttcttattccgccattttgcttcttctattcgtacttccgtgcattcccttcttccgtgagccatttggtcttctttcgcgagctgagcatcaattattcgcgacttgcttctttttcttccgcga

SEQ ID NO: 125860 - DNA, 262 bp, Glycine max
  Clone ID: PAT_MRT3847_84660C.1
ttttaatgataggaaaaaacaatgtaggggggggtgaaacctggagagagtactcaacattgacaaacaaagctaatcctatgtgataaaacataaaaaatggaattgagcgtcacacatcttaagagggaagagaatatactacacccaaattacaacaaaaaaagatatcatactattgatagggggggggggaaaactcaaaacgggagagatatcctaggccagcttacagatttcgacaaatgtgatgtaaattaaa

SEQ ID NO: 125861 - DNA, 721 bp, Glycine max
  Clone ID: PAT_MRT3847_84661C.1
ggatttgttcacatcctcaacggccaaaagtctaggtcaactgaagcatatgtccatacgggattgccaagcaatacaggaaatagtgtccaaagagggagatcatgaatccaatgatgaagagataacatttgagcagctccgtgttttgtctctggaatctttaccaagcatagtaggaatttactcagggaagtacaagttgaaattcccatccttggatcaagtgactttaatggaatgccctcgaatgaaatattcttatgtacctgatttgcatcaattcaagcctcttgagcaaatttaattggaagagcagaagttttagggaatccatcatgcagtactcattatacagtcacaatgacagtagtgggtgaacgttgggaattcttcttcccgtatgatgttgatgcatcatgggacggaatcttccaccttaggctttgttgggagaaggactactctgatggatcatgctgctactcttctctttcatctcatcccagtggtattgtcgtagtaattaatagttatggccagcctgggaagtggtttatgttgttagccccactccttgttttggatgtttacatggatttttatgtatttattttgggcaggcacatatattttattttctagttttcgttcttatgtttagagtttgaatcatgttggttttatattggtcacaaaaaaaaaaaaaaaaaaaaaaaaa

SEQ ID NO: 125862 - DNA, 1233 bp, Glycine max
  Clone ID: PAT_MRT3847_84662C.1
gcccacgcgtccgtacggctgcgagaagacgacagaaggggagactagagagtgagaggtgggaaatggcgtacctgaacgctaggcgcaccttagcatctaccctgtcacgagctctttcttcttcatccgctagcgcctctcgctttcgcttcgcattcgcattcgcgttgctccccgccaaacaaaccgcacccaaccctcactgggcgagtttcgcggttcggactcaatcttcgggttcgggttactcgcccctgaacgacccgtccccgaactggagcaaccgtcccccgaaggagaccattcttctcgatggctgcgactacgagcactggctcatcgtcatggagttccccgataaccctaaaccctctgaggaccacatggtcaacgcctatgtcaaaaccctagctcaagtccttggaagtgaggaggatgccaaaaacaagatatactctgtttccacttctacatacacaggtttcggcgctctcatttccgaagagctttcttataaggtcaaagagttacctggagttctttgggtgctgccagattcatatcttgatgttcccaacaaggattatggtggtgatttatttgttgacgggaaagtaattcccaggccacagtatagatattcggataggcaacccagtaggagtagacctcggccacggcatgacagacggcgggaaacgatgcaggttgaaaggagagatcaacagaactggaaccaaggtcaggggggacctatgcagccatccactgcaatgaatggccaaaactttgcttccggtggagagcactaagaaatgcttaataggaactctgctttagaaatcatcacatatagaaaacagaaccatgtttttcttatgggggagtgatgatttaaggttctgaggtcatattttacttatgtcttttttgtgtggagaatggctgtgcctgaccatgaaggactttgataaataatatacgctcataaagttaatattttacttttgagaagttgtgtatgctctgctgatgggaatgaatttcgtttcagtcttttccctacatgttttaatatgtgatgtgtaatttggatcactggctgttaaagttgatagactttaaacaaactttgtttttgcatctgaacctgttctcaatgtcaatgccctgtgttatgtttaaagtgtatcataaaaccttaaatttcaaggtaatctcgttcctttt

SEQ ID NO: 125863 - DNA, 487 bp, Glycine max
  Clone ID: PAT_MRT3847_84663C.1
cccccctcgaccacgccctccgcttgaatgtatagcactgttttctttctcatattcacactctcaccctgctcctctgagctagtgatcctgagactggtgtactgcctcttacagagcacctcttctctcacctctcaaagaacctctatttcatagcatgtccgaacccatttctacactcttaacatctgtatttcaagttgcctgtccgcagacaacctcgcattgctgcatctattgttcgtgctcttcttccatgactgactttgttacaaggctgagaatggttcaatacttactctgttcacactcgcatgcttccagggcggagcacaactgccctcttgataacaactacttcaatgctaactcttgctaagtcaattggaggctattcattgcctgaggtgcgtatgaacatatgcctctgcttgcagcacctctatgtgccctgattatctatgcaccattggcttcctccgta

SEQ ID NO: 125864 - DNA, 279 bp, Glycine max
  Clone ID: PAT_MRT3847_84664C.1
gggaacgggggggacccaacttttattaattatgggaaaaaaaacccctttcaggcaaacgtgaacaaaaaaaacaggtgtcttcaattacttcaaccaaaggggttaacaaaccacccgagtataaccttagggctggtaacaaccaactaaaatgcagggtggcaaaactatgattttttattataaagcccctaccctacattgggggaaacttgaaaaccactttttttcatccaaattattcaaggcaagggggaagcaccataattgcctcaa

SEQ ID NO: 125865 - DNA, 369 bp, Glycine max
  Clone ID: PAT_MRT3847_84665C.1
ttttttttttttttttttgggaaaattcaacttgcatattccaacttaggtcgtgattttaactgcacaaatcataccccttattatgttagtaattcttacgttaaaataactagtgaaaaaatgtttaaaaatttaaaaccgttagatgcagaactgcacctcatatgcatttcaggggctaatcttcatcaacttattaccctatgtaaacaccaaaacccataataattataagataattaattaattaaatacatttttaagtaattaaaaatggtttcctatcaaaggaggttagatataagggacgtttgtttcatggaatcttgatagatttttaaaaatatatatctttatgtttggtat

SEQ ID NO: 125866 - DNA, 366 bp, Glycine max
  Clone ID: PAT_MRT3847_84666C.1
ccaacaaacttttatttaaaacccgggcccggttcccatttttttttttccccccttccatttgtccaatggcaagcaaccccccgggtggggagaaatattttcccccccccttttttttttgggccccaaacttttttttttttaatcccccccttttgggttcccttttttttcaatggccccgggtcccccccctttgcaataaagggaccccccttttttttgaagcccctaaccccataaaaatggatttttctttaaccaccccaaagcatttgttaaatttaaaaaactgggggcccccagccccaaacccattttttccccccccaaaattaaacaaaacctttttggtttttgggg

SEQ ID NO: 125867 - DNA, 259 bp, Glycine max
  unsure (1)..(259): unsure at all n locations
  Clone ID: PAT_MRT3847_84667C.1
gctatattgttggtttactncactgctctatcatataccggaggggacatcaccaaacctcattattaccttaactgtaaatgcttaccaagtcttaacaataaaactaccagatatcatacattacacttacaatgatagatacagcatcacacacaatttggtgcttatcatgaaataacctgacactcctattatacctaacgagactcacttttttgcatatttcgacagttatctactcatacacctttctacc

SEQ ID NO: 125868 - DNA, 327 bp, Glycine max
  unsure (1)..(327): unsure at all n locations
  Clone ID: PAT_MRT3847_84668C.1
cnnnccncnganttcggtcgagtatagttntgcatagtaaatnnactgnantgaagctatctatatagnagcangtgttgatttaattacttcantttacnnacnanttatattanttagncgnatttntaagctcnttntctatctatntagtagggaaaattaanatgtctngcagaaggtccaggcagnaatctncatccacaaggatctcngatgacgaaatgatcgactcgtttcaaagttgcgtgaattgttnctgngattcgcgataggcgtctgaaaangtatnagcatntaaggtctacaagagactgnaattactcc

SEQ ID NO: 125869 - DNA, 321 bp, Glycine max
  unsure (1)..(321): unsure at all n locations
  Clone ID: PAT_MRT3847_84669C.1
cacacgtacgtanacntaagcattcgagattcgagctcangnncgaagntntnaantgacgntnacgntgangnngaacaccggntcatangctcnaagctccaatanctatcaagantgntactnncactacnacgaatnccnnntaagantnntanggggntcnngnnnnagngtgnngttgatgagtatgnagcacgtgtcgatanntgtagntnntntnntnntaataatcatnncgtnncngcngctgcnactnctgatgattacggncagcggnnaaccanttcgcangcgtttccnannnnnatctcnggnggg

SEQ ID NO: 125870 - DNA, 364 bp, Glycine max
  Clone ID: PAT_MRT3847_8466C.1
agggaagccagattcacttatttgggctaaatgactaatcaactacaagctttatgaaacattggtcttaaactttgtaacaaccagtcataaaaaacaaacgggagcaaaaacgtgacaaagacataaaaagaagcttttattggaatacataccaggagtttaagttttaagagggaatcaaacgttccttattttaaaagctttccttccttaaaaggtgttcctggggctttgcttttccacttggatatcactttttggttgctggctcctggcttttttttgctcccattctactccttttggacttttccccttctttctttttccttttttctcccaccgggttgggtttttttta

SEQ ID NO: 125871 - DNA, 320 bp, Glycine max
  Clone ID: PAT_MRT3847_84670C.1
gaattcggcacgagatcaaaatgacttgtaaatttagtaagaagttaatttatactaaattcatccatataatttatgcatgaatattatatattaagaagtgtaatgtatactgagtagttaatttataccaaattcatcctgataagactaggggtagcagtgaatgtgttcctttgtgcatgtggtatatgaaggattggataaaatttttttacccttcacaattgatgttaaacgttgcatcagctaccaagggggtctagcttagttgattgagcagagtgtgtagcttttgtaaccccccgggacagtctata

SEQ ID NO: 125872 - DNA, 297 bp, Glycine max
  unsure (1)..(297): unsure at all n locations
  Clone ID: PAT_MRT3847_84671C.1
gcggggccgccctanaaatanaaaaaaaagttttaaatttttgnnnnngnnnnttnnggcggacctggtttcattggataggggttgggcaataaaactctccttaaactacaggtacattggcaattttttttgctcaaaaagtaattcacacacaacatataaaaaatggtaactgattatacatcaatattgtgcgagaaaaaaaataaaaattgtttttagaaagatttcataattacaagatttagaagccggctgttagcttttttaaataaaatggacagggttcaactt

SEQ ID NO: 125873 - DNA, 279 bp, Glycine max
  Clone ID: PAT_MRT3847_84672C.1
cgccctttctctctctttttataatcattcaatctctattactaaatcatcatagcacttattttaaacacgatggttggggtacttgtgagctaaaattgaaaaatatctatacatacaaagggctcccgtcatatttgtgcagatcctgcatccatatctttctaaactgtggcataaataacagaatgctttcttcctaatgatcacttgaaaatgactttaacaacatattctaagaatcatagaatggaccaatttttggagcatattccaatt

SEQ ID NO: 125874 - DNA, 256 bp, Glycine max
  unsure (1)..(256): unsure at all n locations
  Clone ID: PAT_MRT3847_84673C.1
gtgtccaactttgaacgcactttgatactgccactttctccacaacatataaaattgttggagatganaagngaatcccctgtgatctctcacacaattctagttcctctggatctacatntngatcggtagatctcgaacatgagtactggggagcttctcagcatctaacctctcgaagtcaagttatcctttgaggtgaagaagcagatctcatgattgcttcagttgtcaaataggaccgatacctatgtag

SEQ ID NO: 125875 - DNA, 271 bp, Glycine max
  Clone ID: PAT_MRT3847_84674C.1
agaaatcgtacaaagtggccaagcagtttctatgatagggggacctcttgctgctgctctatcctcgcccattcggatgagtactactaacgtttatggaacggcagctacggcggttggagactactgacctagtcagtatatggcagacatcggaatgaggcctaatgcggtgaaggttccgtgtgtacagttcaccacaaggttgtacactggctcgctgcaagtggctgagccccatattccaacttattattttttatataattct

SEQ ID NO: 125876 - DNA, 792 bp, Glycine max
  Clone ID: PAT_MRT3847_84675C.1
ccacgcgtccgaaaagactgattggctttggcattgagactaacactcacttttactgaatggaatgtatctgtatttctgtaattggattttggagaagctgtgcctagtgattactgtgttgtttagaagttctgttacttgccttatttagggttcccttcccctctggtcccttctattgttatttaacgttgttcggtgcttcaattttccattagattatcctcttcatcaattattagcctcagagctaacatatgaaggatataggtttaaacatctgcaaacgaattaggttgttgttactgacgacagaatgtcggaaggaaccagtctggtgctggaatcatctgaaaatggcacagatttgtcacaggatgacattggcaccattgaggaaataccagaggaaacaattctgtctagacaaacttctgtcaaccttggtccttttattggccaaagatttgtatctcaagaagcagcttatgaattttattgcagttttgctaaacactggggcttttcaattagacggcaccggactcgagggaaagatggggttggcaggggagtcacgaggagggattttacttgccatcgtggtggatatccccagattaaaccttctgatgatgggaaggtgcaaaggaatcgcaaatcgtctcgctgtggttgtcaagcatacatgcgtatcgtcaaaagatcagattttgatgtccctgaatggcgtgttactggttttaggaacattcacaatcacgagttgttaaaatccaatgaggtgca

SEQ ID NO: 125877 - DNA, 258 bp, Glycine max
  Clone ID: PAT_MRT3847_84676C.1
caagaaattgagtgttttttagtagaggctcctaatcacatagcaattatctaatttttctctcttttattgtttcttttgtgttaaaacattaggaatttaacttcttttgagtttttgttcaatagatgctaaagttaactaatttacaatgttttggagtgtatttttttatagaattacacagtaggaggcctggaatggcattttaattactacttggacaaattggtgtacttgccaatcaaactaacactt

SEQ ID NO: 125878 - DNA, 260 bp, Glycine max
  Clone ID: PAT_MRT3847_84677C.1
ctcggaattcggctcgaggcgtgaagctcgtcggtttatccttgctcaaccaattgaacaatcgcattcagtcgaggggaatttatacgctatgcgcttgacagtttaaaactgaagcatggtgctctgcctcaagcaccaaataggccatgtctgaaccacgcagctattacctgtcgcgcgcccctttattatactagattaaaagcgccggagcaaacaataatggaaaagggcagtcggatactaatgcgctggga

SEQ ID NO: 125879 - DNA, 329 bp, Glycine max
  unsure (1)..(329): unsure at all n locations
  Clone ID: PAT_MRT3847_84678C.1
ggggggggttttttttttttttttttttttttttttttttttttttttttttttttttttttgggaagggggggcccggccccactttaaaggggaaaccaaatttaaacccacccccggaaaaaaaaaaacagggtttgggacaaaaaatttaggcggggggggaaaaaagggcctaatttgtcctcctaatagtaagggaaagcaatgagggagggggtttgccttgngttgagccccctttttttttatggcccaggagggagctacaaaccctgggagtgcccccccctgattaacccaaaaaaagcttgtacatttgggggggg

SEQ ID NO: 125880 - DNA, 409 bp, Glycine max
  Clone ID: PAT_MRT3847_84679C.1
acggctgcgagaagacgacagaagggggaagaaaggcagagttattgccattgcctctgcctcttgcaacaccaaactgatacacacttaataatattatagtaaaaattagccaccaaagtacactaaccccttttttcatacaactcaataggtaattgcttctttcttactattccttatgctttcttctgcttgaaaaatgaaaatctcatccattttttttataaagggtccttttgtgttgcaaaagggttcatggtgatcgatctttttatgtaatataactttttttatgtgtatatggtgtggtgttgttatggtgactagtgcagatgaaaactgaaatctgtttcttgttttggttgcttgcagctggattggagcaaggtgaaagtaaaatcatttg

SEQ ID NO: 125881 - DNA, 257 bp, Glycine max
  Clone ID: PAT_MRT3847_8467C.1
gctcggaattcggctcgagcacatcttcacattactaaattttaccctatcttatccttagtaatgaaaaacaagggtcttgggtggagcattatggccagaaccacgaaaatagctaactattacaagaccatgggtcattgcctctgggccaaccgtgtcatctccgattctgagtctaccgcattgttcaaccacgctaattctcaccatgccttggcactctcttatggacacgatgaatgacggatcttcat

SEQ ID NO: 125882 - DNA, 307 bp, Glycine max
  Clone ID: PAT_MRT3847_84680C.1
tcgaggccacttttccttctccgtcttcgcctttacttttaaaaactgctcctgctagctgtgggcctccaaaagcagctccggccttgccttcccccataaaaacaaacacattttatgacccaccactgaaatgtccaattgcaagaaccttctataagagtccaacacctgatgaacctacattaatcattggaggatacctaacatactatgggagctttgtcttctttactgaggctacaaaactgatgattgaaaaaaaagctaatcatacctgaacgagcgctgatgaacaacttaactg

SEQ ID NO: 125883 - DNA, 353 bp, Glycine max
  Clone ID: PAT_MRT3847_84681C.1
tcgatcaaaaaaaaaactttttaattcaaaggctttactggtatattttatttgttgacgtaaaaaagacgaaaatcgtgtgataaagttgagtatctaaaagtaaaaactaaaagaaaaataaaaaaatagtgaattgaaacaacttagtaactatatatagagtaatcaaaagagaagtggttagtagtggcgagcgaaaatcgataattaattttggtttttattattttttaaaaaaatcaaaaattgaaaatttcaataagaatttataaaaaacaaaaatggaaaataatacaaaacatggtaaaactttgtaggaataaaaaagggaaaaccactctccaaagaca

SEQ ID NO: 125884 - DNA, 332 bp, Glycine max
  Clone ID: PAT_MRT3847_84682C.1
gaaaacgggaaaaccgtagtgaaagccctatgccatataactccttttcccttttgctacccaaaacagggaaccctgcgtgccgcacaagaataattttaaaaaaaggttgaccccccacacaaacataaatccctttcttgaaacccttgtcttagagagcacgtgcacccgaaggcctatgcccccacttgttttccctttactatataaaggttcccactaaagcgttattttacgcttgcgccgcttaactaccaaataaaataaaattgttccccccccccttgtaaacagaatggggggtttatccgggaacagatttgggaccc

SEQ ID NO: 125885 - DNA, 464 bp, Glycine max
  unsure (1)..(464): unsure at all n locations
  Clone ID: PAT_MRT3847_84683C.1
ttctttagacaatgaggtgcagccaaattcattagacactggggtgcagccaaaatcgtttagcaatgggatgaagcacagtgcatctcgtggtaagagtcagggaagactaactaggaaggatttgcgcttgcataagttggtatttgaagcagatgttttgccagatggaactgaactagcctactatgctcatgggcagaaactgttggttggttacaaaaagggatgtggagttttttgtacctgctgcaatgagcaggtcagtgcctctcagtttgaagctcatgctggctgggcatctcgacgcaaaccttacctgcacatatacacatctaatggaatctctctccatgagttgtccatctctttatcaaaagatcataggaggttttccaacaatgacaatgatgatctctgcatcatatgtgaagatggaggggacttctgtgtngtatggatgc

SEQ ID NO: 125886 - DNA, 189 bp, Glycine max
  Clone ID: PAT_MRT3847_84684C.1
ggctctgtttggatttcatcataattgaaaggcctgaatgatgattgtgaacacttttagtgttttccacctgttcacttgttctttatcatataaagagggttttttacatagtacaattcctccttggttctataatgctactccatacaccccttattatcctctccttttaatacacacttttta

SEQ ID NO: 125887 - DNA, 497 bp, Glycine max
  Clone ID: PAT_MRT3847_84685C.1
aatattgaaggttttattcattaaacatgaaatgaaaaaggaaatacaaacatctcaattcttatattattgatacaaactagttgatccttgcaaaatcaaaagacttctttccagcatgagcattcccaaagaagttgttcatgtagtcctggagcacaacttccctgtaacgggccaaaccatctttcttcaccacctctggcaatggacctatcctgtctgtagctattggcatagtaaacactggaactgataccctggattgggtgctagttgtcctaactcggtgttcagcactcttatacttcccattgctcagtatctgtatagtatcaccaatattgatgacaagagctccagggattggtggaatttccaaccactctccttttccagcatcctcatcttcttccactttgacatacaagcctccaatgccatcttggagtagcactgtgatagctcccatgtcagagtgacgccctacacccact

SEQ ID NO: 125888 - DNA, 601 bp, Glycine max
  Clone ID: PAT_MRT3847_84686C.1
cttctctctcgtcaaaaaccagaccttgctagaacaacaacccggtcagttctgttcttcgttctgcgccgcacgagcacaaacacagagagagagatggagaacagtttatacgatgaactactgcaagaaatcttccagaaacttccctcatcatcctcgtcctccgtctccctcgtctgcaagcggtggctccgcctccaccgttcctccacaacctccctctctctccgcctcacaacccctcacttctctctcatcccttctctctcctctttcctctcccaccaccctttcctctcctccctctctctctccctctccccacccctcttctctctctccccacaccttctctcgctcatcatctctcccttttccaacctcctctcgctctctctcacccccgcacccgtttctctctcctccctactctctctctccgcctcctgcccccgcttaaattccctccgcatcaccctcccgagacctgtttttctcaactggctcctctccttcccctgcctcaaggaattgtcaattactttctcttctgatgatgaagaaagtcatgattttgattccgattctgattttgaat

SEQ ID NO: 125889 - DNA, 608 bp, Glycine max
  Clone ID: PAT_MRT3847_84687C.1
gttgtcttattgcaaaaaaccccgggtggatactgggacggggggccccggacttttttcttgcaaaggcccccataaagagggggtggggcttcgatggacccccccggggggggggcttttgacaccaggcggggggggttttttctccccccccctgtttgggttaggaaaccttttttgattttcggccttaaaccccttttgttcttagggggggaaggtgatggcccttttgttccccccacttaaaaaagggccaaccccctgggtataccaaaaagaccttttttttttttggcccccacgccccctcgggggggaacgggtgtatttaaagcccccctttctcccccacgggggggattttttccctgattttcccacaggaattttccccaggggggggggaggggggctccagcaaaggcggggggcccaacccccccttttttttggtcccccgggtggaggaaaagccccccccctcaaaaaagacccccccgcgggccccgggggggcccaaccaggggggcgcccggggggggcccccagggttcctttcccccccccgaggtctttttggaccccccccccccaaggggggg

SEQ ID NO: 125890 - DNA, 1138 bp, Glycine max
  Clone ID: PAT_MRT3847_84688C.1
gggtgttttgagttttgatcaatgagactagccatgtctactccttccaagagcataatctgttcaagtgaagatgattatgaacttagaagagggccatggagtgttgaagaggattatcttctcacccattacattgccaatcatggtgaagggagatggaatttgctagctatacgttcaggactaaggagaacaggtaagagttgcagattgagatggctcaattatctaaagccaaatgttaagagaggaaatttaacctcggaagagcagcttttgatttttgaactacactcaaagtggggcaacaggtggtcaaaaattgcgcaacagctgccaggcagaacagacaatgaaatcaagaactattggagaacaaggattcagaaacaagcaatatatgcgaaatttgaggatcacagaagagcaggatttgtagaatttgtcaagggtctacagatgacaagatgtcttcataaatcacaagaatcatctccttcggccatgtcaacccaagaccaagcaattcctttaccttttgatggtgttactgttcctcattattcatcatttgggattgggacaacaccaacaatacaaatcacttgccatggagatctcaatcatttgaatcagcatgagcagaactcagactctgaacaccacaatagttcatgcatttcctcttcagaatcagcaaatatcccaaatatgagtcagccttttggatacactactagtcaatttcaggccttagataactgtgactttggcatgtgtttatatgatggctatagcatagataacaattcctatgacagggatgccttgaacctgacaaccacaatggttgctgggaatctggaactcccagtgtttgattgccaaacattagaaaccaataggctaaacaaggaatttgcaagtagcacatggagcatggatgaattatgacaatttaggaacatacaaagattatcatttagattctagagtatctttttagaaccactcactatctcttttataatatgtagtgcttgtcattagataatcgattattcaatagcttagctataaatataaatgtaaagactaaagagtagttgttttataatttataggacatttgggc

SEQ ID NO: 125891 - DNA, 187 bp, Glycine max
  unsure (1)..(187): unsure at all n locations
  Clone ID: PAT_MRT3847_84689C.1
tgataagtcttctatctttttaaagttcgtgatattgtgaaatttggttccacttcttctaaaatagcatactcttaaaaaagattggtgcacgtgtaaaatatttcgttcaatgataaaaagggtctcaaactctaaatntaacaagatatgtatgagcanatagtcaaataatctggcagcttgg

SEQ ID NO: 125892 - DNA, 254 bp, Glycine max
  unsure (1)..(254): unsure at all n locations
  Clone ID: PAT_MRT3847_8468C.1
gtaacatttgtntcaatttattccgttgnncaacaagaanacgtannntcttacaaacaaaaatggctagtgnatcaatatgtgacttccncaagtaccngtgnaancctgccatgtcagtngggncaatcnactgctgnantccaagacacaattacnaattataagctacgggntnatggggncncctgaaagttaatgacctagagngtgctgntgggatgggcagaagggacaggtgagttttttattac

SEQ ID NO: 125893 - DNA, 269 bp, Glycine max
  Clone ID: PAT_MRT3847_84690C.1
atttgggaaatggccctcagcctctacaaccttagagatcctgttaatgagttcaactatggacagcttccattggaggtttaagtatgaatgattttattgttgctgcaaagatcgatcagataaagacatcagatcttgtcccaaggaaaagggtttgggcgtaatgccttaatgaacttcataaaacattttgccgcttgattttcttcaatattgaattaccactaattcgtgttatttgattaaatctattattctttactttc

SEQ ID NO: 125894 - DNA, 325 bp, Glycine max
  Clone ID: PAT_MRT3847_84691C.1
gagcttcgagctcgagccgtcgagcacctgtttcgtgcaaaaacaattcctgttgtctctccacagtccctccctcacattctctctctagctttttagagagagagagagaagaagaagaagacatggagatcaagaagaggtttggggtgttgatgtgtgcagaggattcggagtacgtgaaaaaagtgtacggagggtattctggggttttcgtgagaatgctggcggaggagggagagacatgggacgtgtacaaggtggcgcgtggggagtttcctgacgaaaatgatttgggtctctatgatgggtttgtgatcactgg

SEQ ID NO: 125895 - DNA, 414 bp, Glycine max
  Clone ID: PAT_MRT3847_84692C.1
acaaaaaccccggggtggcttttcctttgggaaaaatttttcccggttcaacctttagataaaccatccaagggttttaaaatctccgagggggcaaccaaggccgatggagggtacctccaaacttaaacctttaaagttgggggctcccctttttcccaaggccttaacctttcttccttgggctcccccttttggttgggggcttttccgggaagaaaaagcccccggcggggccccaaggggaggcggtttaccaagcccaaaaccccttaaggaggcaaacagatgccccttttttttaaaggggcccaaaaggaaataaacccttgggggtggggcccccacccaatttaaacggtccaaaaaaaaagggcccccctttggaagggtgggccctttaaaagccaaaac

SEQ ID NO: 125896 - DNA, 401 bp, Glycine max
  Clone ID: PAT_MRT3847_84693C.1
ttactcgtccgggcggctaagggttagaacagagatgtgttgttatgcagcagtctaatggtgtggttgggcctcatgcggacaagtgaacctaacacacagcgacggtacagagcattaagatgcatgtaatgggacaaaatctgaaccacatccctgggaattgttcaatctaatagcggggtgtggtcctaacaatgagattcaaatgtggagtcatgagggggcaaagcaaactacagggcgctagagtatccttattgacaagcctaaacagtctacagtttaagacactcgattgggaattgcccaatattaagaaattgttggtaagactcttaggccagatctgaacgttccacaggctactgccatagcttgtgataatgcgacaacctctg

SEQ ID NO: 125897 - DNA, 216 bp, Glycine max
  Clone ID: PAT_MRT3847_84694C.1
cgaggaagacagggatcggagggatgacgcggacttcctgcataagcatcctcagtgaatcttctgatattgacacggaaaccattgggtcatccagcaggcctccgaggacattgattttgcccttgtgatatgccgaacatgataccaacgacgcctaatgtcacttccattgaacgcacatgccatccacaacatctcaacctaggaccaagt

SEQ ID NO: 125898 - DNA, 404 bp, Glycine max
  Clone ID: PAT_MRT3847_84695C.1
tggtttcctggtttggtcatagagaaggaaacactatcaatgttccccaaaagaaaatcaaatagtatatggttttgtgaaattccatcatttttcagaccatgtatcgatgggtttcaatattgcaagctcgttgttcaagtcgacaaaacatggttgtacaaaaagtaaaataggatctttcttatggcagttgcacaggatgacaacaataaaatccttttaatagcctttgttgtgctcgaaggtgaaacaacaaaagtatgactctttcttcctcaaaattttaaaaagacatctcaccccataagatggtctatgtttgatttcaaacaagcatgtgtcaataaaaagtgcctacaaaacgtgtgatagtggatgaatgacacataattctatgcatg

SEQ ID NO: 125899 - DNA, 166 bp, Glycine max
  unsure (1)..(166): unsure at all n locations
  Clone ID: PAT_MRT3847_84696C.1
cgttcaatagaattttacgattaagatcanccactcgaggcattacttagcagaagggttcaagagtaggacctcttctgcgaaataatgcgtcatgtgggtgatcttaatcgttctatacaatagtacgattaggcatttggtatcacagctacatctacacgag

SEQ ID NO: 125900 - DNA, 2568 bp, Glycine max
  Clone ID: PAT_MRT3847_84697C.1
ctcttgggttctgatggttgttcttggatatgggttttggcagtgacggtggtggagagtggaagcagggctctgcagtatctggggttggatggagaaaaaagttccattggtcttgatgtgagcaaaatgcaaacttggcttttgaattgttaaaggcacttctttttagtgttttaaacaataggtcttacttggaagtgatgcttatgttgttattttgatgactgtttcggcagagtgtgaaggttaatttgataatgacggattattccatgcccgggatgacaggatatgaattgctcaagaagataaaggtgagaaatgagacatggtcgttcttgttttaatttcttgcgaagatgaatgtattagaagagagaattgttaatgttttcctgatccacggggtgggcccccaactactccttgatttttctatatctgcaggagtcatctgtttttagagaggttccagtggtggttatgtcgtctgagaatatcttgaccagaattgataggtaagctcttgattaagataagatgctgtttggttttaggagatataagcctttatttttgtttgaattctttgatataattgcttgatttatgtgatgatatttactagatttggatgatgtttgttgattttacctatgctaatggtttggacatgattcacatctagacttgaattgcattagtgaaagacatgatgaacatacttttggatatgcttagatcacctagggtttggacaggattagggcacccagatcacatggtgtttagccatgtgaaaaggggatggagagaggagacaatgatatctgaggaaattattaaaagagtcaagggaatattatggtgaataatttggattttgttacaggtcaatgatattctgtattccgtgtagttgatctcacctaatggaataagattgttgatgttgcattagatccccatatactttctcattctaggttggttctggtaaaattcatctgttgagacttaattcattaataatctcatcatgttagtcacatggagtgttttgggaacatgttgcttccaacttgcacttgtggctacaatgattgaagcatatgaagaaatccagattcccacttgcctaacggtcaactgttgtaaaggaccctgttggcatggaagcaattattgtcactataattgccacataatcatacatcttatcaatacttctatgcatctatacatgaaattattagccaacaccattaggctatgctcaccctcagtgtttcaattgattatgaatatagtttgttaataattacttcaacatttgaacaaagttcataccatattctttatctttacctctcaaatttgataattattttgacttgtagacccaattattcatttttttttttttttttacttttactgcttctttcattttataccattcttcttatttctttttaccaatcactacttattcaatccaaggatggcttccgccggcgatcttttcaggcatggtttgccggaagttggtggtgccgggaagttacacgtgcttgctgttgatgacagccacgtggaccgcaaggtgatcgagcggttgctcaaaatctcgtcttgcaaagtgacggtggtggaaagtggtagcagggctctacagtatctggggttggatggagatcttgcaaagtgtcggtggtggagagtggaagcagggctcgcagtatctgaggtttcaatgacgaaaaagttccattgggcttgatagtgtgaaggttaatttgataatgacggattttccatgcccgggatgacaggatatgaattgctcaagaagataaaggagtcatctgtttttagagaggttccagtggtggttatgtcgtctgagaatatcttgaccagaattgatagttgcttggaggaaggagcagaggagtttctgttgaaacctgtcaagttgtcagatgtaaaacgcgtaacagatttcatcatgcgaggtgaagggatgaaaggagtaaaaagatctaaaaaaagaagccgatcagatgattgcattccatctctatcaactgcattctcatcagtttctcatccatgtgatctatcatcacctccatcaccatgtgtatcgcaatcgaagaaatctagattgagcatatagattgagcagcaatgtttatgtctccatttttgcctaaccattgttcatattcaaaagcctctgatgtaatttgcgtttttacactaaacattgctgacaacgactactagaattaggaatgaggaagaggatgacagagtcattttgttctttagttcggtcgcttacatatttttttgctgattttgctgctgtacagagaaagttcattaaattaatgaaaccctctattttgaggggtcttcaaatttttgtttcttctgtctctttatatttcactaacaacattctggaatatgttcaaattttggaccctttacttagcctatgtttggatgggaggttgaataaagaaggtagaacctgaagttgatttttaagtg

SEQ ID NO: 125901 - DNA, 282 bp, Glycine max
  Clone ID: PAT_MRT3847_84698C.1
tccacgcgtccggccactcgtgcgtacacgtttacgaagcaatcaaagacggcaagcacagcggagcattcaatgactcatagatagcaaaatacagtcgtcatcattcgtcctggaaaggcgaaaacgcgttaccgtcgctacatatcacgccgtgtaccaatcatcgtgtacagaacggaaggagccaaagccgttaaggcctttcgaaacatcccgggcatagaagttgataacgtcgctaggcttaaccttctgaaacttgctccaggacgacacctc

SEQ ID NO: 125902 - DNA, 1674 bp, Glycine max
  Clone ID: PAT_MRT3847_84699C.1
caagatctctctgatttggatcctccgaatctcccctcttttcattttcacattcttcttattatttattcacccttttccccttccttcaccattcattttcttttataataccattcttttttctctttatctctttcatcaatacttcatcgttttcgttaagggatggcttctgccggcgatgttttcaggcagggtttgccggaagtttgtgctgccgggaagttacacgtgcttgctgttgatgacagccacgtggaccgcaaggtcattgaacggttgctcaaaatctcgtcttgcaaagtgacggtggtggagagtggaagcagggctctgcagtatctggggttggatggagaaaaaagttccattggtcttgatagtgtgaaggttaatttgataatgacggattattccatgcccgggatgacaggatatgaattgctcaagaagataaaggtgagaaatgagacatggtcgttcttgttttaatttcttgtcgaagatgaatgtattagaagagagaattgttaatgttttcctgatttcatagtggtggtttccccccttttctccttgatttttaattcttctatctgttaatatctgcaggagtcatctgtttttagagaggttccagtggtggttatgtcgtctgagaatatcttgaccagaattgataggtaagctcttgattaagataagatgctgtttggttcttctttggttttaggagatagaagcctttatttttctggctgatttctttgataaaattgcttgatttatgtgatgatatttactagattgtgatgatgtttgttgatttgcctatgctaatggtttggtgagctaaaatatcagaaagttgatgagttacacattgctgcatccgtatcttgttttcccggacttgattcacatctagacttgaattgcattgatgaaagacatgaatatgtttttggatatgattagatcacgtagggtttggacaaaataggtgtattttgggattaaagttgagagatcttaaaagtacttttaattcaaaagcaacaaatttttccttcatatgtttatacattggaattcacaaaagtacttttgtaactttaatccaaacatatatgagatcactgagggcttgaagtttggacacatcgatagatcacatggtgtttagtcatgcgaaaaagggagggagagtggagacaaggatatctgaggaaattatttaaagagtccaagggaatattatggtgaataattttgattttattagaggtcaatgatattgtgtatcctgtgtagttgatctcacctaatgggataaggttattgatgtcgtgttagatccccatgctttctcattataggttggttctagtaaaattcatctgttaagacttgattcatcaataatctcatcatgttagtcacatgcagcgttttggaaacatgttacttccaacttgcaattgtggctacaaggattgaaacatgatgaaatccagatttcctcttgcctaatggtcaactgttgtaaaggatcctgttggcatggcagcaattattgtcactataattgccacataattatacatctaatcaatacttctattcatctacacatgaaattattggccaacaccgttaggttgtgttcag

SEQ ID NO: 125903 - DNA, 745 bp, Glycine max
  Clone ID: PAT_MRT3847_8469C.1
gagaacctcgagaatcgtgaagaagaagcgcatgctttctgaggattccgatgcttcagcttcttctcctccggcgaggaagaaggcgctgaagcagggcgatatgcagttggagctcttgaggatggtgctgaagagagaggctgagaagaacaaaaacaagagcaagagcaagaacaagaagaacaataacaaaaagaagaataagaagaaggaaaagaggaggaaggaggaaaaagaggaattgtgttacactaaagaagagttgagaagagaattgccaaatggagtaatggaaatctctccggcttcaccgacgcgtgattacaacaatgtaggttcgcattgtgatgtcaaagttggtgttgatagtaaaactgttactccgcgttactttaggtccaagaatgttgatagagtccccgcggggaagttgcagattgtgccgtatggatcaaacttgaaaaagggtaagaggaagaagtgtcattggtgccagagaagtgagtctgggaatctcattcagtgttcgagctgtcagagggagttcttctgcatggattgcgttaaagagcggtattttgacgctcaaaatgaaattaagaaggcatgtccagtttctcgtggaacttgcccttgtaaggattgctctgcaagtcaatgtaaagacagtgaaagtaaggaatgtttgactggtaagagcagagttgatagaatattgcattttcattatttgatctgcatg

SEQ ID NO: 125904 - DNA, 314 bp, Glycine max
  Clone ID: PAT_MRT3847_846C.1
tctcataataatcgtcaccctcaatgtgacgactattcaatacttaatgggatctcatgcaaaatttatagaatgagatgttttggtgcacaaaaaaacaaaaaaaaaaaaaaaaaaaaaccaaataaaaaaaaaaaatataaaattaaaaataaaaaataaaaaaataacaaaaataaaaaaaaaaataaaaaaataaaataaaaaaaaaaagggccgccccttttaaagatccaaattttacttacccgtccttcctacttaaaaccttttatttggggcccccaaattaaatttaattgccacttttttaa

SEQ ID NO: 125905 - DNA, 260 bp, Glycine max
  Clone ID: PAT_MRT3847_84700C.1
gtcttcataaacgcctttcttctccgatgccgtttcctcggtcagattcgcttcttgatctgcgagaatgagagagtgcatctcgatccacattggtcatgctgcgatccaggtcggaaatgcgtgctgggagcttactgcctcgagcactgcatcgggcccgatgggcaaatgccaagtgacaagacagttggcggtggtgatgatgctttcaatacttgcttcagcgagacttgtgctggaaagcacgtgtcacgtgc

SEQ ID NO: 125906 - DNA, 408 bp, Glycine max
  Clone ID: PAT_MRT3847_84701C.1
ctttctctttggcaccaaacaaaaccacttagagctctctggtggtcttaaaaatcaaaggggaaagtatacacgaggggggacacataatctaacctacaacacacacacactcacacactcatatactgacaccatcattctaaatacaccaaacacaagtttgttcttttatgcacacataaacctgattgatattactgaaaagatctgattctggcaaggctttctatataacaaaagcacctacatttatacctcaagacctgcaaattggatcatgcactggtttttaataaaaaagtgcgacttctgaaactgatactattactcgcaataacaagcttatcaccggtggaacctatgaacaaaccatcatcatataaaatcaaaatcttgacaacaatg

SEQ ID NO: 125907 - DNA, 445 bp, Glycine max
  Clone ID: PAT_MRT3847_84702C.1
attcacaagggaaacagcgaaaaaataacactggtaaaaatttgtggcggaggattttacttaaatccttttctaaaaatatatccacctttcctacgattaaccccgaattacataacccctttaccgccaaactaaaacccactccaatccctcattttttagcctgggcctttttcgctggaaattccacccttttaggttttttcacgacccttttgggctttttcacggcctttacgggagtttttttcgaaggtttagggggaacctttttgggcgcggccttagcggccttggccttgggcttgggggccccatttttggccttgggcttggcaacagccttctttttaggggcaccagattttgggcttgaaagcgggtttggcgggggtcttacccccatctttggggggctttttgggaagcaaaccggtttcga

SEQ ID NO: 125908 - DNA, 334 bp, Glycine max
  Clone ID: PAT_MRT3847_84703C.1
gtcatgggacggacctctctcttccgtaaaattgatcattcagggtaaaaatctcgagctaactgatgcagtgaagcaccctgcggaacacaacgcgcgcaaaacgcctcaaaaccacacacacctaccgaaacagacaaaagacaaaattactattcgacaaagacctaaatttcgcgcgaagacacacaactcttatcacgcacgggagggggaaaaccaccagaccgctgcggtgcgcgctgacgaggatgataaaaacctctatgaaaaaaaaaaaacggcaaaaaccatacataaaaggaactggctgcaactaaatgacacggtctcc

SEQ ID NO: 125909 - DNA, 593 bp, Glycine max
  Clone ID: PAT_MRT3847_84704C.1
ggctcgagagcgcgtatacagctgtttatgcaaatctttcaaagaccatgcttagactagaagggatctaacttcgaaggtgacgatgccttaaaatgtttattagcttaaaagtaaatccgacaatgatgactaggatctttagttagcggtggttaagattccttttttgctctataaatcatctatattctaattcttgtggggattgctatggcggttgtgattatcttgacgacatgtacccaactaccttgttttaacagactaccttgttttaacaggtcctattcaatttgtcaattcaatggtcgatacaagtttttagttatgtgttttgcgtggaacttgcaaagtggacggtgtggccttcattgtcaatgcagcattttttattttatttttgtacaatctttggctcataagacttttctctaattccagtccctgtcactgtgctctcaatcatggtagtgtgaacatacaagctgtagagcgtatgtagcatatgttatcgagggaattttctttcttcttgtaatatgtgcattacttgaatttagatgttgtgaaatcttttataaaaaaaaaaa

SEQ ID NO: 125910 - DNA, 705 bp, Glycine max
  Clone ID: PAT_MRT3847_84705C.1
gggaccacggtctagaatttttctctccagaatagagagttcttttatttgaaaccctaaacttattttttctatctcatttagcgattcgcgacatcagatcaacatcgacagcctctcgcgattggttcgatattccattccctctttctattatctacgcaaagtgatccttaattgcaataccagatatttcacttttcaagcaaccaccgactcaagcaacggtaatgggtataatcaggagttgcttctctttcattgcagggacggtctttgggatttacgtggctcaaagttatcaagttcctgacgtcaagaaggaagctgacactgccttgttacaggcaaagcaagttgaggaaaaatatcgcaagtccaagtaagaacaagggtggtggtgtgatcatgataatttttgctttcttgggttttgtcctgcatcgtataggattagatacctctattaactacaaattggtggaaaatcttgacacaagtgtaatgtgagagctatactctgattcctaaatcttggataatgctagtagcttcaagccagaaatttgtttaatggtaaatcggaattgtatttaatagcccggggagtgttatgcccggagtgacaattaacaattgttattgttaaaatcatcctttaactgttgctcttggtgatgatatctgattggaatttgttctttc

SEQ ID NO: 125911 - DNA, 325 bp, Glycine max
  Clone ID: PAT_MRT3847_84706C.1
gaattgcaacgtcgaattagtacaactctatatcgcagcacagcacacatggaagcgttgcgcgtcgccccgagatcgccaactcgcgtccgccgccaccaacctcgcggccgaatgggactccaacccctcacagcgctcgtgcgacacgcgctccacatcgccgcaagcctctccaggcggccgagaggccgctcacgcttccgtcgccgccgctcgtcgcagacgatcgctcagaggcgaggcatcatgcacacatgtgcgtcatgccggattgtctcgactacccgcacggctacggcaggtcaattccagcttgcccttg

SEQ ID NO: 125912 - DNA, 356 bp, Glycine max
  Clone ID: PAT_MRT3847_84707C.1
ttatgtgcttgtatatccgtccaccgtcgtcgtcgtccccctcgtcggggcggtgaccccaactaacaggttaccttcatcgtcttcgtggtcttcttcttctcctcctcctcctcccatttccctcccctctctatggctccccctactatcagtaaaatccgaatccggaacctgaaccgttctaaaaaggaaaatccgtactctagctacacgaggacattcctaatctctgcggaagcgtcctcggcatccgtaccgcctcgccgcagttcacggatagcgcggactactattatctcccgttaatagatgaatgacgaaccctgattctatagcgctactactattcaacc

SEQ ID NO: 125913 - DNA, 780 bp, Glycine max
  Clone ID: PAT_MRT3847_84708C.1
tcctctagagcggccgcttttttttttttttttttttttttttttaacattaaatagaatcctatgcggaagtgccaacataaagctgcatatatcttgaaatataaatctaattgttcaggaaaaaaaatgtgacatcttatgtgttggattactcgttaaattctttaatccctaacaaaagataaatttcactgaaagacagcaaccagaggcacagatgatgaaacaaatgtctcaacagatctggggcaaaagggagttgatcgtcgaagcaaactactaaaagatccaaaggtgagaaaatcttgctatttatgttccttaacaacttgggtgcccccaaataacatactcactgttgtcaatataattcaaccggactaattgcttctcagaaaaacccctcactttgcatggatagcgatacaaggcagcaaaacttccacgataatggccccgatgcatatgactaccagcaaatcagaatattgttgcaactcgtccgtcaaaaacacattttcttagcttggaatttctcactctttgaagcaaagttggcacaaccccacttaaaaactgatcctgagcccagtgtctctgaataatggccagtccatcagttagggggcattaatttcatttcatccctgtatgaaaatatctttagaagggagcctctagtgattcatcccagacttctgcactttcgttagaggcatcttctatgtcttcttccattgaaagcctaatatattcttcgatgagcaaaatcgatcc

SEQ ID NO: 125914 - DNA, 762 bp, Glycine max
  Clone ID: PAT_MRT3847_84709C.1
ccacgcgtccgctcttttcttctcctcctcctccctcaccaaattaaccaaagcaatgaagaaactaaaacactactattcacaccaccaccacaactcctccgaacaacaacaaagaaagtgtattttcccattaataaccattatctctcttttctctctcttcttcctcctcctctttgctctcacgctaacccctctctccgccacacgcgtcttcccattctctatctccaccgccactcctcctcccccctcccccttcgtcgagtccaagctttttcctctcccgaccccacccccctcccctctcccgccgcgcctcgcctacctcatctccggctcctccggcgacgccgccgccctcctccgcaccctctccgccctctaccacccccgcaaccgctacgtcctccacctcgaccgcgactcctccccggaagaccgccgcctcctcacacgccacgtggaccgccacctcaccttccagaagttccgcaacgtcagggtcgtcaccaaggccaacctcgtcacctaccgtggccccaccatggtcgccaacactctccacgccgccgctattgctctgacggagagtgatgactgggattggttcattaatctcagcgcctccgattaccccctcgttacccaagacgatctgctgcacgcgttctcgcatttgccacgcgatcttaacttcattgatcataccagggacattggctgggaagacatcaacgggcgaggcctatattattg

SEQ ID NO: 125915 - DNA, 500 bp, Glycine max
  unsure (1)..(500): unsure at all n locations
  Clone ID: PAT_MRT3847_8470C.1
tncgnctncnanngtctncnacccgncnngannngngcncnnnncnncnntnntncnanngnncagncnnctcngangtgattnncngncancnnncacgncnannactnngncacntncgcnttngncngnncgtactnacatntcagngcnnangntgtgtngnntntnganangnccgacnnacnngtgtctgnnaantncanatcgncntnnngngcgagacagtgacgtcgagtcacgactgngcgnctntnaatnngtcganaagtnncgcgtgtnntananacgcgtnnctagcacgcagtgtntnggntctgacncacacntanatnagngtgnnagntaggcagncangncgncgagggtctagagcacantcactgngngttcganntagnccngagactntcgatgcgacngcgtgntgactgngcactctntatatgtanctgaantncgcagntctggagttgttctcnagantgcgcgntcgannt

SEQ ID NO: 125916 - DNA, 886 bp, Glycine max
  unsure (1)..(886): unsure at all n locations
  Clone ID: PAT_MRT3847_84710C.1
caagaaaggaggtggtagtttgttcagtgcatctgcttttgatgatggtgaggaggaggaggatgagacagtgattaggttttctggcaagaagaagtcctctagaggttcgaagaactctgcctcggcttttgatgctattgatgatgatgcggatggtaaggtggtggatgataagaatgacgatgttgatgatgatgatgagcctgttatttctttcactgggaagaagaagtcttccaaagggggtaagaagggtggttctgtgttttcggctgctgttctcggtgagattgatgacgatgaggagaataaggatccagatggtggtggtgatgatgatgatgatattggaccgatcactttctctggtaagaaaaggaaatcttcccaaaaggctgctaattccgttagcaaaggtgcttctgttgaggaaggtgatgacaaagatgaggatgatgtttcgttagttgcattttcaggtaaaaagaagtcttctaaaaagaagggcagtagtactgctgccaaagggagtgatgaaaatatggatgtagtggatcctgaggcacccagtgttggtagtactgatgctggcaacagcaatgtaaataagagtgaagaggtcgctggaaattccaaaaataaaaagaagaataagaagaagagtggaagaactgctcaagaggaggaagatttggacaaacttcttgcagagcttggtgagacccctcctgtacccaaacccacaactctaccccaggatgataaagttcagcctattcctgaagtagtacctgttgctgatgcttccgggcaaaaggaaggtccaaaggagccccgtagagccagtctgctgcaangagaggagaagtataaaaaaggttaa

SEQ ID NO: 125917 - DNA, 431 bp, Glycine max
  Clone ID: PAT_MRT3847_84711C.1
aacccaaacaaaacctgtgggtgtattccacaaattatttatccggaaagttgattgcataacacgcggatccaatggaatcctactttttaaacaagttatcatacatgcaaaagttattgtctttatacaccttcatgaaatgcaaatttgtgaatgaagatgggtaatttcaccttatcgtaaaccaactacaattctacaaaaccggtctttatactaaatatagatgaaggcaacggaaagggcaacataacaaggttttactctactgaagccttacgagtgacccaacatattcttcaagatataagccctccacattacaatgacccttttgtttctcaaaacaaaggattacacgttttatacagcaattctgaagctgaaaacttagcaggaattccctttgattggtggagagtatgttg

SEQ ID NO: 125918 - DNA, 878 bp, Glycine max
  Clone ID: PAT_MRT3847_84712C.1
ctcatatctacccccggcccccccacgcccccccccggcaaaagggcttgggtaactcattagatcgtagccttacccccaaagggcgggagccaaaagtgaatgcagtggatcccagggccccccggcgtggtagtactgatgctgcccacagcaatgtaaataagaggtaagaggtcgctggaatttccaaaaataaaaagaagaataagaagaagagggaaagacctgctcaagaggaggaagatctggacaaacttcttgcagagcttggtgagaccccccctgtaccaaaaccctcaactccaccccaggatgataaagttcagcccactcccgaaaaggcactggaagcggatgcttcgggggaaaaggagggtgaagaggagactgtagacacagctgctgcaaagaagaagaagaagaaaaaggaaaaggagaaggagaagaaggcagctgcggcggcagcagcagcagcagcagcagtagcaggaactgtaccagaaaatgaaacagcagaagataaagctgaggtaattgaaccaaagaagaatgattcaaaggctaaaaaagcagctgataagaaagtgccaaagcatgttagggagatgcaagaggcactagctcgaagacaagaggctgaagaaaggaagaaaagagaagaggaggaaaggttaaggaaggaggaagaggagcgacgtaggcaagaggaacttgagagacaagcagaagaggctagacgtagaaagaaggaaagagaaaaggaaaaactccagaaaaaaaagattttagggcggccgctctctgagaagcaagaagacgtaccccgtcgtctagaggcaatgaagaagcagattctcaataacacagggggcatg

SEQ ID NO: 125919 - DNA, 437 bp, Glycine max
  Clone ID: PAT_MRT3847_84713C.1
aaggaagatacgctgactaataatcaaatgagtattaaaaaattttcaaccaaaaaaacaaaccttactgattgggcacattagacctagagttgggtcctcacaatcacaaatatcactctacacctgaaaatccttgaaacatccttacacccacacaactattattagacaaatcccagcccatgaacatacttaacacattccaaaataactaccaaagcatccatttgatcctgctataactaaagacagctaactataacacatccttcatcagctctataaatatgaatctaatcataaatcataggaactcgctggaccatatactaaaccctctaactgaggtaaaactaaaactcatcatatatatatatcgcacattacctttgggtgccggctaaataaaaaaacatgttttcttttatttcaat

SEQ ID NO: 125920 - DNA, 343 bp, Glycine max
  Clone ID: PAT_MRT3847_84714C.1
ggttgtgactgtttttaacaatgacccaagcaatcacccttttgttgtcaaattctttgacaatccaaacgtaaaggcaatgatgttcgtcaacttcactgctgacaatgctgattctctcaaattaaaattccgtgaatctgccgagcagtatagacaacagggcgtaagctttctagtgggagaccttgaggctagtcaaggtgcattccaatattttggccttaacgaaaaccaagtgcctctaatgatcattcaacataatgatgggaaaaagcttttgaaaactaatgtggaaccagatcacattactacttggatgaaggcatacaaagatcggaag

SEQ ID NO: 125921 - DNA, 271 bp, Glycine max
  Clone ID: PAT_MRT3847_84715C.1
ggctcgagcactttcacacatggggcatatattttttctttctgcaatttacaacgagggcctgatgccacctggctgaacaaaccgacacagtggattttcaattaccggacgtgtttggcaaaacattaactactggggacggaagtatacttgcactgggttgcattcatctggggctagacgttgagcttggccttaacacccacaagggagccaacaaatgaaccctcctttgcccagaagagcctcctagtggtcatgttgtgaa

SEQ ID NO: 125922 - DNA, 479 bp, Glycine max
  Clone ID: PAT_MRT3847_84716C.1
taagataaggttatagagaaagctagcaataacaaaattgcaacaattatcctaacagaaagaagcatattcccgtcaggatcatccaagggcccaatcccgcaatgccaactcagcaatcctgctcctattttgttagcgcttgcctcctcatggtttggtttgtctgatggctaattcataacattgtcccttgaaccaagccgttcttgtcgagaggaacatgccattggaatttttaatgcaaatccctacttcgaagagtctctaatcatggacgtgattctccatgattacttatagagtacaataatgagatttcaatctaaaagtctgtgtaaagtatctaaatttcataccacttatagcatgtttgatttatcatcatggatgtgatttttcacgtcaaacttaaagcttttaattgtagcttctgcatcaaacagtcaattgatgtgattttatcgagtctggatgcg

SEQ ID NO: 125923 - DNA, 341 bp, Glycine max
  unsure (1)..(341): unsure at all n locations
  Clone ID: PAT_MRT3847_84717C.1
gtcactctctctccatccctcgctcaattccttcagtcccttctcatttttcacccttacttcctccaaaccctcacccgcctccacttctggaccacacccacggcctcaccccctcctagcaccatgcccccctcttnctgctccgctgtcaccgccaaactcctccccttcaagttccttggcttcgacctctccctcttccgcatcctccactccggcaccacccacactgtcatcctcccctccctcaccctccaagtcaccgtcatcgacgcttgtcactgccttggtcgagattcatcgtcaaaatgggatcttttggtttgagattggaatac

SEQ ID NO: 125924 - DNA, 1166 bp, Glycine max
  Clone ID: PAT_MRT3847_84718C.1
acaatgcagaaggtgctgttgctttactctttattattacttggagggaaagattttttacactgattgttacaagataacacacatcacaacagtactctaattgaaatctatcaaactgaaaattcaaataactagttaagataaagactagacacgttctgatccttaagagtgcctcatatcctcgcgttcaagaagatagtaatggtacgatcccattgattctttagcagctgctacattgggctggggctcactctttttgccccacaaaaaggaatacaattcctctatgatcaaaaccaagcccaacaacgttccaacttccaatggctcttcaagtaagatagcttctaataatataaggccccaaaaataagaccaagtggattgaacattggaggataagtaggtcctttgactctaattgtccacaatattaagcataatgtagcaaccgaggccattgctcccgaatacattatagtgaccaattgtagattccattctaattttcaagctgctttactagaatctatgattgcaccaagtattgctgatcattggattgctaccgtaatgcatactagctagcattgttccccacaatacctcattggaaatacttcaatcaacttgagcaataaaccaagctgtgtatgagaagcaacaacaaaccaaaaagaaagtgccccaaagcatgttagttttgtgagacacaacaacattcttgaaatgactacgatgaccaagataaaattccttccctttgtaaagactagtaactaatgctcccccaacacacaaaattgcccctacaaattaaactttgctttagttgcccatgtttgcaactccaatatctccattctacatgtgatagaggtaaggaaagtgcataaaggaatcaagttgagacagttggctgagtaagtagctgaaaccataataaaacaatcctcgagccatagtgcccctagttaatacattaataaaaagccaaaaccaaactttccatgtgaatcttctttgtctggcctctttcgaagtagagtgcaaaggggataacaaaatgacagcattaatatgacgatatagcgcaatgagtacaaagacaaccaatatgaccccgatacaagttgcatcccagttgcaaaaacttg

SEQ ID NO: 125925 - DNA, 616 bp, Glycine max
  Clone ID: PAT_MRT3847_84719C.1
gtttttgggtgtttttttttttttttttttttttttttttttttttttttttttttttacttaaaaaataacccatttcttagcaaaataagatttacaaaatctaattcacaaactaatcgggggaaactttatttttggctatgaaacccaaccgggggggcatcaaattcccctttaacgggaaaaatttaggggaatcttattacaaaaactttgaagagggtatccccctggggcaagactataattcacatagggcccttttcttccactgggaatattcaactgggctacagaaacttaccaacccacaggggaaaacgggaaaaaaaaatacagataattattttggaaactggggaaaaacatctgtttgctcttggtgggaccctcccacaactgcagttgctgctgctgtcatggaaactgcagctgcccccatttttgccccacctggagctttcaaagcacctgcttttttaaaaaaggctgctatgcccccaacaaaaatagcccttaatgcaacgggggggtttaacgccctatttaaggcaaactagctggaaaaaaggaaggcaaactaagggtgccttcaaaaccaaataagttcttg

SEQ ID NO: 125926 - DNA, 320 bp, Glycine max
  Clone ID: PAT_MRT3847_8471C.1
ttttattaaaaaaatttttttgggtgggaacattttttgttgagcttttttcactttaaattcaccgggggggcaaaacaaaaaaaagtttcttcgccccttgacggggcaaaaaaaacccttagagttacccccccaacccattccttaaattgcgtaaaactttgtgttttttcccgtacttaaaaaaagggggggaaaaactacattttgacgtaaaggccgaattagaacccttgattcattttaaaactaccctttatcaacacaccttttttttgacaaaggtttttaatataactccccactggccgtgcaat

SEQ ID NO: 125927 - DNA, 801 bp, Glycine max
  unsure (1)..(801): unsure at all n locations
  Clone ID: PAT_MRT3847_84720C.1
cacgcgtccgctctctctctctcttcnagtgatgcttgaaactgtgttttagattcttctcagaacacagaacaccagcttttcccctttgatatgaaatgaagtcttcagtcttgtgagtgaaagtttgtgagcctaatcactgctgcagaagctcacaacacaagttagttagctgtcacattcaatggcacacagaaaaaggcgtttagatcaactcaagcatccattcagtcctcacccctttgaagcagttgcatttggctcatggcaagccgtggagttcataaaaattgagggaggaactatgtccatgcattttgtagataatcatcatatggttatggagaaaggacccttgtcagatatacggataaggtcaaggaatgctactttatcagattgctcccgttttctacgtcctggaattgatgtatgtgtgctatctgcccctcaacaatctgatgatgcagatgcaattaatatcgaccctgtttgggctgatgccaaaataagctctgtacagagaaaacctcatgactctgagtgctcgtgtcagttttatgtcaacttttatgttcatcaaggttcactcggtgcagagctaagaactctcagtagggagatcaaagtggttggaatcaatcaaatatccatcctccaaaaacttgaaagtactccttgtgaaaatcagcactaccggtgggcatcatctgaggactgttccattatatcacacactaaattgcttctgggaaaagtggtatgtgatctttcatgggttagtggtaccacagcttt

SEQ ID NO: 125928 - DNA, 381 bp, Glycine max
  Clone ID: PAT_MRT3847_84721C.1
ggtaaaaacaccatttgtgaaagggagagagttttatgcttttttaaataatttccatttttttaaaacacgcaaacaaaaaaaagaggggggggaaaaaaaaaaaaaaaaaaaaccaacggggggaacaaaaaaccagagaaaaagggggagcccaaaaccggaaaggcttgaaacccaatgcaaaaatcgcaaccccaaaaaaaaatccggatgctaaaaacttgatgaccagaaagccaaaactccaaaaaaaaaaagggtaaacgaggcggagcgaaaaaagggggtgtccgaaaggagggtcccttacaaagggccccgggataaaaacccccccatgaaaaattgggtaccagaaaaaacacaccccggggaaaa

SEQ ID NO: 125929 - DNA, 138 bp, Glycine max
  Clone ID: PAT_MRT3847_84722C.1
gtacttttgagcatattcactcaaagaagagaagtaagcttgagcaccaaaagcttcaagacttggtttatgttaagtataaccaagctcttctagatcgctttgtgtgtcatgatgtggattagatcctagttgctt

SEQ ID NO: 125930 - DNA, 402 bp, Glycine max
  Clone ID: PAT_MRT3847_84723C.1
aaaagggaaattccagggcccttttgaaaataggcggttcaaaacccccccccaaggggaggcccaactaaaatagcccagtccctccccatttcataacgaaaaacatgaatccccaaaatctcagtacccccgagattagcattcaaccccttctccctttgaaaaccttccccaggggaaggccaacccccaattaaaagggtggggtgtttaattttggccccccccccctttgggggcggcttttttaatttaatttgccccattatcctgcttgtaaaaggccccaagggtaagggtatcacaaaaaaattgcatgaccaaagggctatccttggatgattcccctcccaacggatccaattcaacaatagcctcataaaaagcctgttttgcaag

SEQ ID NO: 125931 - DNA, 405 bp, Glycine max
  Clone ID: PAT_MRT3847_84724C.1
gttcgccttttttcattgaactattcaaaaatcggggggaccttctttattcgggtatcttaagaggtcgaagctcttataaagataccaggggatacccttccctgctataatgcttcaaatacttttcagaacaccacctatattcgaccttaagtaagagcacggaccaatatatgaacttaaaaatttcatctgttcaaaaccttttaacgttccatggctctgaggttcagtaaaataggcaatggattcttcctttggtgcaagatgatttggccaagtcttatggccctcggagcacccgtaaattcttatcaatagtagagactggaaatgttcatcacagttcataaccttcatatgggtcataggtttgacgatcaatacattcataggcatacg

SEQ ID NO: 125932 - DNA, 460 bp, Glycine max
  Clone ID: PAT_MRT3847_84725C.1
gttgtctcatcattgttcgatatcttcacttgttttcctataccaaagaaaaagcattggatgttgaaaagaaggaaatgacacaagaaactgttggcgttgttggcaaggttagtgaaatatccaattccaatatgtcaaagaatggcccagtgattagatccgagtgttccttgacatctttggaaagtgggatgacaacatcagctcttgttcttctttcaagtcaaacgcttcgaggattgcaatttgaggacttgcttggtgcccctgctgaattgattaggaggggaaagcatggaagcctacaaggttatgctcgataatggggtgctgttggcagtgaagaggatcaaggattgggggatttccaagcaagattttgagagaaggatgaatttgatagcccaagtgaagcatccacgcgtattgccacccgttgcatactattgctctcagc

SEQ ID NO: 125933 - DNA, 115 bp, Glycine max
  unsure (1)..(115): unsure at all n locations
  Clone ID: PAT_MRT3847_84726C.1
ttgccctaacgcagttacggttgataggcgcanatcatattgaaacactttgtggaattaaaacacttgctttggatagaacgggcacaatgccatgatgagagctcactgcgac

SEQ ID NO: 125934 - DNA, 276 bp, Glycine max
  unsure (1)..(276): unsure at all n locations
  Clone ID: PAT_MRT3847_84727C.1
ggccgcccttatttctttttttatcggagagatttctattaaataatacttttgatttttttacttatcaaatgttgtaagatcatgcagcggatctcacctaatggaacaaggcattattgntttttgaaatttaccctgattcatagagtaaattctgctcttcggacaaaataagcgaatctctctctgtggataatcctccttccgatacaatttacaccccttaattgataacttttgttaaacaatcagccactgcattggcgttcccct

SEQ ID NO: 125935 - DNA, 272 bp, Glycine max
  unsure (1)..(272): unsure at all n locations
  Clone ID: PAT_MRT3847_84728C.1
ggaagaagcaacaatgtctggtcgcncccaagggaggcaagggacnnggaaatgttggagctaacntgcntcgcaaggngatcngcgacaacatncagggattcangnaacccgcgattcggaggctagccagaanangnggcgtgaaaagnntcngcggcttgatctacaaggaaaccangggtgtgctcaaaatcttcctcgagnacgtcattcgcnnngccgtcncnnanaccgngnacgtnaagtgaatggccgtnangncnatggcc

SEQ ID NO: 125936 - DNA, 357 bp, Glycine max
  Clone ID: PAT_MRT3847_84729C.1
tataacgctttctcaactcgcaatttattttgtgtgttgaaagaaatgacgatagggaaggacgcagaagtataagatgaagacgaagggtagagtaagtgataaagagtattggctgacatcttgtaaataaggcaaccctaaatgaaccttgcttgggttattgaaccttgatgttcccattaattgattagctccaacctgctactgttaccaataatgaatctattgtcattgcttgaatcggacatgagtgaacgagctttgtgggattgcgtattgttagaaagtcctcaagatgatatccagagtctatacgaatcttttagatttggcctccactaatgtcctgtcaat

SEQ ID NO: 125937 - DNA, 106 bp, Glycine max
  Clone ID: PAT_MRT3847_8472C.1
cgcacgcaagctcggcaactaggctcgcaagtaatcgcaaaatctaggcgtttgtctcgttccgtcgttccgccaacaatcggcgctccagcagattctcacaacg

SEQ ID NO: 125938 - DNA, 415 bp, Glycine max
  Clone ID: PAT_MRT3847_84730C.1
attgtgatacgtccctggacttaacgctaaaactattttctaagcccttcttaccaaccgctaaaagatggcctttctacatcataggcgcaaactcattgtaatctatacgtccatgattatcgtgatcaattgccttgattatctcttgcgaacgaacatgttttatacgaaactcatcacaagcctgtgagaaggcttgctaagtaatatagccacttccatctttatcgaaggaagaaagaagtacagataaatgatgttgtgtgtgaattgtcgttcgaggcgacgtggcgagcaaataactgccgcgtagtgaattagtggactattgatcaacaggagctgctgtcgtgagagcataaagtggcagactcgctaagatgagcgcggactgtttgaaaccagcgttaag

SEQ ID NO: 125939 - DNA, 511 bp, Glycine max
  Clone ID: PAT_MRT3847_84731C.1
aagagccaagcatggcaaatggaaaccaccattgaacctgtactggcatcactcaaagttaatcactttccaatatgcccccacattccagaccccttctagatattatttacttggcagttgatgggtgctgcactctgggttttctgttcaaaggtctatgattttaggtaactataaaaaagtgtttgggttggagtagctagtcattcctgtatattactttgggtcttgctacagctaacagctttaatctgagctgaatgatttacttcattctgctactttaggttgcgcttgtgtaggtttatttattctctttcttctcttggttgatggtgcttaacaggtgcaatttacatctgttttatttttttgttccagctgcaactctttccattcaaccatattcctcctgtgattggatttttatgaaactgttagtagttatgttaagtagaaacttaaaccgcatgtattgttatatgataattatgagtgctttggttgt

SEQ ID NO: 125940 - DNA, 311 bp, Glycine max
  unsure (1)..(311): unsure at all n locations
  Clone ID: PAT_MRT3847_84732C.1
gggngatttgatgaaggtttatcaacgaaataaganagangaaaaacgttgagttatgatacattntgaaagatactataaactaacnanattatggtcgaacnggnnaggacttgaggcnaatcctcatgagcagagncagacagagtctgtagcttgcnctcngatganatgaactgagnattgtcctccattganattttntnggttnagtgcaacagaacttgcgccanctcgacgccatcacgccagccatggantttcagccgtnacaagcaaaggggcgttncgnnacaagncccacacgngaa

SEQ ID NO: 125941 - DNA, 256 bp, Glycine max
  unsure (1)..(256): unsure at all n locations
  Clone ID: PAT_MRT3847_84733C.1
attttttaatccgtatacaatcacatggtttatganctttcattgcttctcgatcctcgatagaatctctattttaacaacattgaggagtgtcgaaaaaagtgttaaaatgctagtgtttcttgtgcatagaaataaccaaaaattaagagacaagaggtataaatggaaacattcttgtgtcaagttgctgtaagacaacctagcngcattnacagatttaatgggnatngcttgactcncccctaatagngtc

SEQ ID NO: 125942 - DNA, 372 bp, Glycine max
  Clone ID: PAT_MRT3847_84734C.1
cccccacgggaaggtggaattctattaccaatcccaagcaaaaccggaactaaagggaagcccaatcccaaggccaaggtttttcttaaggccacattcggaaagcagccttcttaaggttggcctacagcaggaaaaaaggaaacccccctggatataaaaaactccgtaggcccataaaaccaaatggccatcaggaaacccaccccaaattctgttttttatgaccacattcttccccgaccgcaaactaaacattatcctctatatcaccccatctttgggggttttgctttgggggggctgggaacaaaatcactctgtcggcgggatgccccgacctcagtttcacccggggtggaaaaatttgga

SEQ ID NO: 125943 - DNA, 393 bp, Glycine max
  Clone ID: PAT_MRT3847_84735C.1
aaaaacgcgcgaggcggctcaagaaacactcaaacacaaaacaccatttttttcaataaacaaaacaaaaaatcctttgttttttacaaaccttccctcccacaatcctaacaattttattatctattcccactcatcaactattacactaacataaattataaaaaaattcaattttaacttactcacttaacattcacataaactctctcttcaattcctaatacaattccatcttcctcatttcaaccattcaattccccccacaatctataaatcctcaagtacttcatcttcaaccctaccctctactacaccttttcctctctcaacctctttctcactaaaatcattctcttaccctcttacttcctcatcaacctcttacaccac

SEQ ID NO: 125944 - DNA, 155 bp, Glycine max
  Clone ID: PAT_MRT3847_84736C.1
cccacgctttctcccacccctacctccaatctacactgatccctacccgttccatttcatgccggtacgttaactactagctcttagctcccaacatacccaacgctctcgtccaccatctactaacactcatacaacctaccacccactcttca

SEQ ID NO: 125945 - DNA, 290 bp, Glycine max
  Clone ID: PAT_MRT3847_84737C.1
ctttggtctgatgtatgtgcttgcatggtcgtgagaagatcatagacggggcgcctgagaataccctcggcacctttggtgcggcggggcttacgcctgtcctgtgcgcctttactacagtcttcaacacgagcgccctcgtccatcctaataagaaatatatcgacaggaattataagctcctgcacctggccatcgcctaaggcgccgccgatcacacaggggcccctatccgcgcgcgtaccgggcggtttcggctaaccggcgacgactacgccccggcaaaacta

SEQ ID NO: 125946 - DNA, 576 bp, Glycine max
  unsure (1)..(576): unsure at all n locations
  Clone ID: PAT_MRT3847_84738C.1
ggagtgttaaccctcacaagaaagacagcagcaatacccaatcccacgcaagcccatccaattattgtccaataaacaaacctcatcaaatcctgatagatagatagatagataggttaaagatttcatctttcttcttcttttccttcaaacaatcaaatccacccacggcaccctctcacataaaaaaaaatctcagatttcttcattccttccattcaattccaatccaaaatggatcaacaccacttcctccaccaccaccactatcaccacccccaagaacaccgtagtcgatacacctccctcacacctcaatcccaccttcacagtcaccaccacaataatcttcctccaccaccgccaaatccttctccgcctctttcctaccaccgcacaccgnaaccctacacccctcctacaccccaaccccaacatcaacaacaacaattcccttatacacccctcccagaccgncctctcgaagaagaaccccaacctcaacgtcatatcccatacgatcttctncctcgccgnaccaccaccctnccctggaaccctaaccctaaccctaac

SEQ ID NO: 125947 - DNA, 404 bp, Glycine max
  Clone ID: PAT_MRT3847_84739C.1
accggttgcaagaagccaccggagggggctacaagtgtgtctgacgaatcacaggcccagggccagtgcgatgaggatgaatccctttttctctctacatacttacacactttggagcatgattacgccatgctcacgatctgttgcttataaggctgaacactgattatcgccctcgaaccccgcacgtgatctgctctgtctggactctcgttgtggaagcacacgtcctctgtcgactcatgaccgcacctgaatagtgtcttaaatcaacaaacgaattcatgctctgcggacactgttgattagaatacactacactttaccaagccgcctactttcatggcaaagaccggaacgaacgtcttattgaccaagacgaggttatcctagtgcgaaccgcc

SEQ ID NO: 125948 - DNA, 291 bp, Glycine max
  unsure (1)..(291): unsure at all n locations
  Clone ID: PAT_MRT3847_8473C.1
gcagaaaaaaggactcaaagagagtgaaaggtggaccaacgtgtacttcttgctcgggttctttgtgctgtatcgtgtgctttgcttcttggttttggttagaagggtttcgagatccaaaacttaatagacaccgagaaagaaatggtgatcaaacgctgataactttaagcgttgtagtgttttttttttttttatcatcctattgtattatgaactcgtttaatttgttttatttgatttctatataaagtatnaaaaaaaaaaaaaaaaaaaaaaaaaaaaaaaaaa

SEQ ID NO: 125949 - DNA, 313 bp, Glycine max
  unsure (1)..(313): unsure at all n locations
  Clone ID: PAT_MRT3847_84740C.1
agcctaaaagtangactatatatggangatancagaagaacaagctcggaattggttcgagcggaaaaataggcttagatccgggataatttgggcggagggtaaatgaaaagaggagaattttaaatagtatagacaattgcccccataacatatattatctgtatatatgttgttgttttcaagagaaaatatacaggaaatgattctatttgtaaagaatgtataaataattcattgtctatacaaataatatggataaaaaataataaagacagtatgtatatataaaaaaaataatagaaagggtggt

SEQ ID NO: 125950 - DNA, 295 bp, Glycine max
  unsure (1)..(295): unsure at all n locations
  Clone ID: PAT_MRT3847_84741C.1
ggggcctttnntttttnccgcgggcgccggtttaccaccccgcccccccttnnnnntnattgtntattgntttttgataagatttttctaatnctaaactgtntttccactcgcgcgtttttncatacnactaggatttttttttatnatttaanaagggggaagggnaaatttttttttaagatttttttggaaatttactaggtttttggggtgttttgccaaaagggtacatcccttcttttttttgccaaagctttggccctttgttaatttcttnnngaaagatttnttt

SEQ ID NO: 125951 - DNA, 176 bp, Glycine max
  Clone ID: PAT_MRT3847_84742C.1
tcgacagctactagtcagcggcccttctttatttatggaggagaatgaaataactgtccattttctacatcacaaacttaaatgatggaggctacaatctgtctgatagaacagggcaaaattaaaaccccaccatctgggcgtaagggaggatccctaagctaattgggagcccc

SEQ ID NO: 125952 - DNA, 850 bp, Glycine max
  Clone ID: PAT_MRT3847_84743C.1
ccggttggagtgtacccaggtcgggtcacgcgggtggggacacagtaggagaattttgtaattttggactgggaagcgaagtagaggcgtccacggttcattcccaaaatgcccctggggtcggtggactcggtggcgcagccgaggatgagagggggggtaaaaagggaacgcgaaaaagtgaatttttctctgacgagattgccctcggcgtaagtgccgtcggcgtagaagtaggagtagtggcagaggcggttctggtcgcaggaggtggggagggtaaaatcgggaattcggggcttgcagacagggtgagtacacggaagggtagaaaaggtagaggagagagaagggtcaaacgacgccgttgggggaggcttcgcgggtgcttttttgtgacactgaatccacgagagctggcttccggtgtccaacaccatgggctggacctgcggtggggtaccaatgggaaggtccacgattaaagccatggagtatttgaaagacaacttgtagttgtaaggagaagaaggtggtgatttaagttgtgtgttgttgttgtttgtgtttgcaatgagtgagttgcgtagcatcatcttgagagcggtgttggtggagagggagagtgatgtgagagggaaagagagtgagaataatgaggttgagttgttagtggtggtggtggtgtggttgagttgtacagagaggtgtatggaggagagaagaaaaaagaacaagaaatgcatgtttgaaaacagtgatgatggaggcataatgaggtttgtgtttgtgtttgtgtgaatgtgagtataacaggttgtgtttgtatatatagcgggggaaaggaaaa

SEQ ID NO: 125953 - DNA, 413 bp, Glycine max
  Clone ID: PAT_MRT3847_84744C.1
gacgagagagtcgcaggtactgcatttgttgattacaaatcactacttatgtctcagaggaggcttgggaaaaggattggactgaccgatggatttgcagcctctacaccaatagaggcagccattgtcaagcatattccaagtacactgactctgtttaacgaggctattgatgctcatacctgatcgtacgatgatcaaccaagttggagacgaaagaatgcatggctatatagaagatttcagatgcgatcttcctaccgatctacgatacatgacgctcattgaaagtaaacatactgcacacataaaccatcatagcataattgaaattcatgacataattttgccaatcgacagggcgaacttcaatgacgtgaatatcgtgtactagatgatcgacaccgatctga

SEQ ID NO: 125954 - DNA, 324 bp, Glycine max
  unsure (1)..(324): unsure at all n locations
  Clone ID: PAT_MRT3847_84745C.1
gtgtttgtaagtttggatattgatattaaattgaatgcanacataaacaaaaacagcacatctngnaacactatggaatcacttatatgaacttccccggcgcacgagccacctcagtttttgtaaaagatccattcggcaaattgaacagaaatgggatcaattttcttatatcaagcgaaccaattcaaggagcaacagatatcatctgaggctccagaatcacaatncacactactttatttctgccaagtgctaaccgaagcacaaaagctacattatttactgtatgtactgtctgcaccttatcaacacggttcaatg

SEQ ID NO: 125955 - DNA, 368 bp, Glycine max
  Clone ID: PAT_MRT3847_84746C.1
aattgggctacccaaccttaaaaaaacaccggacagggtcctttaaaatgaaataaaaatacccccattttaaaagaaaaaaaaaactggggtccctagggtttttaagaacaaaagctcttttaaaaaactaaaacattcatgaaatacaccagcaggggacttaaaaatcttaaccgggaaaaggggggaaaaaattggttggggggcacataattttggaaaatttttttaaaaaattttggtcaaagtttaccatcccaaagatttttaacgggtttaaaggcccccaagggtttgtcaaaaaaaaaagggcccttaaataggctaacccggttaaatttaaagaacttttccaaaactttttt

SEQ ID NO: 125956 - DNA, 634 bp, Glycine max
  Clone ID: PAT_MRT3847_84747C.1
acataaataagacgagtgtacttttctggaaacaaaaatgaataggtattacaataccttacaccctctacctattatttttcctacttttaacatggggatggttcaaattaagtgttggacaatgtggcattcacatttcccacccgtgcccagtgttttgaaaagcaaacaaaattatgtctaacttattgaattgactagttgaacttattgaaaagcatcatccttaaaatcgtgcgtgtcacaaaccagtcaagaaattattgaaaagcattatgaccaccttcatcatcaaacgcatgaacctctatatatactcgtcaaaccaacaagagccagcaatcaaagactcaattgacggtgttgcgttgagcactgtattgccagcacgccttcactgttttacacgtaaaatccaataattgctgctcttccttgtcgcatcgtagcacggtgcaaaaagaagggcgcaagtcacacaacacttaaaccctaatatggcagatgatttttagtattttcccaatgaaaaggatgcatgaactactgcgtgataaaagagaaattaaagaaacataaatatggcagatgattcaatgtcatacccctctgtcgtcttctcgcagccgta

SEQ ID NO: 125957 - DNA, 166 bp, Glycine max
  unsure (1)..(166): unsure at all n locations
  Clone ID: PAT_MRT3847_84748C.1
actcgtacctaaactcggttccacgctcaatcaccctcgcaactccataatcgggacgggcttcatttgtacatgaaacaattaaggtcggtttgcatggccaaaaaacttttaggccggtaaagttggttaaaatgtgatcatcaatcccttagtcccccntaat

SEQ ID NO: 125958 - DNA, 451 bp, Glycine max
  Clone ID: PAT_MRT3847_84749C.1
acgaggttaaaaggagcgactttgatagcgtttaccaacgcaagcgtccactaatttttgtttcgcgtcaaattttttcaaacttaggattattaatacaagagtgatgcatattctcaaacaaaaaaattgagagtgatgatgcacttaattatagtccgacgtcatacataaaaaaaaaaattgtttttttatggattttataattgaaatttgaattatgaagcgcaataagcttaaaatatatacaaaagcccatgccacagattatgagtcgctgtactttgaagacttgcattcttaagattatttgaattgactatagcagcgaagaaaaatagtccagaagcttcattttatgggggaaaaaataaaagtatgggtaattaatttatgtatcgctagagagcatcttgaaggaataaaaagatattctgtgcgccacatcttt

SEQ ID NO: 125959 - DNA, 373 bp, Glycine max
  unsure (1)..(373): unsure at all n locations
  Clone ID: PAT_MRT3847_8474C.1
ggctcgatcacaattagctttcgtttagttgctgctgttgtttctgttccttctctagttccttaaactctttgtttccaacatccttagaaaaggtaaaaattcaaaaaccagaacataaaccggcggctgaggtttcccaagaatatgctgcggcgttgggctctcgcaccggtagggagccgcaacgctatagaaatagtcgtcgccaaggagagggatgcataccgntcagacttacgataggagtgtagtcttccttggatgtcttctgtgaagactcggaagacctgggtattagtgcccagaaaggtaaagggatgctctttccttagggaggctctgtatttgacgattcaaaataggaagccgc

SEQ ID NO: 125960 - DNA, 155 bp, Glycine max
  Clone ID: PAT_MRT3847_84750C.1
ggaaaaattttaggattatcggtatatattattggggtgacttgcgagggaaacctttaaaattgtgctagcgttaaggatgaaaaattggggttgtttaggggaaacaatgaaggtggttgttcagttacaaacaactttttaaacaaaaattg

SEQ ID NO: 125961 - DNA, 514 bp, Glycine max
  Clone ID: PAT_MRT3847_84751C.1
gccggggatttgccgtgctacatcgttagtagtaccacctgcttgggggggggggggggaccaaaacgaaacaagcatgctgggtggtgtaaagaacacgactcaaagttaaatataaagaacggtagcgaaacacaagggtaggccgatagcaatgggagaagaggaaatccccgaacaatgtaggcgcattggcaagcaaagaaacaaaagcattggagctagagggggctaaagaacaactgagtcgttgagtatgggttaagctgggggcgtgcgtacaacccgacgataaagcttgagatggtacccgggtagtattactgtttgcagagaagtaacaatggttgtcacaggtatgcgttaactaatgctaataccacaagaatttcgttagcccggctgtcgaggttacgggggtaagttggccgttagaacgcgagctttaatatacagcttggcgcgggtgatttgtatgatttttggtggcgagcgcaaaacagtgccatctata

SEQ ID NO: 125962 - DNA, 444 bp, Glycine max
  unsure (1)..(444): unsure at all n locations
  Clone ID: PAT_MRT3847_84752C.1
tctnnngaanaggggacgccgaaccaaaacaccccaancgccaaccacaacacggaacgaacaagcaccggaacagcggagacccaccggaaggcgacaagcagacaggcagagagaaaaaaagaaacagagaaacaaacaaacgaagagaaagagagattttttttaagagggggggacgaaaagcggggcaaccgggccgggaaaaaaaaaccaggncgagggggggggcggaggccaaaaaaaaaaacccccggcaaaaccccgcagaggggaaagcgaacagaaacgaaccgaaccccaagcggggnaccaccggcccgggaggccngaacgacgggcaagaaaaacgaaaaggaacaccgggaagaccccgcgaagccgacaaaccagcgaccgggacagagggccccccacggaacccaaccaaaccagcagggcacc

SEQ ID NO: 125963 - DNA, 263 bp, Glycine max
  Clone ID: PAT_MRT3847_84753C.1
aacctttgggctgatctatgtgcatgtttatgtgcttgcatagccgtgcccagatcctagaaggggatagtaaaaataatggacagggacgagccctatgagtaatacgtcgacgtcaaatccgtgtccgacgtcctccccttccgcatacgtcatagtcatatatccggatatccatccagtcaaaagcgaccaccatacccacccacgactaccacctagactctcgattacataccgtctcacgtacacgtctatgtctc

SEQ ID NO: 125964 - DNA, 588 bp, Glycine max
  Clone ID: PAT_MRT3847_84754C.1
gcaccagaaggaagaagaagaaggagaagccggacccaagcgtccgcgtttcatctttcacctccttcctcctaaccctcccttaaatcataatcccatattcatatattgcattcgagctattgtttgtttttacgtacacatgtcgtagtagttcatgattttgaccttaaaataattctcattttgttgtcaagcttcatcgtcgtgttttgaggtattgtctgctctgacgctcgacgacattggatcatcattgctatgggtaactgctgcgttgtgccttccggtcagacaagaaaagaaaaaaaacaaaagaagaagtggaatccctacgaggacgggtgggggaagaagctggtggtgctgacagagcccacaggccgggacatccggctgcgttacgacctgtgccgggagctgggccgatgtgagttctgagtaacatatctgtgccaagacagggagacgaaggaggagttagcatgcaagagcatctcaaagaataagcttcgatccgcgatatatatcgaggacgtgaggaaggaggtggagatcatgctgtctatagttaatcactcaattgta

SEQ ID NO: 125965 - DNA, 893 bp, Glycine max
  Clone ID: PAT_MRT3847_84755C.1
gaatcaaaaacaaaacatttgccctatataatttatatcagaacattgcacccgattactaacaaagcaggacagtcagttaatcaccatacatttaaccaaactatctataaccaatctacttcacaaaaaaagaagagaaactaaatattataagacacaaacttaagaaacactaaacaaggtcggtcctttatattccaaagtcctaatacttagcctagtttcttcccactcatcatcatcctcgtaaactcattcaagtcaataaaaccatctccattcccatccactcctttgaccatttttttacaggcactaaggctgcaactctctcctaaccttttgagaacttgggacaactcctcagcactaatcttcccatcaccgttcaaatcaaacacttgaaaagcattcttgatctcagtttcttttatcctaccctcttcattgaacatcttcatgaactctttgaagtcaatgaagccgtcttcatcagtgtccatgaccctaaacgctttcactgcttcagcttccccaatggccctatccaaggcccttgcagcagccttgtactcttcaagagaaaccttgccatctttgttggtgtcaaatttctggaacacccatttcatttcctcttcttttggaaggaaactttgtccttcattcgatgtctgtcttgatatgaagctgttcttcttgactacatttttgcgtgaagcggagggcttccatgagaagctataattgaactttaggccactcaaactcgacatgtatatggtttgtttttgggtacaaatatttggcttggatttagcataaaagaataattttttttttttttttttttatttttttttttttttttcccccttttttgtattttc

SEQ ID NO: 125966 - DNA, 141 bp, Glycine max
  Clone ID: PAT_MRT3847_84756C.1
aggacagggggttaaatgagcaaaatagtggcctttaacgtgtactgcccatcagtggactttttcctaaactggattctggcacacctagcattcgcgtctttatccgaaaccatgcttgagttgctacatgaagcgctt

SEQ ID NO: 125967 - DNA, 270 bp, Glycine max
  Clone ID: PAT_MRT3847_84757C.1
gcggcagcacaaaaaaaccattggttgtttaagatcacatacctttataccatacggaggggggatattagagtactattcttaatggcccgcggttgtgttctacacaggccgggctcattactaagggtctttatctcggacccataaaaccttacattggttaaaaagccttgggaaaaaattgaacaacactcattaggttatgaggcaccttcggcgacattggacgtttttccgggtaccttttcttgtggatgtcatactcat

SEQ ID NO: 125968 - DNA, 233 bp, Glycine max
  unsure (1)..(233): unsure at all n locations
  Clone ID: PAT_MRT3847_84758C.1
ctcaagtttttgaagtatagagatggcagagacattcctatttacctcagagtcagtgaacgagggacaccctgacaagctctgtgacanatctctgatgctgtcctcgacgcttgctcgaacaggaccagacagcaaggtgcctgcgaacatgcacaaaccacttggcatggtctcggagaatcacgacaaggctatgtcgctacgagagatagtgcgtgacactgcagaac

SEQ ID NO: 125969 - DNA, 220 bp, Glycine max
  Clone ID: PAT_MRT3847_84759C.1
ccctgaatggtttgatgctgggaaatcatagtacttggcatcttcctcaaccctcttcatgatcgagttcatcttggtccactacgtcgagatccgaacatggcaggacatcaagaaccctgtctgtgtctaccaagaccccatcttcatgccatacttcttgcccccacgtgagtgtggataccctattagtgggtgcgacccctttaactttgatcct

SEQ ID NO: 125970 - DNA, 782 bp, Glycine max
  unsure (1)..(782): unsure at all n locations
  Clone ID: PAT_MRT3847_8475C.1
ccacgcgtccggttgtataagtgtttaggagttaatatgagtgttaagaatgattttgggatgaataggttcataaaaacccaaaatcacgaggtgttgttctgcactggttgtttaagcgaaattgggaattgaggtctggcatgattctgagttcacttaagtaatagaagatctcacttaagcgaactgtgtggtctgaagctggaaaagtggtctgcacgaaagttgtagctcttgatgttagctaactagtaaaattggtttcactcaaaaataagttttgtatctcgagataagttcatattagtgagcaaaggttaaactgtcaggattatgcaatcagtttgtattctataatcttaggcatagtatacaattgaactagctttcgaggtaaacatagaagttgtagctaattgtcttatctttaaaataagacaaaattcaacttgataggattagtataactatatacagtagttacacctagagaggtcctagacacgcaacaaaaaatgatagaagtaatactcaaaacttaaggatgttataccaatcataatgcaaagtaggtagatgctataattgatgtgtgacatagatntaatttaagatgtgcatgacttaattgaatgatgatattgaatacatgtgttgatgctatacttgaatggtgatttatgagtgtcgnggaatcattgnatgttttgctttatctctaaagtgtgaattgtaacgcataatattcatgtgtacatggtgaaatcagtgatgacatg

SEQ ID NO: 125971 - DNA, 1722 bp, Glycine max
  unsure (1)..(1722): unsure at all n locations
  Clone ID: PAT_MRT3847_84760C.1
gccggcccccatgtgggattgctgcgccttggggtcaggctgaaaacagaagggcttagatccatcaatatacaagcaaaactcaggcactattacaagttttgatgcttaaattaagaatctgtctcctgattctcctccatctctggagattgatggtaaagttgaagatagaatttcaccagatatgaaattggaagatcttctaaggatttatgaccaagagaaacttaagttcttatcttcatttgttgggcagaaaattaaaacaaatgtgttagtagcagacaacaagatttgattaagactggagatagagaagacgtggaactagtaagctgcaataccaaagggttcattgtttcttttggttccttggtaggatttctgccataccgtaatcttgcttccaagtggaaattcttagcttttgagtcatggtgaagacggctcggctttgatccatcagtctgcatgctcgtcgcaggcccctttgcaccctgcgatgctgaaattaagaacttgtctcctgattctcctccatctctggagattgatggtaaagttgaagatagaatttcaccagatatgaaattggaagatctgctaaggatttatgatcaagagaaacttaagttcttatcttcatttgttgggcagaaaattaaagcaaatgtgttagtggcagacagaaaaatgagaaagctcatattctctntaagaccgaaagagaaggaagaattagttgagaagaagtacggctgcgagaagacgacagaagggggggatatagtgtaatgctgtgtccagaaaattgcttactttgggatttttgttgaggttgaaggagtttctgcattaattcatcagtctgaattatcgtgggatgccactttgaacccagcatcatattttcagattggtcaggttctggaggcaaaagttcaccaaataaactttgctcttgagcgcatatttttatcattgaaggaggtcatgcctgatccattaatgaatcccttagaggctatagttggggatcatgaccccttagatggaagattggaagcagctcaaacagatgtagagtggcctgaagtggattcccttgtcgaagaattgcaaaagattgagggagtccagtctgtttcaaaaggccgtttttttagaagccctggtttagctccaacttttcaggtttatatggcatccatctttgaggatcagtataagttacctgctcgatctggaaacaaaatacaagtggtgatagttcagacttctttagataaagaaaggatgaagtcagctgttatgacatgtgccaacagagtagaataattgtggatggtgacagtagtaaagcctattgttgctttctttttttggtgattgtgcattctttcggagagtgcaagctgcaatataaggagcatttcaagctaatttatgcatgaggattggtgggaggatcaattttttctttcttgtaaaaaagtagtaataaaggcatatttttctaacttttggggagacgtgttgggggtgagaggaggggttacatataaaggacaagtagaaaaaagctcgaatcctttctcttgggtcaagtgatgccatttcttgtttgccttgtgcaccgcgaccgctttgagaaattagacagattgatactgttcctggacaaccattgcatatagtaaatcacttttggtaatttcc

SEQ ID NO: 125972 - DNA, 1076 bp, Glycine max
  Clone ID: PAT_MRT3847_84761C.1
gtaaaagtcgtgtccagaaaattgcttactttgggatttttgttgaggttgaagaagtctctgcattaattcatcagtctgattatcgtgggatgccactttgaacccagcatcatattttcagattggtcaggttctggaggcaaaagttcaccaaataaactttgctcttgagcgcatatttttatcattgaaggaggtcatgcctgatccattaatgaattccttagaggctatagttggggatcatgaccccttagatggaagactgaaagcagctcaaacagatgtagagtggccagaagtggattcccttgtcgaagaattgcaaaagattgagggagtccagtctgtttcaaaaggccgttttttcagaagccctggattagctccaacttttcagtatggaaaccaaatttgttccaggtttatatggcatccatctttgaggatcagtataagttacttgctcgatctggaaacaaaatacaagaggtgattgttcaaacctctttagataaagaaaggatgaagtcagctgttatgacatgtgcaaacagagtagaataattgtggttggtgacatgacagtaagcctattgttgattgcttttttggtgattgtacattctttcggggagtgcaggctgcaatataaggagtttttcaagctaatttatacatgaggattggtgggaggatcaaatttttctttctttgtaaaaaattagtaataaaggcatatttctaacttctggggagacgtgttgggggtgagaggaggggttgcatataaagaacatgttcttagtcaacatataaaggacaagtaaaaaaaactcgaatccttgctcttggatcaagtgatgccatttcttgtttgccactttgccttgtccactgcgaccgctgagaaattgttgatcattgtggttggttaatataagcttattagacagatttatttaaaaaagttgatgaatttcctagcgagttgttaaacaaaatagtcagtgttaaataagttgactctatttatttaaatgatggatgctgagtattgtagttttgattgc

SEQ ID NO: 125973 - DNA, 1067 bp, Glycine max
  Clone ID: PAT_MRT3847_84762C.1
ggtgtttgttttttttttttttttttggcaaacgttttaccaacaatcaatttaagttccaaaactcttccacagagcacgactgctatcatcaagcattttctttacatgtttgcatttcaaccgaaagacgaaagatataagaaaacttataataaactacgcaatcgcatgcatacttgttaaagacgagttttactagtatgcacacaaaatattcaaatcaaagatacttaaacctactatttgactaacaacagttgtatgtgtatgagtagaaacaacacatgcgcaagaatctgttggcctcctcaatcaagcaaatcggagactggattcttcctaaatccatcaacttgaaccaactggtttgccaaatttctattgggatatatactatcagctctcaacctgtccctaatcccatgctaatgtatacagagcgtaggcttgctttgagcactctaatttcttcaaagtaacagcaccggaggcacgacccggccagttaaggacaggagcgcatcgccggcagaagggacgagccgaccggtgcacaccggaggcggaccgatcgacccaacccaaggtccaactacgagctttttaactgcaacaacttaaatatacgctattggagctggaattaccgcggctgctggcaccagacttgccctccaatggatcctcgttaagggatttagattgtactcattccaattaccagactcaatgagcccggtattgttatttattgtcactacctccccgtgtcaggattgggtaatttgcgcgcctgctgccttccttggatgtggtagccgtttctcaggctccctctccggaatcgaaccctaattctccgtcacccgtcaccaccatggtaggccactatcctaccatcgaaagttgatagggcagaaatttgaatgatgcgtcgccggcacaaaggccgtgcgatccgaccggacgcgtggaacctttgcatttatataggcattcattagaacttggtacatctttgctttagatggataatcagcttgtttcattctaagaaaaatctt

SEQ ID NO: 125974 - DNA, 365 bp, Glycine max
  Clone ID: PAT_MRT3847_84763C.1
gccaatcgtccgaaagcctaaggtatatttaaacgctgattgaatcattcatgtacgggcattgacaattattatatagttcaccaaaacaaagtgatcttccaaatgtacttactaataaaaaaaaaaaaataaataaatatattttttaatttaaaaaatataaattattttaaataaatattcatttctttaattataaaattttatattgttctgtctttttaaatgatccaattctttttattttcttatatttcttttttattttttttttttattttatatatttattatggggggctggtttctttatttttataatgttatttttcttttttataaaattcttttttttttataat

SEQ ID NO: 125975 - DNA, 266 bp, Glycine max
  Clone ID: PAT_MRT3847_84764C.1
gcttatggaacaacaccctaattctcgggcattgggcttattcttgaactgatcatagctcactattgacttcatgattactgattaacaattacagactactgctctgacttacccatgtatatggatctatattgatcaattagagcacccaaactatcatcctttaacgatcaacttcacaactgtacttcatctgattaactgagccattgctcttcagcacttatactatgttccagatgacttaatctcattcatgatca

SEQ ID NO: 125976 - DNA, 687 bp, Glycine max
  Clone ID: PAT_MRT3847_84765C.1
cgtcgcatgcacgcgtacgtaagctcggaattcggctcgagggtgcacctggccaagagcagtggttcagccttgactgtgtggggtacggggaagccgcggagacagttcatctactcactggacctagcccggctcttcatctgggtccttcgggagtacaatgaggtggagcccatcatcctctcagtgggcgaggaagatgaagtgtctatcaaggaggcagctgaggctgtggtggaggccatggacttctctggggaagtcacttttgattcaacaaagtcagatgggcagtataagaagacagccagcaatggcaagttgcggtcctacttgcctgacttctgtttcacacccttcaagcaggctgtgaaggaaacttgtgcttggttcactgaaaactacgagcaggcccggaagtaaagcacgggccaagcaggtgctcacctggctacacccagtcagtggtcacctcctcgcttcttgccaagaactgaggatagtatccagcaacctgagccacacgctgacctctctgccaggtgctccatgccgctgtccagtagggcccatgtccatccctggggaaaggccagaccaacaccttgcttgtctgcttctgcccaacctcagtgtgtccctgctggtctagaaagcaataaaatgaattttcatgagcctgga

SEQ ID NO: 125977 - DNA, 402 bp, Glycine max
  Clone ID: PAT_MRT3847_84766C.1
gtaccaacaaataggaccgtaacatttaatatgtctaatggaaacctaacagggcaatacttacttgttgaagagactaccttactcaatacgaacactttaccaatgctccatctgtattcaatgggccacagaaactatacgccacttgttccaagccaaatgtgattgcccaattcacctacacctgaccttcatacgaaaacctaactttaactttcacttttaaggaattgagggctaaataagcgagcagcttatacacatctcatcttgatcttttcctgcaaacaccttgttctgcttgtgataacaatttatagccctcttgtctgtgagcacctgaagattgttgtccttaatgttagcccaaatccaattgaggacttgagtcttagccat

SEQ ID NO: 125978 - DNA, 141 bp, Glycine max
  Clone ID: PAT_MRT3847_84767C.1
caacaaatataggatatactatattgtatataaaaaaatactagtttttacttcggctgatacatggaaagatattttgtacatggcatgtttagatacaccacctgtgccacgggaaataaaaatacaattggtttggag

SEQ ID NO: 125979 - DNA, 302 bp, Glycine max
  Clone ID: PAT_MRT3847_84768C.1
gattctgtcattggtgtcaaggtgacaaccatacacaatatgggtgcatatggactcaatcctggtctttcaggtgctaagttatggggcaccattactaactccattttacagcagactgtcagaaatcaaatggcaacagcgagaacaccattggattctgattctagcaggcagagcttttgtcagatttctattgaccttctcggtggaggaagcttatgggacaaaactggagattggatcacacttatacaaagacctccaattagaaaccagttgagagttgctgtttggaagaa

SEQ ID NO: 125980 - DNA, 254 bp, Glycine max
  unsure (1)..(254): unsure at all n locations
  Clone ID: PAT_MRT3847_84769C.1
gtccacaatattaggactgatcgtgacatagtatatatattatatatctttgtttgtttaatattttgtgtcctcaaatgtgccatgtcattttaaattctggatgcacaaacaaaatgtacaagaggttgggccaccgtcaccgacttgaatttatttatatgacaaggaaggagcaaggtatcatagttgagaaatgtnnntttaattgatattnnncattcccnnntatagttggatgagagctattttac

SEQ ID NO: 125981 - DNA, 805 bp, Glycine max
  Clone ID: PAT_MRT3847_8476C.1
ggctcgaccgcaacattcccacatctctcgtatacccttttgtctttcttcactaaggtatcttattgagagttcaagactagtcctttgatacgttgaatttctttcaagtattgagattcatttaaaaaatcaattttttgatatcttatacatacatctattgggatgtctagaaccgtggagatcacagttttgtcggcagagaacctccaaatgaacaaaaaacccattagagggaacgcatttgtgacggttcaatccgacgctagcaacgacacaagtgccacaacagtggattctgaaggagggagttacccttcctggaacgagaagcttgtgatggacgtgccattgcatgcaaggtttataaccgttgaagtgaagtgcaagacatcatcggcggggtcgaacagtatcggagtggcgagaataccggtttccgatttcgtcggagggtacgtgccggaaaatcaattgcatttcttgagctacaggttgtgggacggtaaagttaggagaaacggggttgtaaatatttcggtgagagtgaaagtggcacaacaacaacaacaacaacaacaacattcgtgtaattcgaattctatgtcgttgtcgtcggcggtaacgggtgtgccggtcgccggtaatggatccaccggagttgtgacggggattccagctatttggttaaactaccaaagaaattaatctttgaagggtaaaaagaaaattggcaaattgttgattcaattactacttgtgagtttcccagtagtatatatatataaattgtgaatataag

SEQ ID NO: 125982 - DNA, 358 bp, Glycine max
  unsure (1)..(358): unsure at all n locations
  Clone ID: PAT_MRT3847_84770C.1
cgagggaaaagaagacccttttgttcaaattattgattgatgtagacgttttggactgtttatttcattaaaaaaaaaaaaaaaaaaaaaaaaaaaaaaaaaaaaaaaaaaaaaaaaaaaaaaaaaaaaaaaaaaaaaaaaaaaaacnttgggggggggccggggccccaatnngccttatagggagtctattaacgcgcgctacctggccgtggttttacaaacgttggactggaaaaacccctgcgtaccccaatttaatcgccttgaagcaattcccctttttcccgtttggtttattacaaagaggcccaaacgatcggtcttccaaaatttgcacaacctgaatggatattgg

SEQ ID NO: 125983 - DNA, 424 bp, Glycine max
  Clone ID: PAT_MRT3847_84771C.1
tttttgttgagcagataattgctgggatagtggagcatcggatttctgaacagtttgcttctcaaacattctttgtaaatatgctttcttttgtagcacggacagtcaattcatattggggaacccaggtcagttttttttccttatcttctatctgcttttgttcactttcaatgctcaatgttcacaatctcgtcagtaagtggatttcatttatttatggttgaacactataattcttctcaaaaatctaatttaatttttccttctttttaaagtggcgaatttcacattcaagtgttcatatggaaatatgtgttctgaggagttataattgcgtcagcttgtgcttttgtctaagaacaatcaatcacatgttaaggaatgaaaataacttccgcttgtcttataatgcgtcatctta

SEQ ID NO: 125984 - DNA, 767 bp, Glycine max
  unsure (1)..(767): unsure at all n locations
  Clone ID: PAT_MRT3847_84772C.1
ataaaaagtncttacaatacatntaagtcgtcctaataaaatatttatgcatgcaagtgcttatgtcatgtcacgtcagttaaacaatactatcagctcaactgctaagtttccatctacttctctagttttgtgagtaggaggtacttgttatatattagttaccataatgattcctgtacttctctttgtcatcctttaaccatgttcaatatagtctagtgtggttcttttgtagattttgaaggagaaaagaaattaattaacaacttccaaaataatgtgtttatattttaattaaaaaaaatcaatttcttttgcaggatggggacctcatgcatatttccagatgttggctgaacctaatggcgttcaaacttcttcgaacagcaattatgcgcagcatgctgaggttcagattctatctgtgtgtatcccacctcaacatgatggcgataatgcaaggatacattgattgtacattaagtgtgacataggaaaaatcacagaatgtccataatctgtaacaaatataaggattcgataagattattttgcagataaacaacactacagtatcattggttgttacagatgcactatgtcaattacttatttacttaagttgatagtagatgtttgttggattaggagtatcttgttattggtctttttcggtcatcttatttgttagttggtatagtcaccacagtgtaattatgttcatatcatattaatagttgaggagggtttgatggatcccaanc

SEQ ID NO: 125985 - DNA, 494 bp, Glycine max
  Clone ID: PAT_MRT3847_84773C.1
gccgcagaatcccgggggcgacacacgcgcgcgattatgaacctaagacccgtatccatactggagagcgggttattgatgcccttatcccctgaggtctgggcgggacttgtcccttcatatgaacgcaggtaaataagaataaagaaattggtgaggttttatgcacagatacaaataggaggcatagaatacttcttatgtctgatctaccaagaaaacagattgatagagtagcaaacaatcattgcaaaacattaaaatgatattgctgtatggacaaaaagaagctgccataaagcgaccaaatcatttgaaagagcatcagatcacaggacacgtgcaataagtatactgccaacaaacggagatcgcatgagcgcatgctaggaatgaagtggacacagatgcaagtcttattgcataagccctataaccaaatgcaaacatggattatgaccccaccatcgctgaagctacaagttccaagacat

SEQ ID NO: 125986 - DNA, 299 bp, Glycine max
  unsure (1)..(299): unsure at all n locations
  Clone ID: PAT_MRT3847_84774C.1
nagnangnangngtangtaagnncggaattnngntngagntnnacttctntantgtncaacatntnnanagnaagaaatgagngagaatntntgaangaangntntgtaattggtgattntggagnagaantgtttagtanaatgaaaatnaatngagaaagtttangntgaaagtagtggagaatttactggtaaaatttgatncagttaaaanagttattcgttggcgaaattgagtgaatgngtatacgancttcagnaggnaggggagtaatntgagaagatctgagaattttan

SEQ ID NO: 125987 - DNA, 332 bp, Glycine max
  Clone ID: PAT_MRT3847_84775C.1
tattgatgaacgctctgttttttatgatccaaaagcatacgaacgtgggactaatcacagacaagcgacgcagggtaatagatagaccacttcttcacattgtctgcaagggatctaggagttccggtgattaaaacatggataaatgccaagagcactgcgatcaacggtacgcgatcggtttcgcttattgggacactcatcgaaacgtttatatgtgccagggctcctttgacattttttacttggacattgtatgataaaccggctcatgttgatcaaatgcacggacagctggctcgtttgcttgccataatggggacatgcgacct

SEQ ID NO: 125988 - DNA, 1798 bp, Glycine max
  Clone ID: PAT_MRT3847_84776C.1
aactagctcaaagggacgaattctatcacctccggccgactccggcacgagcgccactatcttcctcccattgcgtcgggcctatctctctagctttgcgcaagaaattgaaagatttcctcggttctgctgaagctgagctcccttcgcccccgtcactgttctcccgcggcgggaggatctcttctcagctgctgccccttctgggcctgccaaaaagtcaaatgtccaaagctcagctggccctaaatctgataaagtgcaactgattgagcataggcgagcatataattgtgaaatcatgctttcaaaagtgaaagtgccattgcatgatttaatgagctcagtgttagcactggaggagtcagcactcgacactgatcaggttgagaacctcataaagttttgtcctacaaaagaggagatggaattactctaagatgactaggatttaatgggacaaaaatgggtctggtgtatggtgtttttgaagagcatgtatagttacacaagtagtagtagctgacattgataaccaaaacgaagagaactgcattacactgcaaagtttagaaatggtgtagttggcacgagttctgttattgaacggaccacgtgttcagtccaacctcttcccttttcgctcagcaactgtatgattgtaagtattttcaggaaacctggggcgtcaggttctgctattggattcagattggatagccttcttaaactcacagagacacgtgcacgggacaagaagatgactcttatgcattatctttgtaaggtgctagatgaccaactaccggacgttttagacttctccaaggatgttgctaacctagagccagcagcaaagatgcaattgaagtttttggctgaggagatgcaagctataaacaaaggattagaaaaagtggtacaggaactatcaacctctgaaaatgatgggcctatatcagaaactttctgcaagaaattgaaaaaattcctcggttctgctgaagctgatgtccgttctctggcttcactatattccagcgtgggtaggaacgtggatcaattgattctctattttggtgaagatccagctcgttgcccatttgagcaagttgtgtcaactttgctcaactttactaggatgttcaacaaagcccatgaagaaaaccgcaagcagctagagcttgaaatgaagaagacagcagaaagtgagaaaaagaaatgtgaatcagaaagaattttacctacagctatccggactggcaatgtcaaatagatgctactagctttgagaatcagtatatactctaacgtgaataggatttgactggacaaaaacgggtctggtgtatggtgtttttgaagagcatgtatagttacacaagtagtagtagctgacattgataaccaaaacgaagagaactgcaatacactgcaaagtttagaaatggtgtagtttgcacgagttgtgttatttaccagccaacctgtatatatcttcctcttccctctccgctcagcaactgtatgattgtaagtattttcaggaaacctgggcattcgttattaattttttctctctccctcaggcttgattctctctgttagcaacactgatttcacatctgtaatgcaatgcttgatttcttcttgtatagcttatatatgatttttttccccctagcaaaatatcttcttaggtgccccaaaaataagggaaatttcttgctcggtattattgaatgtgtactaccccagctataacactaaaatattgctaaagctagagatcgttatg

SEQ ID NO: 125989 - DNA, 422 bp, Glycine max
  Clone ID: PAT_MRT3847_84777C.1
gtgtgtcaaacgaaaagttatttggttgtttaagattacctggtgtctatgttcttgactaatcttttacatacatgttcaaaatttaccattaacgaaaaaaaattaatactatgttgtgcagaaattaatcttgatcataatagtactgaatcatataataatttctcgtgtgttttttatatttctctttattacaataccaatttttttttgcatgcagtgacaagcaaataaattggaaaaaaaacaaacgaatgaattaagaaactagctatgatggacatagaaaagcagaaagggtaaaggtgttggaaatggaattgcaagactgtgtgacatgaaggggaaaagagttgaacttttactgcagtaatgggaaattcatactgaaacaggtatgcttctagaatgaagaaatg

SEQ ID NO: 125990 - DNA, 593 bp, Glycine max
  Clone ID: PAT_MRT3847_84778C.1
caaaaaccaaaaaaaaaagggttcctttttttcgggggggccccccccttgccaaatgttctaaaaaccttttgtttctcccctaaaaaaaataccctttttccgggggggggcttccaagctttttgcaatttttttttttttggggcaaacttaggggcattgcttcacctttgtcccccccccccttaaacaaattttggatcccccccggccttaaaaaaaagggggccctttaaagggaaaaggccctttttatttttttttggggggggggtctcttttcaaaagggcccaaaaacccttttttttttttggttatttaaccgccccccaaacttcttgaaccctagcccttaaacccaccaggtgtttttggcttaacaatttatcccccaaacccacattttttaaaaacagggtttttttcccttttttaaaaccctggccgcccttggcccctccccctggggtccccccccccaaaggttcgcttttttgggaaagggctccccgggacccccaacttttttttaaaaagaaccaaattcttttttaaaaacttttccccccccggttttttccccccccca

SEQ ID NO: 125991 - DNA, 1339 bp, Glycine max
  Clone ID: PAT_MRT3847_84779C.1
tacggcgcgagaagagaacagctggggatgcccaaattgtcatcataacataccgcctacaaaattcaatattcgagaagcatggtaacttcaccaccagccatgcccaccaagggtcgtgttctcatcatcggagcaacaggtttcataggcaaatttgtggccgaggaaagcctcatctcagcacaccccacttatttgcttgttcggccaggacctcttaacccttccaaggatgccattgttaaaaacttccaagacaaaggtgccattgtcattcacggtgtgataaataacaaggactttgtggaaaagattttgaaagagtatgaaatagacattgtcatttctgctattggggccaagagcttgctggatcagcttatacttgttgaggccatgaaatcggttaagactattaagaggtttttgccttcagagtttgggcatgatgtgtacaaagcagatcctgtggagccaggtctaacaatgtacaaggagaagcgactggttaggcgtgtggttgaggaatctgggattccatataccaatatctgttgtaattccattgcttcttggccttactatgacaattgccacccatcacagcttcctccacctttggatcagttacagatatatggtcatggcaatgtcaaagcttactttgttgatggcattgatattggaaagttcacaatgaaggttgttgatgatgccaggacagtcaacaaaaatgttcattttcgaccatctaacaactgttacagcatcaacgagctagcttctttgtgggaaaagaaaattggccttacaatccccagagtgaccatctcagaagatgatcttctggctgtagcagcagaaaattgcataccgcgaagtattgtggcatctttcactcatgacatattcatcaaaggttgtcaagttaacttcaacatagatggacttggtgatgttgagattagcactctctatcctgatgaagcattcagaagcttggaggattgcttcgagggctttgctcttatgatcgatgacaagattaataaaggggaaaataaaattaccggcacaaaatctgtagtggaagcagtgccattcacagcttcctgtggagaagaatcacctcctcaaaaatgttctaactttgttgttaccaattactaggctttggtgaggtggaaatgtattgagtcattagaaatggaccttttatgttgatgttatttcgaagactgttttatctaaagtgttttattgtattcctagagtatgttcttaggtgcaacaaattcttgttagttgttacctgttactctgctttggtgtcaaa

SEQ ID NO: 125992 - DNA, 542 bp, Glycine max
  Clone ID: PAT_MRT3847_8477C.1
gaagtaattacatctcaatttttgtttcgaagaaacacaaaaataagcaaaagtgggagcgaagaatggagaaccccagcagtagtgaaaggagcagagcaggaatcgaagataacatgctggccatgtttgatgcctccgaaaccaaagatgctcaccaagatgccctagatgaccggattgcttttattgatgctgttcgtgcttcttgtgaacatggaaaaccgcccacttcaaaaatttttggggcggtttttcacatgctgaggacagggaagtctctagagttgattgtgggaagttataagcttctggttgatttagacaagcacttccctcgcgtgtatttatctggcacggatgattcccgatcatcatctaactctccatcaaaattggttgtggttaaagaggcatggtctcccattatcgattttgtggataagggccactgctgtagtgaagctggtgataaacagtctggtggactcttgacacctttagcttttcaagtcgtgattaaagggctggctgaagtttta

SEQ ID NO: 125993 - DNA, 423 bp, Glycine max
  Clone ID: PAT_MRT3847_84780C.1
aaaaaaaggggaccccctcacctttccgggggaaaaggggagctaacccttttttttccacaaattttcttttttaaagagagggccccccaaggggggggcccttaacttattatcccccccgcggggtttttttccccctaacttaattttttgccctaaggggggaaaattaaatgcccccctttcctggaaccccattaaaccggccttaaacccagaaagaagggaggggcccctggcttcccgccttggggccttttttgggtccctaattttcgcaaaaaaaaaaaaggaaaattggggggttaattggttacccccggcccctaaaaaagggggggggtcccccccttaaaaaagggggcccctatttggccctggttggaataacaacgaaccccctcttggggggaccggggg

SEQ ID NO: 125994 - DNA, 519 bp, Glycine max
  unsure (1)..(519): unsure at all n locations
  Clone ID: PAT_MRT3847_84781C.1
ggcntnntnntntnnagtngattatgtntgaattgattcncatacctacaaacangangannnttnttaaagggcttccatgatggggtgtcggttttttacgcataangacgtgttatcttcatannntanaatttattaaaaaattggtatgtnnttacagtntgagaccnnnntgacngaaaatttgtttttgttttcttcggtgtnntcgctctcccctatagattcacgatgcttccatcctttttgtnttgaaatcattgctctacnncnttcctcgggtttaccttcgtgcnctctttattatttttgtgnttagttgngaaagcgatttcattggcagacttgtccnnnggatccanncttgctacnggcgacttccaccaacttccctcttctttggtttggagccgcaaccttgccccgtggtgtgatgcggcgagtgcgttcttcttcttgtttttcgggggggttgggacgccgccgtttccctggacggggatccttccttcgggg

SEQ ID NO: 125995 - DNA, 645 bp, Glycine max
  Clone ID: PAT_MRT3847_84782C.1
gacagacagacagacagacagagtgagtttgtgacaaatcctctgtcgtcatctcaacctctctgcatttgtgcgttgcattgcacatatctctcaaaactttgttctggttctgtgactcttactattttcgtgtgtcttgcatttggatcattatctgtcacctgagaaacccacctcagagattcacctaacaccccttcttttgattttgaaccccttccatttcaatcaaaacctctctcatcgtcttctattctacatacaattctacccttttcttcactctgcttttctgacaaaagtgttggttgaacttgattctttcttcatccatttaattgggaaccagcgaaagcacgatgggagatgtggcaaaggacctaacagctgggactgttggaggggcagcacaactgatagttggacacccatttgacaccatcaaggtcaagctccagagccagccaacaccactccccggccagcttcccaagtattctggtgcaattgatgctgtcaagcagaccgtggcagctgaagggccaagaggtttatacaagggtatgggagccccacttgccacagtagctgccttcaatgctttcctgtttacagtaggggacaaatggggaagcattactg

SEQ ID NO: 125996 - DNA, 273 bp, Glycine max
  Clone ID: PAT_MRT3847_84783C.1
gttctagatcgcgagcggccgcccttttttttgtttggttttttttttttttttttttttttttttttttttttttttttttttgggattgaatttctataccaccttatgttttcacataccaacaagggttctttacatttccacatgccccataagatcaaacgggatacaacttggttttaaggggcccaaaaccttataacactagggcaactaaacctatgaaaattagatttccctaaaatacaaaccatgatgcaacagcgcaac

SEQ ID NO: 125997 - DNA, 399 bp, Glycine max
  unsure (1)..(399): unsure at all n locations
  Clone ID: PAT_MRT3847_84784C.1
ctcctattgccgccggggagaaggggggaagaagaaaaagaggaaagaagagcgtggagacatacaagatatacatattaaggttntgaagaggtcaccctgaattggtatntaagcaggccatgggaatatgaacagttatcaagacatcttgagaaagttgtcaggaatgttcagacttgccgttacaacaagaagcccaccatatttnaagggagatncagaccggggtaaggcttgtgctggcnggtgaactggncaagcacgccgtttntgagggtaccaagggcgtgannaagttgaacagttgttgaacaaaatatgttaattttgtttacgtgggtgttgttttggttgatgtgtatgtgttagatgtagggaaggtatgtttaggtttga

SEQ ID NO: 125998 - DNA, 1191 bp, Glycine max
  Clone ID: PAT_MRT3847_84785C.1
gaaaggaactccgattattttgatgatttacaccatgttcataaagaaatgcacaagtatggacataaaaaacagaatatggatattgtgcagcatattgttgaccatcatgtataaatgttctgggtcagttgggtttattggaggaatgcagccactaatcactccaacagcaccactaattgctgcatcaacgaagtctgatgtcactctataaagtgccctatcccgcataagcctctcaagtggagttgtatggagaaattctcgacatgtttgcaactcctcattccactctcttggcatgccaagtggctcgctaccatataaaagagttactgaattctcagccctgtctgaatcgcatcaggaactgggtatgacccaagccacaaattaggcatcaatacaggctgctccttttcaaaacaatgtgcagcagctttttgctcccaaatttcgtggaaagctgttttgaacctagggctaatcttttgcaagagagtagcaagagttgttgcttcaagggtagctttgcttggccttgggtcaaaagtctttgtggtgcacgagttaacataaaacatccttgtacttcccgttatacaaaacacattaccctccagcgttgtcacatccatataaaatgaatcttcaacaagccttctatagcttgggggaggattgaaggcagaaaacaatatgctctccacacacttaacatccttcaatgaggatggtagcacattactcaacaaaccagagatatcctccatataaccaggtccatcaagctctggaacctaattttcaaggtatctcctgaattctaagctttatcttgttccttgtcattctgccgagaaagtgaggtggataaggaagcattgggattagaaagggaaaacaactctttagtatgccgaacatgaacccttatgaacctatcatcatacaatgctgcaaacacaaattctccacattataatctgccaattttaaatgtccaacacgatgtctcacttcactcgataaacacctccagatttcttaagaaccaacattgattaacaaatcagtaattataatcttatatgcactatctcttccatcccattttccatctcattttttcttatctttctcgttttttcctatcatattacttatcacatttgtccggacgcgtgg

SEQ ID NO: 125999 - DNA, 629 bp, Glycine max
  Clone ID: PAT_MRT3847_84786C.1
atgatttgctgctggcacaaaatggatgctactacacccaagtattccaatgccatgtatgatgaaattgtccaacgaagactcttcctactatgaataatgtatgatacaaccctggaaagatacctttcgttactatctccggctttgaagaatacaacatgattgacacgaccacaaaccttgactgatacaaagccccaactctgctcgatgcacttgaccacattactgagcccaagaagccctctgacaagcccctcatgcttgcacttcatgatgtgtacaagactagatgtattgcatctgtgccactatgacgaccatagaccgaagcctagaaacctgaaaagctggagacttgcgcaccaactacactgacaactgaattctatgatgtggaaatgcaccatgaatctcttactgaagcacatcctggtgacactgctggactcaatgccaatattgtggctattaaagctttgaagcgaagttatggcgcctcagactcattggatgaccctgcacatgaggcttctatcttcacaggccaagttatgatgatgaaccacgctggtcagattgtatatggttatgcccctgtgctcgactgccacacttatcacatt

SEQ ID NO: 126000 - DNA, 650 bp, Glycine max
  unsure (1)..(650): unsure at all n locations
  Clone ID: PAT_MRT3847_84787C.1
ttctcgagccgcccgagccgaatcggctctttctttttctctccttctatgatattataattatcttcattccattgcctcaaatattcactcacctcactagctactcactcatcaatcacttatcatattcttcactctctttgcctctcaatgtggttttttcaacaagggttattattaggtgaagatgatgatggtgcatcctcgtgatcaagtaggtggagagacacacaagaatttggtggagccaaacgtggcagcttctaagaaagctagaaattgtgcatgcatggtaagttactcggtgttgattttggctcttctcactttgtccattttgttgctacctttggtgttacctcctctgccgccaccacccttgttgcttctctttgttccagttttcatcttggtggttctctttttcttggccttttcaccctccacactacccaacatggctgttcttacatcatgatgtgtagagaatcttgtaccctttcaatcaaatctatatatgcattgtaagttcaagaagaataagcactagtggaatgaatatatcttgagttatgaatttatgattgtatctattttgttcaattcctcttcttgttactttgttntgtatctatgatctgattgta

SEQ ID NO: 126001 - DNA, 366 bp, Glycine max
  Clone ID: PAT_MRT3847_84788C.1
tcacgtccaccacactactactacaaatcaccccctccaccttaccactactaggatgcatacagaaagtgtgaaaatgaaagtcatggagtgggaagatgcatctgcagcttgcagatccacaaagaagtataaatgtttgattattatttagaggactctatctagttaaaattaaatagttattgtgcttttgttttattagacagttgtaaggcactgtgttctacatgtgtttgcagttgtctgcatgcattgttattttcaaagtccgctttatcaagctgacaagtcaaataaattattccctctctcctagtagtgggggaatagatttgttcctgtatccaaaaaaaaaaaaaaaaa

SEQ ID NO: 126002 - DNA, 215 bp, Glycine max
  Clone ID: PAT_MRT3847_84789C.1
tcctcaggtatctcctagtccttgagtcattttctaattggtatgtgaatttcacatgattcatttcaattttttttttcccgtttgtttgagtgcataactgaaagctccttctgaacagtaatgtgatacttctttcttatgactggaatgtataaatatgtatctgactatcttcgactatatattatagtagtagatgatgatcaatatct

SEQ ID NO: 126003 - DNA, 243 bp, Glycine max
  unsure (1)..(243): unsure at all n locations
  Clone ID: PAT_MRT3847_8478C.1
gncngttgccagttagcaggcctcaggganncacaatgcaattcttgtaagcantttaactggcaaagtccnaacantctggatcatgaganatcatatgcctcaantgatctgaattgcttanggtgaccagattatctacatgtgtctgttctgtcgttgtggattttttgttaagagtttgnanctttggctgattcaggtcattatgncacagttgtaataatccagacagttgtttac

SEQ ID NO: 126004 - DNA, 664 bp, Glycine max
  Clone ID: PAT_MRT3847_84790C.1
gccattatggttgtctgattttgcatttgtcctcggctataattccacagcctcagacatagaaaaccaaacagtgttgtctttgaaacaaaaggagggtacacagcctgcagagatcaacgtgcttgaggagactaagatggtgtccacgttcgcccgtatcatcccacaacaacatgcaagaagattttattattaattagtactttagtgagccaaacaggttgatacatctggttgagttttctgtgtcacaatttcagctctcaagtctttcatttgttggaagacaatatgtaaattttattttaaatcctcaccaagagagtgagagggatggaggcgtttccaagagaccaacgaggttcgctcgaagtgttcaacccttcttcttcttactccaccgagaagtcggtgaactcgcctgtgcgtgttcaatccacgtggaagacgtggattgacgagttaccggaacaacaacaacaacaacaatgtggtggtactaacgaggtgaccgccacgtcatggatggcgcttaaggactccgctcctccaccgacgacgctcgccgcagtgctgggcgagtcttttgtagcggcggtggtggaggttggcaacgccgcaaagcgcgcggcggagtggggcctggtgctgaagacggaca

SEQ ID NO: 126005 - DNA, 325 bp, Glycine max
  unsure (1)..(325): unsure at all n locations
  Clone ID: PAT_MRT3847_84791C.1
cccacgccgtacgggggaagatgaacttgtagatggatggaagcnggtgctgccgctgggggatcataagcgggcaatgctgctagcgtcatggcgaaaccgctcagtacttacatgtcacagaatcacgcgctatggtcagaccatatagcaccatcggcgaactgatatcgtgggaccgtggccagtggatacgaagtggacacagaagctctgtgcgagcaagctctctacactccaattatacatcgtgtgtatttgccagatgacattgttgaaggaaagataatacttgctgcacctggaatttaacgaactggtgttc

SEQ ID NO: 126006 - DNA, 2012 bp, Glycine max
  Clone ID: PAT_MRT3847_84792C.1
tcgatgcacgcgcgcgtacagctgggaatgcggctcgaggaggagtgcaacagagaagaatcacattcgcattctcaatcacatccattcattcactcatccatatcccttctttccactaacttctctctctagttgatacaaataaaaaacaaagtttcatactttacgacacccttttctgcaactgatgatggaaggaagctgaaacagtgaaaaacagcaacaacgaccaccctgtctttgttttttgtttgttgagttgaaactttagagaaagtgaatagtgatatggaggcaaagggtgtgcggttcttagcgtatcaatcaatattttcgagcgttggatctggggacttcgatggggtgaagaaactggtggaggaagtgaagaaggaagaagggtcatcgctctctgatgtgatgtctcttcagaacgatgctggagagactgcgctatacatcgctgcagagaataatctgcaagagatgtcgcctcgcatgtgtgacgtcaagatcgatatagatgtgcagctgcttgctcagctgtcgatgtcagttccatgttcatagttaggaaaaacggcaaatcttcactgcacaatgctgctaggtatggtgtccatcgtattgtaaaaacacttattgctctggatccaggaatagtatgcatcaaagataaaaaaggtcaaactgcactcaataaggcggttaaaggacagtgtacttcagtggtggaggagatattactagctgatccttctattttgaatgagcgagataagaagggtaatacagctcttcacatggctacaaggaaatgccgttcacagatagtgggccttttgctaagctattctgctgtggatgttaatgccatcaacaagcagcaggaaacagccttggatttggcagataaactgccatatggagattcagctttggaaataaaggaagcccttgcagaatatggtgctaagcatgccaggtatgttggcaaagaagatgacgcaatggaacttaaaagaactgttagtgatataaagcatgaggtgcagtcacaacttatacaaaatgaaacgacacgacgacgggtttctggtattgccaaggagttgaagaaacttcatagagaagcagttcaaaacaccattaattctgtcacattggttgctgtactttttgcctcaatagcattcttagccatcttcaatttgccgggtcaatatataacggacgaaggaaaagagattgggaaagctaaaatagccgatcatgttagtttccaagtcttctgccttctgaattctacatctcttttcatttctcttgccgttgttgtagttcaaattactttggtagcctgggacacaagggctcaaaagcagattgtgtcggtggttaacaagttgatgtgggctgcatgtgcttgcacttgtggtgcttttctagcaatagcttttgaggttgttggaaagaaaacatggatggctatcaccatcacccttttgggggtacctgttctagttggcactctagcaagcatgtgctactttgtttttcgacaacatttcggcattttccgcagtgattcccagagacgcatcaagagagcaagtggaagcaaatctttctcatggtcttactctgcaaatatatcagatttggatgaatacaattctgacattgagaagatctatgccctgtgagtcaagaatcaagagaaatgtttcaaccttttaactgaaactgttatactactgccaagtgataatgttagctcaccgggatttcatcattcatcttgagtttgcagtttttggtttcaggctgtatgtgattataattaataatcaaaacttgtagatttatgtatatgtaataaaaataatatgaaagggaagtccactacttaagtttgatattggaatgagcattttcattacaatacgaaattaaattttcatctgcaccgtgcaagaaaatagagcttcctatcttaaaaaaaaaaa

SEQ ID NO: 126007 - DNA, 649 bp, Glycine max
  Clone ID: PAT_MRT3847_84793C.1
ggctcaaaagcagattgtgtcagtggttaacaagttgatgtgggctgcatgtgcttgcacttgtggtgcttttctagcaatagcttttgaggttgttggaaagaaaacatggatggctatcaccataacccttttgggggtacctattctagttggcactctagcgagcatgtgctacttcgtttttcgacaacattttggcattttccgcagtgattcccagaggcgcatcaagagaacaagtggaagcaaatctttctcatggtcttactctgcaaatatatcagatttggatgaatacaattctgacattgagaagatctatgccctgtgagtcaagaatcatgttaccacacaacagaagagcaatgtttcaaccttttaactgaaactgttataccactgctaagtgataatgttagctcaccgggatttcatcattcatcttgagttttcagtttttggtttcaggctgtactactaggcaattcggttggatttgcatttgctagtatgtgattatagttcataaccaacacttgtagatttatgtatatgtaattaaaataatatgaaagggaagtccactacttaagtctgatattggaatgagcattttcattacaatacgaaattgaattttcagatc

SEQ ID NO: 126008 - DNA, 680 bp, Glycine max
  Clone ID: PAT_MRT3847_84794C.1
tccgggaaaccaatccaataattgagttgaggagtgcaacagagaagaatccattcgcattctcaatcacatccattcattcactcatccatatcccttctttccactaacttctctctctagtggctacaaataaaaaacaaagtttcatactttacgacacccttttctgcaactgatgatggaaggaagctgaaacagtgaaaaacagcaacaacgaccaccctgtctttgttttttgtttgttgagttgaaactttagagaaagtgaatagtgatatggaggcaaagggtgtgcggttcttagcgtatcaatcaatattttcgagcgttggatctggggacttcgatggggtgaagaaactggtggaggaagtgaagaaggaagaagggtcatcgctctctgatgtgatgtctcttcagaacgatgctggagagactgcgctatacatcgctgcagagaataatctgcaagagatgttcagcttcttgctcagcatctgtcactttgaggtcgtcaagattcgctccaaggctgatatgaacgcctttcatgttgctgccaagcgtggcaatctaggtttttttttttatttttcatggaataagttcttcttacggatgttgctattaattcagttaaatcatttacatatgatagaatcgcatagttctaatgt

SEQ ID NO: 126009 - DNA, 1760 bp, Glycine max
  unsure (1)..(1760): unsure at all n locations
  Clone ID: PAT_MRT3847_84795C.1
caaaaaagatccccatttgtttatcccctacttttactttccttccatagaaaggaatcaagatttttcccaataaactatgggtgacatctcacaaatcacctgctgattttgctgccatttcgagaggggacgaacgagacagcaacatatcatctccgaccaaatcccgttcattcaggcagtgttcatttctctgcccctcacttacttattcactcccaactccaaaaccatcatcgtcaatatggcacaagcacacgctctattttctcctttcaatcctcgccttcttccttcttcctcccccattctccgacgccgtttcttttcccttccaatttctccgttaactcaccggaccgtgattgcctccgaaaacgtcgccgtttcgcctgatgccgcctcgtctactcactctctcccccaggtgattgaaaccctgatttccggagtggatttatcggaggaggaagccgaagcgtgtctcaacttgctgctgcacgaaccaaacgaggccttaatcagcgctcttctcgtgcttctcagagccaaaggagagacctatgaagaagttgtggggttggcgagggcaatgtttaaacacgcgacgaaggtggagggtttggacgatgtggtggacatcgtgggaaccggaggggacggtgccaacacggtcaacatttcgaccggtgcttcgattctcgccgcggcttgcggtgccagagttgcaaagcaagggagccgttccagttcttctgcgtgtgggagtgccgatgtgttggaagctttgggagtggtcattgacttaggtccacagggggtgaagaggtgtgtggatgaagctgggatggggtttatgatgtctacaaagtatcacccatcaatgaagattgtcaggcctgtaagaaagaagctaaagataaaaactatattcaatatattgggtccaatgttgaatccagcacatgccccttttgccgttgttggagtatacacagaggacttggtccttaaaatggccaaagcactcaatagatttggcatgaaacgagccttagttgtccactctgaaggtttggatgaaatgagtcctcttggacctggtatagtgcttgatgttatggctgacagggttgataagtttgcatttgatcccttggagtttggcattccacggtgcaatattgaaagcttaaaaggtggtggtccagaatacaatgcagaggttttgaagcgtgttctaggtggagagagagggccaattgcagatgctttgattctcaatgccgcagcagctctcttagtcagtggctgtgtaagtaacctagctgaaggggtttctgtggcacgtgaaacacaacaatcaggaaaggctctgaaaacactcaacctgttgaaggatgtctcaaataacatcaaagatgagttgggcatggatgcctgaattgttttgtggcccaggttgtgagttttgtaaacttgattcaaacaagaggagcttggaaggcctcatatagtacatgtattattaaagagatgtacaaaaataatttaatttattattgtaaaattatttacccttcagtactgtgcaaaaaggttttagaattagttaagaaggattataatttgttttcatttatcatgtcacttgacaaagtgacataggaaatggatttttttatctgaaaaaagattgagattcgatgtaagatttcatggaccaattgttgcgaaanaaaannaannnnnnnnnn

SEQ ID NO: 126010 - DNA, 334 bp, Glycine max
  Clone ID: PAT_MRT3847_84796C.1
cagcaagtggataacatatataaaggagaggccaagaaccacaaactcaaccaccttcactcgcaaaacatggtggttttaaagtccacttcaccactctcatctctcacttcccacttctttaacctttcttcctcctcctcctcctcctccaaattcacctccccacactctctccgccgccgccacttacaccatgtgcactccacttcaagagtggcgcaattcactatcagagcctacatggagaaccccaacacattatgcagtttcgccaacagggtcattggtgcactcccccgggtgggactcattggcaggatcctgagtgatg

SEQ ID NO: 126011 - DNA, 343 bp, Glycine max
  Clone ID: PAT_MRT3847_84797C.1
acattactagctgttaagtggctagctagctgtatatcaagtcaaagggctagtaaacaacacacttgtcatttttgtgtcagatttttgggttgcattacttgagctctatttttatacatttctccataaaacacatgaagtgcataagttcattttaatttataggagaagtttaatttatttgtagtctatatgtactaatggtaccacttactgggtcttcattgatcaattttttactgccttcagagccattgccaagctctaacttgacaccggcttctttatgtctccaacttggaagttgtgaaatttgatcatcagaagctcctttattgga

SEQ ID NO: 126012 - DNA, 363 bp, Glycine max
  Clone ID: PAT_MRT3847_84798C.1
accacgcgtgcgaccctctctactccttctttttccattttaccatcgtactatgccgaatcggctcatgcactcattaccattatggtgatatgcgccgctcttcttagcgtacgctccttccgcagcaagttcgagcgcatgaagccccacgtgaacatcgtcaccatcgtgcacttggaccacgggatgactaccctgaccgtcagcacaatttgtttgtttgaacttaaccttcattcccttttgttcatgatatttgagatttcatcatcctttatgcttgggatctgttttctgacttcaatggtaattaatgtatgagaacttatgcgtgtgaaaattctatgctgccgttccttc

SEQ ID NO: 126013 - DNA, 478 bp, Glycine max
  Clone ID: PAT_MRT3847_84799C.1
cggagtttgagcaagattagttctgtcaacagtgattctgttttccttctagttctagattctaaatgtggagtagtgataaagttcagtggtgaccttgggaaacttgatttattgaattcaagtgatccatatctatctgttgctgaatggatcaaaactaatgctgaaatttgtgtcaccccagtggaaccaatatggaaccgattaggaaatccaaattggggagatataggaactctacaggtactattggcaactttctactccattgcacaatggaatggacctccgcgaaaatcagtagcctcattgatttcagatcatagtctccgccttcagaagcggagaacagaatgctgcatcattgagactgaaaatgcattggtgccttatcatgagacatctgaccatcaagcaggagaaattgttgagcttgatcaaaatgaattattttcccataaccgagcttcacgtt

SEQ ID NO: 126014 - DNA, 476 bp, Glycine max
  Clone ID: PAT_MRT3847_8479C.1
ggttttgaaaaatgtcatttcaccaccgttcggtaaaaatggttggtatttcaaaatgatttcccgaaaactgtcttaaaacttaaaaggttattctaaatgatggaggttgggattacgagaggttagggcattttgatttttcattgtctactcttctttgattctatcacaataacccatacatttcaaatttaaaaccctctaaatcaatttatactatccggaaacctccttggcgcactatcgtggcaatttcaggccgccacatacggcggcaccttatagttcctcacccttggccggcctttgcagtttagcttcttccgacacgatggttgaggtcgatttcagtatagccttcgagaataatgacgaaactagatctgcgactatagaaccagatctgctaccagacggtggtggtgggagttatcgtgggtgcgggtgaaagaaaatgcgaagagaaacaaaag

SEQ ID NO: 126015 - DNA, 305 bp, Glycine max
  Clone ID: PAT_MRT3847_847C.1
ctacggggaagtggaaatttattaccaagtccaagcataaactgaacttaaggggagctcaattcccatggccatggtgtacaaaatggcacattcggagagcaagttttttaagggttggcttccggccgagaaaatgaaatcacccttggttttaaaaacttccttaggcccttatacccaattggccttattggatcccccccgaattttggtttttaacaataacaattttcacgaccccaaacttaacattatcctttttatcactccatcttttgacgttttgcatttggggggcttgg

SEQ ID NO: 126016 - DNA, 365 bp, Glycine max
  Clone ID: PAT_MRT3847_84800C.1
caaacaaaaaacccggagcgacattttggagcaaacgaacccgagcaacaaaaccccgcccgacaacgctctaacaaggccaacaaagcaaggcttgcaaaaaaaacaaaagcaaacctaaccaccaagaagcaccagggcaagcacgcatgggggcatgcctaccaacattaaaaaaaaatggaggaagaaaaaaaaaaccaacagcaacaacaattaagggtaaccaacatggctaacaaggccaaccaactatgcacgcaaaggcaccggaaatcccaggcaaaccaccagccagagcgccacccctgggcatcatgaggagaccccatgagaaggccgcccagatgggggaacccgaaggg

SEQ ID NO: 126017 - DNA, 421 bp, Glycine max
  unsure (1)..(421): unsure at all n locations
  Clone ID: PAT_MRT3847_84801C.1
cagaaggcttaccaggtctgtgtatctcacgtggtggagggtgtagatgtcaagcttctggttgtacagaaggggcacagggaagcactatgttctgcaaagcacatggtgggggaaaacgctgtacagcaccagggtgcaccaaaggtgctgaggggaccacaccactttgcaaaggccatggtggaggaaaatgctgtgcagaccacggtggtggaatttgtactaaaagtgtgcatggaggtaccaacttctgtgtggcacatgggggtggaatgaggtgttctgtacctgactgcatgaagagtgccaggcaacaaagcgattattgtatatgtcatggaggaggcaagagatgcaagtttgaagggtgtggaaagagtgcaccangtggcactgacttttgcaatgcacatggggg

SEQ ID NO: 126018 - DNA, 274 bp, Glycine max
  Clone ID: PAT_MRT3847_84802C.1
gaagcaatgggaaaagttcttgcacgcgggcacagccgagttccagtctattctggaaatccaaggaatattaatgggcttctactggtcaaaagtcatcatactgtacgaccagaaatagagacagtctgtcagtgctgtatccatccggagaattccaagggttccatcagatatgcctctccatgatatactaaatgaattccaaaacggaactagtcatattgctgccgttgttaaagctatgggaaaaggcatagaaactccacaaatc

SEQ ID NO: 126019 - DNA, 513 bp, Glycine max
  unsure (1)..(513): unsure at all n locations
  Clone ID: PAT_MRT3847_84803C.1
ggctcgagtttggaagatagataaataaaataggcttgtcatcgtgaggaatcagggacaagtaattgaacagatgtgggtagaatagaatcacctaaattgataaagaaaaatcataaattcatgcatcctaggcaaacaaggcaggctaggtcccaaccttatcaaattttgattttattttatttttatcttctatttttatcttttaattttattatcttatcttttatcttctattttctttatcatatcttaatttaaatattttatcttccctatcttctatttttatctttaaatctcttatcctttcttttaaatctttatcttatctactatattttcttatctttattttaaattctttatctattgcttttaaattgggtttacattaatctaagtactaacaaagtctatgtggattcgacactcggatntccgagtactntactactngtgacaatttggtacactttgccatgagttaacacatacatacctttcttt

SEQ ID NO: 126020 - DNA, 186 bp, Glycine max
  Clone ID: PAT_MRT3847_84804C.1
cggctcgagaaggggccagattattgagcagtttaggagatccatatttgggaagctgttggagtgatattttggggagattaacagtcatacccctagtattataatacacatgtttcaagtctcacatctacgtcttcaacatcacatgcattcttataccactaaacctcctttacattcaca

SEQ ID NO: 126021 - DNA, 255 bp, Glycine max
  Clone ID: PAT_MRT3847_84805C.1
cgtccaacagctactccaaggtcaacgacgtgttcttgaacttcagaggagaagacacgcgcaagactttcgtgtctcatctgtatgctgccctctctaatgcaggaatcaacactttcatcgatcacaagcttgcaagggaacggagttgggagaggaactgttagcagtcataaaagggtctcggatatccatcgtcgttttctcggctaactatgcttcatcaacttggtgtcttcatgagctggtcgaaat

SEQ ID NO: 126022 - DNA, 356 bp, Glycine max
  Clone ID: PAT_MRT3847_84806C.1
tcgggcttgcgcactgaactatccacaataccatatagaatctcactctgtagctaactccataataagaacctgacgttgggtatgacgggtggtagtgatgccactacacttgccacgacaatggtagggatgaggcacaatgaatctcacaatgtaaactctaatttcaactctaattcattggagagaacgtgcaagagaaagtgcactgttgactctaatagggactgtcttggggcccttcctgtggacgttcttattaaggtgctgagtagggtgcagcatgaagattagcatcaacatgtgcagcgattagaaactgtttgagaaactgctagaaaagctagtaaaat

SEQ ID NO: 126023 - DNA, 395 bp, Glycine max
  Clone ID: PAT_MRT3847_84807C.1
atttttcttttgtgtttaataggcggatggggaaactgactttaccccagggcacttcaccgaagtgttaaaagaatgcccttttctatagggcgggggagcatggggcacagaaggccaagtctcatgaatatgccaaaagctgatctttgactgtggagatattttggtgcagatctcgtgtttggagcatctaagacgacttgtccttacattaaatgcacagtctctctgttcatagcattcgtaaatatggctgatgacaccatcaattttgaggatttttcccacaagctgcagcagcttggagagactcaggaaaaagctggattgaaactgtcgtacgaggagttttttacagcgtggaggactcaggtgcgttctgcacaacttat

SEQ ID NO: 126024 - DNA, 486 bp, Glycine max
  Clone ID: PAT_MRT3847_84808C.1
tcggttagatgtttggagagttgcatgtggggtcccttatggatttccgctcacagttatttgcaatagcatttttaatgagatgctcattggatatagttatgaaaaattactgcgccaggataaagctccaagtttgtctcacaattcttaagaaatatcagtttctctgagtgcgtatggcagatgataacttaattagtgttcatgaatatgtcaagccttactttagaggttctaaattgacaagctttctaactggtcataatatcaccatcactgacggaattgacataactagtgcgactatgcaatctagaaagctagcagatggcgaatttctcaagagaaactctaagcatatgtctaatgtgccgtgagtgcctcctgaagacaaagatagtctaaggacacaacttcattcatgaacatgtaataatctggaaaatgcacgaagcctttatagtcaatcttgcagatgtgtta

SEQ ID NO: 126025 - DNA, 274 bp, Glycine max
  Clone ID: PAT_MRT3847_84809C.1
ctcgagcgtgaaaacccgaagtgcttctctcctctgtgctcttctctctcttgctatccttttggctagtcgcagtgctgcaagtgcaactccaagaagcgcagtgccaagccaccatgtttcaacattcaacagaagcctgtttccttccacttctctctttggaattgggtcttctgcttaccaggcagaaggagcagcaagtctagatgggagaggaccaaccatatgggacacctgaactagacaggatactgaaaagatttgggatcat

SEQ ID NO: 126026 - DNA, 210 bp, Glycine max
  Clone ID: PAT_MRT3847_8480C.1
tctcgagcggatcggctcgactaggaacaagagtttatttcagattagctcggttcttcaaaaggcctcatcactttaagggttagctatttatatatatatacttctgtgacctcaaaattgagctgagttgtataactgcaatgggtgtttcgtggtggaagctgttttttgctgctcttgctgggattctactctcaacccaacata

SEQ ID NO: 126027 - DNA, 678 bp, Glycine max
  Clone ID: PAT_MRT3847_84810C.1
tacggctgcgagaagacgacagaagggcatgaatgttttaacttccattgtgatgatctcgtgataaaccctacattgtgggtcctcatggctagtttccttgtaagctcttagtgcattaattattctccattttgaccaaaagaaagggtgattcccttcggaagatcattaattagacaggtgttttgttaccatgctagatttaccttgtctatcaaaactttgtgaaacttttttacacttaaaaattagtactaaaaataatgtggcttttagttaatattatacaatttttgacactttttaaaaaaatgctaattaatgtctttggcatattggttaaagaattaaaaaaatgtttttattgggatgtataaatttgtgtttctgattttttttatgttttttttctatgatttttcacaataatactttatttttttagtttcttaatcagtatcctaagcataatagcataatgttagtgagattttttgttctcatgtcagctcaaaaacaagttaatattttcatgttgagcagaaaacaaaataaataaataataaaataagatgaaattcacactcttatgaatacaactttaattcaaaacttttatataaatttacttttatttatttatttccactctatcgaggatatgtttatttccat

SEQ ID NO: 126028 - DNA, 819 bp, Glycine max
  Clone ID: PAT_MRT3847_84811C.1
ttctagtttagcttagcttcaatggcctctgtttcagcaacttctctcagcttccaaccctctctcaagttgtctacaaggactagccaggggtgttacaaaacttcaagtttggaggtagtttctgtgggatggacatgataacctttccctctttgagatcctcccgtttctgcatttgtgcagtcaaggcacaaccggagacagtgcagaaggtctgcaatattgtgaggaaacaacttgctctgcctgctgaatctgagcttaccccagacaccaaattttcagcacttggtgctgattcccttgacacggaggaaatagtaatgggtttagaggaagagtttggcattactgttgaggaggatggctccccacgcgtccggcttcaatggcctctgtttcagcaacttgagagagggttggaagctgagagaagttgctgaaacagaggccattgaagctaagcgctcaaccctctctcaagttgtctacaaggactagccaggggtgttacaaaacttcaagtttggaggtagtttctgtgggatggaataggagaacctttccctctttgagatcctcccgtttctgcatttgtgcagtcaaggcacaaccggagacagtgcagaaggtctgcaatattgtgaggaaacaacttgctctgcctgctgaatctgagcttaccccagacaccaaattttcagcacttgttgctgattcccttgacacggtggaaatagtaatgggtttagaggaagagtttgccttaacttgttaggaggatggctctcaaaccatttaaaccgttcaagaggc

SEQ ID NO: 126029 - DNA, 1687 bp, Glycine max
  Clone ID: PAT_MRT3847_84812C.1
gtttagcttagcttcaatggcctctgtttagcaacttctctcagcttccaaccctctctcaagttgtctacaaggactagccaggggtgttacaaaacttcaagtttggaggtagtttctgtgggatggaataggagaacctttccctctttgagatcctcccgtttctgcatttgtgcagtcaaggcacaaccggagacagtgcagaaggtctgcaatattgtgaggaaacaacttgctctgcctgctgaatctgagcttaccccagacaccaaattttcagcacttggtgctgattcccttgacacggtggaaatagtaatgcgcttggtgctggtgcccggcacaccgggggaggaggatggcgctcagagcatctcttccgctcaactggcggcggggttggctctcaaaccggctcaacccttcagggggccgcgttcctaataagtaaaagcgtgactgccctccgcaaatttagttcagtttcaatctcaacgtgataacccttatctctcagcttccattgcccacccttcttgtttatcagtacttcacagcactgttttgcaacttcttttttcctctgcgttccctttgtctagttttttgcaatgtcttgccaatggtggtccaaaactttaagttttgccgtagtctcggcacaaccggagaccggaccgctgccctccagcatacccccgacaccacgtgttctgcccgtcgagtcaatgccctcgacagcgccgaaattttccagccttgagacgaatcccctggcctcgacggcgacagcccagggttcccacgaaacctcaggtttagcggttggtgctgatggctctcacacgatcgcaatcgtcccgggggcagccgaccggttcggcatttttgttgagaaggcaggcccaaaatattggacatttcccaaagcgtaagcccaaaccctatcccttattcgcctttgtccaccctcaatggcctctgtttcagccacttctctcaggttccaaccctttctcaagttgtctacaaggactactacccaggggtgttacaaaacttcaagtttgggggcagtttctgtgggatggaataggagaacctttccctctttgagatcctcccgtttacgcatttgtgcagtcaaggcacaaccggagacagtgcagaaggtctgcgatattgtgaggaaacaacttgctctgcctgctgaatctgagcttaccccagacaccaaattttcagcacttggtgctgattcccttgacacggtggaaatagtgatgggtttagaggaagagtttggcataactgttgaggaggatggctctcaaaacatctcaaccgttcaagaagcagctgatttaatagagaaactgattcaagacaaaagtggagctagttagttaggaggtgaacaattctagggaaaatccattgagtgagggcacaagtgtaactgaatgaggttaattattcagcccattcactggccctttttttgtgcttacgcgtattctttagcaagctttttttggtgactttgttcaattttctatttgatgcaagaggtcaacccaaaacgcttttttttctctcgctctcacgataagcatctcatttttttttcttaggcgaaaaaaaaaaaaaaaaaaaaaaaaaaaaaaaaaaaaaaaaaaaaaaa

SEQ ID NO: 126030 - DNA, 592 bp, Glycine max
  Clone ID: PAT_MRT3847_84813C.1
ggctcgagctgttttctagcttccaactatgtatatgtatgggccaaatgatgtgactttccttccacttattgatttaaagattacaagatttaattcttgttccccttaatgtgttggtttttcaattttggaagtctcctttgtatctattgtgtaatgtgtcgttttgcccaaaaagactgttcagggtggtgtatatctcccttggtatattatacccaaaaaaaatctcccttagtatttctttttcctctgtgcatatgtttttaatggaaatcaatcactctattgatgttaattgtagtctaaatttttctaccacatattgacaatacattatctattaaataaataacgatcatgagagttttggaagcctttgattatgtgtgaggtataagctattcttattatttttttaaagttaggtataagctattcttaggtctcttttcttcgttacaatttttggcttcccttggttttaatttctgcataggaataaggttctatatggctttactagctagggtctatccgtccatgtatgcatgtcgataaagtagcacttcataattatttatttatg

SEQ ID NO: 126031 - DNA, 1378 bp, Glycine max
  unsure (1)..(1378): unsure at all n locations
  Clone ID: PAT_MRT3847_84814C.1
atcccccttctaagtgttgctacttcctttgttgccgaggacattgccaagtcttcctccgctgcagatgccaaaacaaaacaacaactctcctctgtctccactgctctgctattggcactcgcccttggctttttttgaggctttagctttatacctgggagctggagcttttctccatttaattggtgttcctacacaaaatccaacatatgttcccgcacgacactttctctctttaagagctgttggcgctcctgctgttgtactttctttggctcttcaaggcattttccgcggttttaaggatacaaaaactcctgttatttgtctaggcattggtaacttttcagctgtcttcttatttcccttacttatgtattactttcggctgggtgtaactggtgcggccatttccaccgtcatctctcaatatattgggaccatgttgatgatctggtgtctgaataagcgagctgagttactacctccaaagatgggatgcctgcaatttggcagttatattaaatctggtggtttccttcttggaagaacactttctgttctttcaaccatgacattggggacatcaatagctgctcgacatggtccagtagctatggctgcacatcagatatgtatgcaagtgtggttggctgtttcccttcttacagatgcattggctgcatctggtcaggcccttattgcaagttctgtatccagacatgaatacaaagttgtgaaggaagttactagttttgtattaaggattgggctggtaatgggtatttgcttgactgcaattctgggtgcatcgtttggatctttagccactatttttactcaggacactgaagtcttgcaggtggtcaaaactctggcgttgtttgtcagtgcttctcaaccatttaatgcactggcatatatttttgatggtctccattatggtgtttctgatttccgatatgctgctttctccatgatgttcgtgggagcagtctcctctgcattcttggtatttgcacctccactttttggccttcagggcgtatggctgggcttagttctcttcatggctcttcgtgcggcagctggtgctgtcagattactctcaaagaatggtccttggtggtttctacacagagatttacaaattgcagaggtggtctcgtgagtctttagatggagaatatggatgcaacactggatgtgacattttgaagaggattctctccgttggatattatatttagatgtgtagataatttaagacattttagaagcactttctgggttctcgcaatgaaattagtcaatgttactgtgtaaaggaaaatggtttaatttagttaaatgttatatagataaatacacnnga

SEQ ID NO: 126032 - DNA, 202 bp, Glycine max
  Clone ID: PAT_MRT3847_84815C.1
tgctaaactgtcttcagccctttcatttccatttttatggaaactaaaaatggggtaatttgagaattctaggggtcaaggggtcctattccatgttacatgctttttagaatgtaatcaacatgatgaacagtgcatgcaatgtagctcaaaacgttaatttatctcttcctagatactttgccatcatatgcatcataag

SEQ ID NO: 126033 - DNA, 373 bp, Glycine max
  Clone ID: PAT_MRT3847_84816C.1
ggaacaaaacttaattaagaaatccttctccggagccatggcagatctcaagtccacattcttgaacgtctattctgttctcaaatctgaactcctccacgaccctgcttttgagttctccgatgatgctcgtaattgggtcgaccggatgctggactacaatgtgccgggaggtgtggcttgagaatttatttttagtttgtgctgagtaatttattagtttattgttagttttttacataacttgttaggaaagaaaggaggaggtgttctgttctgaagcaattttcataaataaagacataaagggtattgatcgaaagatggattataactgcaggaaagttgaaccggggactgtcagtaattgata

SEQ ID NO: 126034 - DNA, 341 bp, Glycine max
  Clone ID: PAT_MRT3847_84817C.1
ccgctgatgtaactgatcgacgagctgactagcctactagccgccctgtcgtccttttttttttgtttttttgcctagattcattgtgtttaggagaatacaccagccccatcttacaatattgggcgctacgggcattattgcatcaactacagaatgggacaggaatataaggcactcaaatgcttacaggactcatataggattccgactgaaggccagattgagcatgggatatctcaagattgatatgaggacctatctcaaaacagcacgtgaagctttggaactggtccatattatttaacatgaccgactctctagaatccggatccatgcat

SEQ ID NO: 126035 - DNA, 323 bp, Glycine max
  Clone ID: PAT_MRT3847_84818C.1
caacgaaacacccaacatggcatcctgagcctagaccacgctgcctttggcttgctgcgactagaacggccctactcaaccgaactacgctctgtcaagctacatgagagcctgaggctgcgagaaacccgcggtaccggctgcgtcggtgacctacccggaacccagcatgcttgcgatccgcaaaatccctcgcgactgctgatccccggggatcggtcccttcaaggaccgtcaagactatctatacaagcaggggcccaacgagctcttcaagcaccgcatgcaagagtacccgacaacggacttacgtacctacatgc

SEQ ID NO: 126036 - DNA, 248 bp, Glycine max
  unsure (1)..(248): unsure at all n locations
  Clone ID: PAT_MRT3847_84819C.1
cggacgcgtgggtggctttattactcaaaagcagcctgtgagnaattttttattaatgtttccactttttccatctcgtatcggatttctaggtgagacattgctatataaatatcttctaatactctcttctattcagcacccaccattgccgtttaaagaggtcttatttgaaaaacaataacgacgtaggagtaataagagtacttcactcatattatctggacacaacaggttcacagataaaa

SEQ ID NO: 126037 - DNA, 410 bp, Glycine max
  unsure (1)..(410): unsure at all n locations
  Clone ID: PAT_MRT3847_8481C.1
aaaaaacnatcacgccgngagggancannncagacaganaganaccacgaacatanacacacangcagananagntcacgncnncnacancacnacngnnncngacgnatgcnganaacannnntgtgncgannacanagacnnccgngngcnantancncacncaacnnagccaacaancancccntcacgacaancgatcnnngcnacnnnnaccgaagcncagcngngaannganannagancantnnagcaacannagananngngaangcantcancacngnacaanacanaagnncnggacngagannnatanacnacnacgnagagnannagtcnaaanccgncgtgntgacaaananaanntgnnngnagnanaanggnncagacagagnangnaannncgn

SEQ ID NO: 126038 - DNA, 448 bp, Glycine max
  Clone ID: PAT_MRT3847_84820C.1
gcagatcttcatcaagaccctcaccggcgagaccatcacccttgaagtggaaagctctaacaccatcaacaacatcaaagccaagatccaggacaaagaaagaatcccgccgaaccagcaacatctcattttcgcgcaaaagcaacttaaagacaaccatacccttactaactacaacattcagaaagataatactcttcacctcatcctccatctccataataacatacagatcttcattaagacactcaccaacaataccataaccctagaagttaaaagctccaacaccatcaataacatcaaagccaagatccaggacaaagaagatatccccccagaccagcaacatctcatcttcgccgaaaagcagctcggaaacgaccacaccctcgcctactacaacatgcgagaaaaatcaacccttcacctcgtcctccatctgcat

SEQ ID NO: 126039 - DNA, 295 bp, Glycine max
  Clone ID: PAT_MRT3847_84821C.1
atcccggtcgaccacgcgtccgggccaattctctcgctgctacatctgtctttccaacgcttgccactgtggtgttctcgagtggctgatggcaatatggttgttgactctttgaatgacgatttgagaatcaacggatcagttgaaccgctgcctgaggactttgatgccacagctgtgattatagatcccgggcctctggcagctgtagacgatgtcatttgtaaggaagaggcgctcatcatttaaggacatgcgaattgggtcattactctgtgaggaaatattcaatacc

SEQ ID NO: 126040 - DNA, 352 bp, Glycine max
  Clone ID: PAT_MRT3847_84822C.1
ataacatgttatttatattaaatatccaattatttttttttattattaatttttttttaaaaaaaaaacttatatgttggttaaaaaataaatgggaaaaaagctattaaaaaaaaagagaaaaactaaaattttcatttaaaacttaatgaacatctgatttttaaatttctaaaaggggtttttgaaaaatcaaaaacaacccttgaaaatttttgggtaaatagactctctaaattttgggtccacaacctgttcaaatgtccaagtgatgaacatttttattcatgggtccacccgtattaccaccaataacctggtaaacttttgctttgatgggattacaaaaggt

SEQ ID NO: 126041 - DNA, 2150 bp, Glycine max
  Clone ID: PAT_MRT3847_84823C.1
ggctcgagctctctttcacgaactcacgctctgtttcagatctgaagaagccacataaccctaaccatcaaacggctaggtgtcgctgggacttcaatggcagtgactgaagctcagaatcctcttcttggagaaaacacatgtggttccttgttaaaaaagcttcaggaaatatgggatgaggttggtgagagcgacgagcaacgagacaagatgcttcttcagttagagcaggagtgcttggatgtgtacaagagaaaggttgagcaggctgcaaagtcaagggcgcagctacttcaagctctgtctgatgctaagcttgagctttccactcttctatcagcacttggagaaaagagctttgctggaattcctgagaatacttctggaactatcaaagaacagcttgcagctatagcaccagtacttgaacagttatggcaacaaaaggaagaaagaattaaggagttctcggatgtacagtcacagatccaacaaatatgtggagagatagctggaaacttgaaccttaatgatgtttcacctgcagttgatgagtctgacctgtccctgaagaagttggatgaatatcaatctgagctccaagaacttcaaaaggaaaagagtgagaggttgcacaaggttcttgaatttgtgagtactgtgcatgatctatgtgctgtccttggtatggacttcttcactactgcaactgaggttcatccaagtctaaatgactctactggtgttcaatccaagagcataagtaatgacacccttgcaaggctggctaagaccgtcttaacgctgaaagaagataaaaaacagaggctgcacaagctccaagaattagcttctcagttgattgatctttggaatctaatggatactcatcccgaggaaaggagactatttgaccatgttacctgtaatatgtcagcttctgttgatgaagtcactgttcctggtgcccttgctctggatctgattgagcaggctgaagtggaagttgagagacttgatcagctgaaagccagcaggatgaaggaaattgctttcaagaagcaagcagagctcgaagagatatttgcccgtgctcatatagaagtagatccagatgctgcccgggagaagattatggcattgattgattcaggaaatattgaaccaactgaattactggctgacatggacaatcagatagcaaaagcaaaagaagaagctttaagccgaaaagatatattggacaaggttgagaaatggatgtcagcatgtgaagaagagagttggcttgaagactataaccgggatgagaacaggtataatgcaagcagaggtgcacacataaacctcaaacgtgcagagaaagcacggatattggtcaacaaaattccagctttggttgatacattggttgctaaaactcgtgcatgggaagaagatcatagtatgtcatttacatatgatggcgttcctcttcttgccatgttagatgaatatgccatgctcagacatgagcgggaagaggaaaaacggaggatgagggatcagaaaaagcatcacgagcagcgaaacacggaacaagaaaccatctttggttcaagacccagccctgctaggccagttagttccagtaagtcaggaggtcctcgtgctaacggaggagccaatgctactcctaaccgacggctatcgcttaatgcacatcaaaatggaaacaggtccacatcaaaagatggaaaaagggaaaacagactatctgctcccgtgaattatgtggccatatcaaaagaagatgctgcttcccatgtttctggtactgaacccatcccggcatcaccctaataacgagatcttcattttcaaccctataatttcatctttgtagcattgtcaaattactagttactgctttaggaattataatatgggagtgacaagtaattagagagatactgttctgagctgtgtatgttcaatttgccatttggaggttttctgaatacatatgccctataatatgaaaatatacagtcttcagtgctagtcttgcctttttccaaaccctagcttctattcgttggtttggttcactttccgtgtgtttgaaatggtgttacatactcttaaaaaaatgatgttacatatgc

SEQ ID NO: 126042 - DNA, 1370 bp, Glycine max
  Clone ID: PAT_MRT3847_84824C.1
ggaataaggcaaggacttaactgtgtatattttcatattaaagggcatatgtattgagaaaacctccaaaatggcaaattgaacatacacagctcagaacagttcctctctaattacttgtcactcccatattataattcctaaagcagtaactagtaatttgacaatgctacaaagatgaaattatagggttgaaaatgaagatctcgtcattagggtgatgccgggatgggttcagtaccagaaacatgggaagcagcatcttcttttgatatggccacataattcaccggagcagatagtctgttatccctttttccatcttttgatgtggacctgtttccatttttatgagcattaagcgatagccgtcggttaggagtaccattggctcctccgttagcacgaggacctcctgacttactggaactaactggcctagcagggctgggtcttgaaccaaagatggtttcttgttccgtgtttcgctgctcgtgatgctttttctgatccctcatcctccgtttttcctcttcccgttcatgtctgagcatggcatattcatctaacatggcaagaagaggaacaccatcatatgtaaatgacatgccatgatcttcttcccatgcacgagttttagcaaccaatgtatcgaccaaagctggaattttgttgaccaatatccgagctttctctgcacgtttgaggtttaagtgtgcacctctgcttgcattatacctgttatcatcccgattataatcttcaagccaactttcttcttcacatgctgacatccatttctcaaccttgtccaatatatcttttcggcttaaagcttcttcttttgctgttgctatctgtttgtccatgtcagccagtaattcatatggttcaatgtttccaaagtcaatcagtgacaaaatattccctcaagcagcttcaaggtttatttctacatacgcatgggcatatatcttttcaagctcgtcttgcttcttaaaagcaatttccttcatcctgttcgctttctgctgatgaagcctttcaacttccacttcagccttcataacataaaacaagaaaaatcagtaggcatcatttgtggaacatgtgacaccctctacccttacaattataactaactaattaaataaatcatacaaaatttatttaaaagattataaacacataataataaaagaagggaaaaaaaacatgcaaaattaattaataatttttctttttaaacacatttaatttaaatcaattcaaaaggataaaggttcacatccacttagtgaaaacataatagaattttttttaataaaaagtaagattatccggacgcggggtcgagcccgggaattccg

SEQ ID NO: 126043 - DNA, 894 bp, Glycine max
  Clone ID: PAT_MRT3847_84825C.1
ggcagagatagaatctagtaacgaaggacttgtcaagaaagaatcatttggcaggtactgctgcgaagcttcctttcatccatggaacaaaaatctgatctaggtgttgtaaatgaactttcagatagagaattaagactgagtaattgtccagataacaatacccttttgagtccacggaaccaaaattctggagccccatcaaatatcccaggtttagatagagttttatcaccaagggcttgtcaagctgctagttcaagtgatggtccgaatacaatttcctttccaaatccccttttggagcaacaaactaccgatggagtccctttgagtattccagcagcagctgattgtcgtgatgatatcgagcatttaactaatgctgtgttgggggataaaagaatcacatcagaccagcagaaaggagcacctgaaaccatcacagaattgtcccaggggactccagtatctagaacagttaatgtcttggatcctccagaacaagtgcagcaattatctgtggggtcctctcctgaccatgatacatctggggaaatgcatgtgcaacgattaccttccgcagagctcccttcttctcatctggattcaactaatttacctttgacaaccgaaattgaacatcagccaactgtggttcctaatcaagatgtgcaacctgattcaaatttggaactctattcacattcacatgaagttgttgtgcatcctgcctcaaattcagatcctaatacagttacaccaagtgaagtaagagtgcaatctgcaggcacgataaatttgtcgattcctttagagatcaattatcaacatatgcaagctgaaacccattcagcttccagaatgctgcatttaagctatgatccactcaac

SEQ ID NO: 126044 - DNA, 811 bp, Glycine max
  Clone ID: PAT_MRT3847_84826C.1
acacaatgataaacaatttttattggtaaacgaatatattacattaattaataattattaatattacacggattattgtaacctatagcctctccggtctgcgctacgctcttgcaagtaagtattcacaatcctcttatttataccataaaaaaaaatgagtgaaaggggtgaaaaaagaaagataaatattgtaatctataatatatatgaatttgttctaaaaggcgaaagtggtgtgaattgaatgtagtataatggaactgaactgtaccaagcttcagtttagcctttagcggttacactgctgaggtggccttatttttcttctgccagcgttgaaggggcacgccgtctgaaccggcggcaccatgcagttatactgcaaacacagggtgctgctcaccggaatctccgccgtcgggcttatcgcgattccggtcagaaaattgtgctgcaaatacagtatctgaatgcccgccgctaacaaccgctccacgaagctgcccggtacctgccccgtgaacccgttgttgttcaggtacagattctgcacgttcgctagcatgggcgacacctcaccggataaccggttgtagctgagatcaacggtctggatcatcacctcgttaaacggttggattggaccggagaactggtttctttcgagttggaggtttgtgagagggaatgtgaatatttgggccgggattgggcctgtgaactggtttaaactaaggtccaggaagttaagccggttgagccgggttaagagcccgtcgaccggtccagtgaaccggcggacgcgtgg

SEQ ID NO: 126045 - DNA, 1380 bp, Glycine max
  Clone ID: PAT_MRT3847_84827C.1
tagaactactcacccgttgtctctttttaaccatggtttttcaggttatagttgtttttgtttttttattattcaaaatattaagatacaccgtactgtgttgtgctcgtgcaaattcggctcgagctcgagccgattcggcatcgaggccacgccacctggggtcaatgaacgaatggaatgtataaaaccaaccaatatcaatcgcacgcaattggtgatcacttccgatagctctcacaatcctatggctaacaacaacggccccacctacgtgcgctctctcctggttttctcttagagcaggttcggcaggatggacctaccgcctggtattgtttatgaaagatttgaaggtcctaaaaacttccgatagctcttgaaaatatctagtactatggcagagatcactaacgatagccctcacaatactgtgacggagaacaacaacaaccaccaccttgaaaccgccaccagaaggcttgcctctgtgaccaaccacctcactccttcttcttatcacaacgcacccggcgaactcgccccgtgcctcacttccggtgggaacaacagcttccgccgcgtccactgagaagttcaaacccacgacgtcgtttggaggatctggcgcatccgaccacgacaactccagcaaggacttcactgacattgtctacgagaaggccgtcggggaaggaatagccaagataagtataaaaaggtatgagtgaacgaactggtcccaaggtaggaagctttaatggtgtattcgtactttctctcatgtcacgtatggtaggtccaaaaaaagcacgtgaaatgtggtttctcacaaggttctatgatgccgttgaagcagagaaaatgggtcttgtcaacactgttgtaccacttgagaatttggagaaagaaacgataaaatggtgtcgggagatactgaggaacagtccaactgctattcgggtgctcaagtcagctcttaatgcagtggatgatggccattcgggacttcaggaaattggtggaaatgcaacactgatatactatggcactgaagaagctaaagaggggaagactgcatatttgcaacgtagacgccctgatttttctaagttcaatcggcgaccttaaatatgtcaattgttgctatcaatttgtgacatagacctacactctgcccaatatatatatagagcagaaagttgatttgggacctgtttactattgtcattgatttattcgtttcaaatgtatttttgaggctggtggtaaaataaacagatttcttatatttaactattttattttgtttcttaaaaagatagtcaatttcaataaataagaccatagaatatacatttccctcaatggggtagactt

SEQ ID NO: 126046 - DNA, 224 bp, Glycine max
  Clone ID: PAT_MRT3847_84828C.1
gctgaacgcacaatggggaaaagcgggcttcgggatcatgaagtggcgacaacgttggatcattgagagccgcagagagagtctgagagctgcacctgtgatgctcctccttgaactttacatgctccttatctattggctttgggacttgagtccaaccccagagaaccggcactacgactggctagtgcacttatgggcggtcttcactccctgaagcacaa

SEQ ID NO: 126047 - DNA, 1056 bp, Glycine max
  Clone ID: PAT_MRT3847_84829C.1
aattcggctcgagccactttttcaactgcacttcctctccgtctctaagctactcaagcaaacaaacccattccgcatagacagtgaagaaggctttctctagcagctagagatggcagacggaagagggtccactctcgtcaaacaaactcatttagcatagacagtgaagcaggctttctctagcagctagagatggcagagggaagagggtccactctcgtgcacctcttggtcgtggttctgtgcttggtcgctttcgggttcgccattgccgccgagagaagaagaagcgtcggaaccatgcacaaaattgaaggaacaaatgaaacattctgcagctatagttcagatgttgccactggttatggagtgggcgctttcctgtttcttctttctggtgaatcactgctaatgggagtgacaaagtgcatgtgctttgggaggcccttaacacctggggtaaatcgagcgtggtccattatatattttctttcttcttgggtcacttttctggtagcagaagcttgcttgatagcaggtgcaaccaagaatgcctaccacaccaaataccgtggaatgatttatgctcataacttctcatgtgaagccttgcggaaaggtgtcttcattgccggagcggttttcgttgttgcaaccatgattcttaacgtatactattacatgtacttcacgaaggcaatgacaacaccagtttctcataaggcaaatcgggtgagctccactgttggaatggctggatatgcatgatggactatggctgaaaagggtaacaaattgagtcttaatttcagtggatatctctatgattgtcactagcaaaacggtgattttcagtttggtttttcttaggtgtttataatgtttttgtggatgttactggtcagaagcaatttatagctatatctataaatatcgtagtttaggaaaaagagggtctctcattatgttattgggtttcagataaacgtgatgttgaaagtctggaaaatgtttgggcctatatttccctctaatagaattggaatttttgga

SEQ ID NO: 126048 - DNA, 492 bp, Glycine max
  Clone ID: PAT_MRT3847_8482C.1
tggagggacaaaatgtttggagcctggcttggagaactagacaaactcactcagagtttggattctgacaagcccatggaacgcagtaaaaagatctcctctgggccaggaaacaaacatggccaacttttcttaccgcttctccatatacaacttgaatgaagctctgaatcagggagagactgtggatctggatgccttgatggctgatctttgctctatagagcaggagctcagcagcattggttcaggaaacagtaagcgtcaaatcacagaaacgaaagctactcagaaattgcctgttagccgacatacattgaaacatggcaccttgaaaggattatcttcttcatctaataggatagctaaaccttcccatgccagctactccttggacgacgtcactggacagttagaacaggcctctttgagtatggatgaagctgctcagcaatctgtactagaaaatactaaacccttagtaactaatca

SEQ ID NO: 126049 - DNA, 288 bp, Glycine max
  Clone ID: PAT_MRT3847_84830C.1
aaacaaaaagttggaaagggggggcttttttttgcaaaaaggggggtttccctcccaaaaaaattttcctcccccccatttttaatggacaagaagggaattcttttttttttaaaccctggtaaccccaattggcgggggggattattgttttttaaaagttggcaagggacccgggcttttgggggaacccttccatttggggggcccggggtttaattggcatggcaaaaaccttttgggtaaattcaagcccaagccccccaaggttggtgggatcaatctttt

SEQ ID NO: 126050 - DNA, 414 bp, Glycine max
  Clone ID: PAT_MRT3847_84831C.1
aataatacagaaaaaaataattatttacattaaattacaaatctcaaatcaaaatacaagcacgtttcataagtaatttaacataataaactactaaaacttatttaatcattattgatgtacccactttgtaattgggttcccaccataaattgaaaaaaaatggtaggacctggaaatgcccttccggggaccaggccaaatttattccaaagttcccattttttaaatattttctaggggataatttttttttttaccccccccttgtgaagaatagggatcccataaaaaaaccacccccctccccccccctcgaagttttttttccctccccaggggggggaaaaaaattttttggggggggttaataaaacccaaaccggaggggtgtgtggttttttgggggggggg

SEQ ID NO: 126051 - DNA, 773 bp, Glycine max
  Clone ID: PAT_MRT3847_84832C.1
ttccgtcggagatgctttgctccgtctcttgtactccatttccatctgtaggagttcctctgtgtacatgcaatgatggtccttgtccatcatttgaaccccgggaagcagaagcacaagatggatcaccttgccactcacaagctgcgatgatggatcagaataaaatggatggtccgaggctggagaaaacaacatgctcaggcatgttttggggtagaagaagttgcagtcgggagcatcaatgcaattcagaaataaatgcttgacctaagaggttggtacatgtccattcttattttgtggatacttcatacaatcttagatcaaaaaaggagtctatagtttatcttattaaccagcctcatatggtgaaagtccaatggatgtatatgtgaggtgatagataatcttgcatatcagcatcccaccacctttttagttctcagttatgatatttagagagcattagtaaaattagtatgagctgcttgttattgcaattgattgcaattggatttcttttttatcatagaaaaaccaggtgttatttcaaaaggagaggaaaaagaaaaatagctatctgttttggcttgtttcagataggaagttctgtgtaatatatgttgtttatcatttattttataggtttacaagaactttgaatgctgtaacggcttgttgctacatttgtaattgtcctttttgtgatctcgagggtgtttctcccatcaacactaaatgttatgctaaagtacttgttcaactaaaaa

SEQ ID NO: 126052 - DNA, 242 bp, Glycine max
  Clone ID: PAT_MRT3847_84833C.1
gtcattacttagggtagatggtgctcaactttttcccttaagtggaggaggtttttgaggccgtagcccttctgaccccgtacgatgatgtatagattatgatatcgaaccaaatttatcacatgcgagtcttgaaaaccataatcacagctttgcagatccatacaaagggacagatgtcgagccataactggtaggatacgaaatatgaatgataacgaacacgttgctgcatatatgta

SEQ ID NO: 126053 - DNA, 211 bp, Glycine max
  Clone ID: PAT_MRT3847_84834C.1
gcgtacgcccacgcgtccgcccacgcgtccgggaagaatggcttttgggcgagatatcgggaatattgggggccatttgctaaattccaatcaagttgatgtggttcatatgaaccgtgtgaatataaacgtcctttgacaaatggagctgagccacagcagtgaccagcgcacgaaggctcatgaagcaaatgaacacttatgaagatag

SEQ ID NO: 126054 - DNA, 409 bp, Glycine max
  Clone ID: PAT_MRT3847_84835C.1
acgctttgctcctgctatgtgtatgaccctgaatttggctgtcaagtatgccaatgtccttcgttctattgttttgcaggatgattacttgccaaaaacggccactgcataggatgatatttcaaattaatattctgcttgccctgctcgttgttcttgggtggcctgatagacaccttcatacctgagggtagaaagctgagagatccaatgacactctatgcacctagcaagatgtaccatattgcggacagaaaatcctgcacatgctggagatttccttctgaagtgaggactgctattcctgtggatggaagattcaagcatatggccctgccctgtaagacaacgtcgcatcatggtattattcacattgaaagggatgctgataaagccttactattaatga

SEQ ID NO: 126055 - DNA, 313 bp, Glycine max
  unsure (1)..(313): unsure at all n locations
  Clone ID: PAT_MRT3847_84836C.1
acaaaaacaaacacaaccaaacccagagcccattcgatttngatccgatgggtganatagtgaaacaaatattggcganncgntcnagcnggcggacnaagnaaccaaagccgccgnntaagcnanctccttcaagcaggaatgcngcganctgaaggcgaagtcggagaatcnggcggcgcngctgcngcangcggctcttgcgagttccgatctcnacgagcgncccacgcgccgcatcanngacgnaacagaacacgtcctcgacnaaggcccncngctttgcncctcaagtgncgcngcaanccctntt

SEQ ID NO: 126056 - DNA, 306 bp, Glycine max
  Clone ID: PAT_MRT3847_84837C.1
gaaaggggctcgagccacaaaaaccaaaggcggccggcctgtctttatggcccaggaccaccagacgggggggacgctcttgctgggagcaaaacctactacacaaacacaagcccgcgcccgaaacactacgcacactcaaaaaaaaaagacaccaaaaacaccgagcaagaagacggaacgaacactcgctctgcaaaagtgggagaacgaaccctaatgaataaaaatggagacgaaggagaacggaccgagcgagaaggctaccaatggcggaacagacggacccacagaccctaaggtcac

SEQ ID NO: 126057 - DNA, 678 bp, Glycine max
  Clone ID: PAT_MRT3847_84838C.1
actcgtgatcaaagaaagacgaagaggaccattcttctgctggtgctagggggaaagaaccaaccaacgtcagtggagaaatattttgcttttacaatttttctcattcaggtgctatttattcaatgatatgttttgaatatgtttgatgttggatgtgtataactgaatgttaaatgctagtgccaattgccaaatgttaaggacaaaatcttatgacctatttcacttattctagttccatatatattgctgcattatttcataaaagtagcagagacaatcatgcagtcaatctgtaattggagatgcgtgtctaagtttgtcctgtttggctccaagcctcaactttgacaaatttatgaaagatttttttattgggtttataattctctacaaaatgaattcttgaattttctaccagttatgtgtggtatgcatgtctcttgctggccattttttgtaaccaagaagtgatacgcctgtaacagatatcctgcaggtatggctaaatatgaggtggagcaggaaagatgtcaataaactatttttgaagctagcattggcctctcaacaatttggtaactgaggatcagagaaatatgagtatgatgcttgtggatgaaatggagtagattgaatacaggtttttggtttggaggcactctgaaaatatca

SEQ ID NO: 126058 - DNA, 387 bp, Glycine max
  unsure (1)..(387): unsure at all n locations
  Clone ID: PAT_MRT3847_84839C.1
aatcgtgtaccaaggaccaagagaaaatgtggtagagtttttcgaatcaatgggttttaagtgtcctgaaagaaaaggagttgctgacttcttgcaagaagtgacatcaataaaggatcaatggcaatattgggcacgtaaagatgaaccttatagctttgtcactgtcaaggaatttactgaagcattccagctatttcacataggtcaaaatcttggagaggagctagcctgtccatttgacaagtctaaatgccatccaaatgtattgaccacaaagaagtatggtgttaacaaaaaggagctgctgagggcttgtgccagcagggaatntttgcttatgaagagaaattcatttgtctacatattcaaagtcacacaactcat

SEQ ID NO: 126059 - DNA, 828 bp, Glycine max
  unsure (1)..(828): unsure at all n locations
  Clone ID: PAT_MRT3847_8483C.1
acgcaagagtacaaatgcaatgaaatgcattagatttcatgcaacaaaatttataagttgcgcatataaaacataacccagtggtgttcaaagaaaaatttgggcatatctaaagcaccagtacaaatgtaatggaagtcatcaaatctcatggtacaaagtttaaaagttgcagatataatacataacctagtagtgttcagagaaaattggtacacaaaggatgcctttcaaatttcccctctgtaacctccagatccaaaataatcctttctattatttgctatcgccatgctcttctgatgttctaatttgggacaatcacggatacgatgaccaagcccaccacaatatgcacatcctttgaccccacttatgtctgtgatctcttcattatcttccattggatcattcaactcagccaaaactgggggaatcctttgctttgcttcttgcaagaggtgtttcaagtcaagtaatgttgtctcactttgattcttgtttataaatgttgtcgctataccagtctttccacatcgtccagtccttccaatcctatggacataattttcaatttcagctggcatatcatagttaatgacatgctgaatatcaggaaaatccaaacctttggatgcaacatcagttgctaccaacacatctttctttccagccttaaaagcagcaatggcatactctctctcttcctgatccttgcctccatggatggccactgcttccactcctttcaagagaaggtattcatggatgtcatcaacgtcagccttattctcacaaaatatcacggacgcaggtggggttttttcn

SEQ ID NO: 126060 - DNA, 263 bp, Glycine max
  Clone ID: PAT_MRT3847_84840C.1
ctcgatacgcttctttgttgtgtcccgagctcagttccttccacccaacatacgacataactctctctctctctctggatatatcatatatcatatatcatgccaccttcccctattactactactactactgttgtgtgacctgagactggttccaagcacagcatttattattattcttctatataagtatactatataagaaagagggtatcaaagccatatcagaaaacacaaaggaataataatatattgcggggggt

SEQ ID NO: 126061 - DNA, 973 bp, Glycine max
  Clone ID: PAT_MRT3847_84841C.1
tgtcccacgcgtccgtacggctgcgagaagacgacagaagggtacggctgcgagaagacgacagaagggtacggctgcgagaagacgacagaaggggagaaaagaagagaaagcgagaaaggaacagaagagaaaagcaaagggctttgagttgttccaatggaagaagcgaaaccagcgatgggtcctcctcctcctcctgctcctcccactacgaagaagaggccactggaagactccaatgcccactccaattacttcaagattcgcgctgttattcgagaccttcgtcctcactttctcgaggttctccgaactccagactacaaaaattgcaaggcatcccatgaaattcaagaacagctgaagattgtggtcaagttatacgagaatatgaaagcagatgcggcttcactagcaaagtctaagaatgtgcaagatggccagatgaaggctggccagaacatggatcagaaaacactgaaagagcagcaacctcaacatggcaagcagagtcaagtagagaaatcatttgcacggccatctgaaattaagctcactccaccagctcctggcttccagaagcagctggttgaagaaactcagacacaagggacatatgtagttggaggatctgcttttggctggaatttcatcactttttcaggcaaggagcctgtgtattatggtaggactaaggaacaatttcgatctgcaaaagtgaccgagtaatcctttggagtatggagcttgaaacccctatcattgatgttgggtagaagtatggtgaataagtggttatcatgaacattttttttaatgattaacttacttttagatatcccaagagactgatacatgtgctgtaatagttttgcaattggttggattcatcattgaatatcattaaaaaaatgactcaaaattgaaaatcatgcatcttatgtaaaaaaaaaaaaaaaaaactcgagac

SEQ ID NO: 126062 - DNA, 185 bp, Glycine max
  Clone ID: PAT_MRT3847_84842C.1
ttttctaatttaccctgtttatttatctttagtgggggtattaaacagtggttgtgacctataataaaaattttctacctatcttgctaaaaataaaaaaaagtcttatctttatcttttcttgactattctccccaatttaatccttaattcctcaaattaagaatttttatttatcctaccct

SEQ ID NO: 126063 - DNA, 210 bp, Glycine max
  Clone ID: PAT_MRT3847_84843C.1
accgaatgtgtattcgtctcatgttgtacttttataatgaatcctttgaatgtttagggtacccttttttttctttcctattcttgtacctgtttagggtacccttttgtagctgactattgtaaacaatatgtaatcaaagcagctaatcgtaatagtattgaatgtcatttgtgtacaatgacaagtgtgtaaagattttagtacgat

SEQ ID NO: 126064 - DNA, 208 bp, Glycine max
  Clone ID: PAT_MRT3847_84844C.1
gaaacaagcctctcaccttatcaagtacgattcgatcctgtgaacctgtgatgctgatgtaaagcctgttgtcaactacatcttctctgtctatggacaggaaataaaagctgacattgaccgcatccctgccaaccttccttggaaggattaggggatagacttggtgattgaatgaactgaggtgtttgaagacagacaaggtgca

SEQ ID NO: 126065 - DNA, 106 bp, Glycine max
  Clone ID: PAT_MRT3847_84845C.1
ctcgccatgtctcaggacgtcgccagaggaccttgggcggcgccgtcggctgcatgacgggcctgctcttcgagatgttgcccatctggggcgcgcttctcgtcgg

SEQ ID NO: 126066 - DNA, 358 bp, Glycine max
  Clone ID: PAT_MRT3847_84846C.1
tcccaagtcgacccgcgcgtgcgcgtaacttacatgatgtgaagttgcaaatgctatggagttcaccttcttcataatgcagctactgctactggcgtggcacttgaacttggcaagagatgacgtaatatttccgatcaatatattatctatggataagagtatacatactttcttggcattgagttattctcttacatctgtaaaagctgttgtattaagacttactttatcaacagaactgattgatctagtccacaccaatgaatcttccaaagctcttatgaattccatactgatatgcatgtcaaaaggcttaatatcaccttgtttttgcactaacaagtgacaaagatca

SEQ ID NO: 126067 - DNA, 455 bp, Glycine max
  Clone ID: PAT_MRT3847_84847C.1
ttacactttcagccccacacacttgcaaataataattcttttttttttcttcgtccttccatgatccatcatcgtattttctcactatccgttacggtgttaccttacactgctgtatacattttcccggacagttcataattttcctggaaaaaaaattctgatttaattcgggcccagttttccttccccttataccagaatactcatttcatattttctgcgaaatctataaataaaaaaacaaaaaaaaaaacctaatttgcttctgaattccgatggggcaagggcaatccaaagacgagttgctctaccagcaagtcagttatgggaacgccgaaggaatcaaaacccttcacagagaatgtgcaggcctagagtggagggacaaagatgcgaaaacccccttgattgttgcttgtatgaatcctcatctttataatgttggcaaaact

SEQ ID NO: 126068 - DNA, 510 bp, Glycine max
  Clone ID: PAT_MRT3847_84848C.1
tttaaattaatctacatgtagcagaggttcagaacactggaggagtttgttttccattgggaaagggcatgtatcgtgtgcttaatatacctgaagatgaagctgttctcttgaattctagggagaaggcaccttacctgatctgtgtagaggttttgagatgtgaaatgccaagtaattccaaggaggcatccagttctcagaaactttctcaagggggaatccctttggcaaatggagatgctctcatgcaaaaaccacctccttgggcttatccattacggacagcacaagaggtgtaccgcaatagcaacgataggatgtccagttcaactgctcatgcaattgaccaggcgatgactcatgtatctgaggcaaaaatcaaatttgttagtgtgaatttttctgtggaaatgcagttaaatggtcagccacaggagattgaagtggccgatctacacggtggcaagcatcgttctgcttcatttatagagagggtgtgtttgatgc

SEQ ID NO: 126069 - DNA, 777 bp, Glycine max
  Clone ID: PAT_MRT3847_84849C.1
cttcctttattctctctttctctttctctctcttgccccttcaaagaggcacttcaattttctcttttggcaaagaccagcatccttaattcttcaaaattcttttactatgtaacacccccccccccaaaaaaaacctctgctttttctctgttcctctgcacccattttttccccggaatttcgattgttaaggttgttccacatcgtgtttcattgccactcgacacttttcagtcaaaattccatctggggttttcgtggatccgacccagatcctgtctctctctgatccaactatattgttaagggattcagttagtgcacttgcttggctaacttgctaattgaggttgctgctttgtatgatttgaagagtttcagtaaggagtgtgttctaacaaaaaatctttagttgagccaattttaagctatgatcaagcagatattaaataggctccctcggaagccctccaaatcgggggaaagtcgtgaaggaggggcgatattgactccctcttcaactccttcgacaagtgcaaggagcagcgatgcagcaggctacagccatggaaatgcaactgcttcacctctttcaggcactgctgattctaatttggttcctggattaaatcatggtgacaggattgtccaagctatgaactcaaaactgaatctgaatgggagttttccagttacggcctatgaagccttgccaagttttcgtgatgttccaaactcagagaagcagaatttgtttataagaaagctgcaaat

SEQ ID NO: 126070 - DNA, 507 bp, Glycine max
  Clone ID: PAT_MRT3847_8484C.1
cttaccaaagagccttggctcgtttctggtccaaattcattgatgacaaggtaactcagcttttcaaatatcttcttcttacttttcttgatttgtgctgatttgatttgtctccaaaacatcacctttcatgccatctagatgtgaaatctttgaataagtttagtgaaccctgaaaaaagttaaaaaaaaatttttcattaattgtatcaactttgtctaaaatcataccaatgattggtcaagttcattaaacaactacctccgattattatgatttgtgtaatccttatggactcggtattttgggggtgagttagaacttagaaggtattaggtgacatatttgtttatagcaaaaatgatggcaatacactgtttagtattgactgaaattaatttaaaattacaaattttgatagatcacactttttactttaaggtggctcgccagattttgtaatattagtatagcatgtgttaaaaagaatatgctagagagtgcgt

SEQ ID NO: 126071 - DNA, 197 bp, Glycine max
  Clone ID: PAT_MRT3847_84850C.1
ccctgcctgatgggtttctgcacggataaaacttttaacattacccatcttattattatactcacagtgatgacaattccttgccaaaagaaaaaaatataaaatggccgctcatagcaggctctctacaagatccaagcttaattacacgtgcatgctacgtcatagcgcctccaaaatgtcacccaaattcagtt

SEQ ID NO: 126072 - DNA, 865 bp, Glycine max
  Clone ID: PAT_MRT3847_84851C.1
cacgcgtcctctctctttctctttctctctcttgccccttcaaagaggcacttcaattttctcttttggcaaagaccagcatccttaattcttcaaaattcttttactatgtaacaccccccaccccaaaaaaaacctctgctttttctctgttcctctgcacccatttattttttccccggaatttcgattgttaaggttgttccacatcgtgtttcattgccactcgacacttttcagtcaaaattccatctggggttttcgtggatccgacccagatcctgtctctctctgatccaactatattgttaagatttgtcataataagaagcaccatggatgttgataaggagttttttgctgaatcctctggctgcctacaattagtgttttttgttcataaatatagcatagatgatactatcttatgatggctaagacagaagtgatgttgaagagaggttattgtttcattggatgttgtctctgtcagggattcagttagtgcacttgcttggctaacttgctaattgaggttgctgctttgtatgatttgaagagtttcagtaaggagtgtgttctaacaaaaaatctttagttgagccaattttaagctatgatcaagcagatattaaataggctccctcggaagccctccaaatcgggggaaagtcgtgaaggaggggcgatattgactccctcttcaactccttcgacaagtgcaaggagcagcgatgcagcaggctacagccatggaaatgcaactgcttcacctctttcaggcactgctgattctaatttggatcctggattaaatcatggtgacaggattgtccaagctatgaactcaaaactgaatctgaat

SEQ ID NO: 126073 - DNA, 359 bp, Glycine max
  Clone ID: PAT_MRT3847_84852C.1
ggactaataaaactcctctttctctgagggatgaaggggacaaaggtccatttcccggggaagtcacattaatcacaaaaacaaataagagtatttatgtatcccaaaacacctaacaaagatgagatgatatctagcatctacaataaccacatctaagtaaaatcacataatcacaaaaataaactaaagtatttatgtgccaaaacacctagccaagctgagatgatatccagcactcacaataaccaacaaaatagtcacattcaagtaatcactgatctgcacattcataaacctaagttagcaacaaattttttaaatgatcaagcctatataccaaaaaaaaatggctttac

SEQ ID NO: 126074 - DNA, 343 bp, Glycine max
  Clone ID: PAT_MRT3847_84853C.1
ctggttttattaacaaacttctgctttgtgagttctgttttcccaccccgttctgaattttgcttcacccttggccgtaatctaatctccttactgttagcttctcatctcgctcagacgcgtctattggaattgactctggctagcctagcttgctcgcttggagggaggttgaaatagccagacatgtttgggtcgcagagacctccattcttaaatcgattgcatgggttgattttggcagatcggcacgattggcatcacagactgctaatagatattactagctgggtgtttgtgcgtacacacttgattgatcgatgtttttgacaaagcgatcgac

SEQ ID NO: 126075 - DNA, 544 bp, Glycine max
  unsure (1)..(544): unsure at all n locations
  Clone ID: PAT_MRT3847_84854C.1
ggggggggggggggggggttcgtgcaaaaaccacccaagtcttatgccaacgtggattttatctttttaaaaaaatagtgaaataaaagtgggaccgaatcattacggggtaagcaaggggtgggtttnggggggcaaaataataatttatcccaacccctagagggggaaataataaggaaaagatataccacattaattttaatttaagtaaattcttattttcctgcactaaaaggggaacattgggcctttattttttaatatttttaaaaaatatatatttccaatttaatactccaataatagtataatacaaaggctacttaatttaatttcttaagtatatcaaatttcataagattaattcgtgaattagggtgtcgtgacattcgggtgtctcaattcaagtggagaaaatcaattttnagaaataaaaataaaactaaccaaatatccggaaaataatttaatttaggtaaatgagttatttcggttttttaaataaatcaatttaaacacggctaagtccttcaaattaaca

SEQ ID NO: 126076 - DNA, 940 bp, Glycine max
  Clone ID: PAT_MRT3847_84855C.1
cccacgcgtccgtacggctgcgagaagacgacagaagggggttagctttttatgttatgtgaggcccttcctctcattctcttttgactttctcaaatggcctttgcaagtgtcgtagccattgtcgcatttcttcttctacaacctctttcagctacttctgacctcctttctcctctgctttctcccatctttgatgatgtatgcaaagaagtggaatgtggaaaaggaacatgtaaaccttccaagaacagcactttcttctttgaatgcgagtgccacccgggttggaagagagctccttcaaatgataagatgggtttgaagtttcttccttgcatagttcccaattgtacattggactactcttgctccaaagcccctgcccctgttcaagaaaagtcaacaaaatccaatgagtcgatttttgatgcttgccactggattgattgtggtggtggctcatgcaacaagacatccaagttctcctatagttgtgagtgtgatgtaggctatgacaacctcctaaatgtcactaccttcccttgcttcagagaatgttctcttggcttgggttgctctgaacttggaatatcagtgaaaaactcatctacttctgcaccaccgactttgaatgataacagcaagaatgaaggtagctcaattctacaaggaaattcccttcggctggtcatgctaattatgttcgtggcaaagctccatttgcaaataggataagtgttggatggtcttagcagcatctcattttattgtattaatttactggtgttcatataaataaaaataaggcatcacatcagggttttaatacatgacagttttggttattatatatttcccgcatttgtccttttttttcgttaaacaattatttcagggtatattaatgtgatgatcgagggtcttgtagcttttgcct

SEQ ID NO: 126077 - DNA, 176 bp, Glycine max
  Clone ID: PAT_MRT3847_84856C.1
gttagtcgctaaacaaactgtacgcatggagcttagtggactatgacagggtgtctataagccaaacgctttagccatggaatctcttccccaagcaagtggaaaccccctgcattaagaagtctaggtcaccccaacctgaatcttcccaattgacaaatattccacgccgaaaa

SEQ ID NO: 126078 - DNA, 300 bp, Glycine max
  unsure (1)..(300): unsure at all n locations
  Clone ID: PAT_MRT3847_84857C.1
gccagtttctataaatgaaatcgagtggactaagatccaaaggagggttgtgagcacgattcggttagcccttgctcctgatataaaacatgcattgaaagagacaacactgaaggccttgtgggagaagctcaagaatatcgatacgtcaaagtcgctaaccaattgcctttgtttgaagatggagttgtatcaactcaaaatggagatggaaggagatctgcatgaccacatcaacaaaagatgacgctgactctcaatcgcgtncaccaacgagatatgaaataacattcaatgtta

SEQ ID NO: 126079 - DNA, 790 bp, Glycine max
  Clone ID: PAT_MRT3847_84858C.1
ggctcgaggtgtgagtctaatatttgcagtgctgaaaatgtcgcagttgttggacaaagccaaaaactatgttgcggagaaagtcacgaacatgcccaagcccgaggcgagtgtcaccgacgtggatttcaagcgcgtgagccgcgacagcgtcgagtacttggctaaggtctctgtttccaacccttattccactcccattcccatttgtgagatcaagtactccctcaaaagtgctggcaagttagtacccttttccattgatgtattgctggcttaattggttttgttttcatttttgtgcttgagattttgagtcagtcatctcaatcatgaaccactcatgcatcatgttgatttgcaatcgaatggatgtggtggttggattctgcagatctgtttgtattattaattttaatctgatttcgctgtttggaagctcttaaaggataaaggaagagctaaaaaatttactggttgtactttgcacatacttcttccagagttggacaaaaaacagaggaagttttattatacataaagatataaaaaaattactggttgcacatagtttgcattctttaacttttttttttcttaaaacgaaacattgcataaaggaacaatccactcccttatatcctttgaaaaatctgcatgtttattggtataagaataaatttgagtccgtgcgacatgcgtgcatatattatgtcaccactcaccaactctctctctcttttttctaagaaagtcattactcattagctcttatttgacggcaatgctc

SEQ ID NO: 126080 - DNA, 301 bp, Glycine max
  Clone ID: PAT_MRT3847_84859C.1
tctcccacgcgtccggtttgttgtgagctataatctagtttatcgtgaggagaatatgaagttcggctggttctatatcgctgcactagcactcttaacatatccatgcctatgctcattcataccaatggctacctttcatcaaaaaatactgctaccgtatcccttgatcaaatttttaaatctcaacgagaacacatatctacatttattttaaaacctgtacatggtgaagcctattctatatatgctccaaatcactatctgaaatctagcatagatatcctgtcccaatataatg

SEQ ID NO: 126081 - DNA, 354 bp, Glycine max
  Clone ID: PAT_MRT3847_8485C.1
attcgcagagccgctttctttgtttttttactgagagattaccaaaacaaacccacgaatttttggtgtggcagatcacgattcctcagaaaactgtaatgggttggtgtccaatgatgtgctggatttggttggccctgatgctaggcttgtctatgtgggcaagactgctggctatcatagcagaacacatgaggagatacatgggcttattttgagttttgcagaagctggggcaacttgtgtgagacttaaagggggtgatccattgctgtttgggaggggttgggaaaaagaggtttttttgcttcaatccgggcaaagagttgccatggtgttcattttattgcaatg

SEQ ID NO: 126082 - DNA, 240 bp, Glycine max
  Clone ID: PAT_MRT3847_84860C.1
gccgccctttttttttttttttttggcatcataacaaattttacctttaaaaagtccaaattgaaggggttcgaaaacaaattttaagtaatgggaaatgttctgcaaataacccaatttcccctggcaaacctaaagtattccaaggtctagttttcccaatttaacaaacggattaagacccagtggcggtttccaaaagggcccttcggggttccgggttggccaatggcccatggc

SEQ ID NO: 126083 - DNA, 234 bp, Glycine max
  Clone ID: PAT_MRT3847_84861C.1
ataaaactaaacacacagttgtttcatcagcacacccgcaggtctcctaaacaagtcacattttattcatcatggacatgaagaaggtcacttgtgctgttctcatctccgccgcctccgtgagcgctgtggtggctgccactgaggtcccagcccctgcccccggcccaagcagtggagcttcagcttgcttgccccctattggctccttggttggtgcctcagtcttgtctt

SEQ ID NO: 126084 - DNA, 432 bp, Glycine max
  Clone ID: PAT_MRT3847_84862C.1
tcctctagagttgccgccctttgtttgggcttttttattttttttttttttttttttttggttttttttttttttaaaaaaaccaccaacccacaaaaccatggaaggtatgcctatccttgggatttcaacaggttcaagcgaattataggaaattactaaccgcttcttattaggggggggtggcccacccccaaggggattcctttactaattaaagaaccaatggggttgataacgggccatattaagcttaatctcccggatcgggcccgattttaaaagcatcctacctaaagaattatatacggagcccttttgaggacaaaattcccctttttttttttcactacacccgaaaaatccccacaatggtctttgaaaaaagaaatcaccaccccgtttttaaaaaaaaaaaaaaactgtcttttt

SEQ ID NO: 126085 - DNA, 313 bp, Glycine max
  Clone ID: PAT_MRT3847_84863C.1
acattgggaccttacagacatcaacatatctcatgtctctggctaagaatcgaaacagagagctcacacattggcatcagtgtatctaccaagagaacatcaattatcagtctctttcctctattgcaaaccccaaaaatgttctggttattcatccatgatatcgtcgacacctggggtactcaccttatcatgcctcactacaaaatatcaaactttgtaccattgacaatatcgttgactaagtctttaatcaatctttccctgacatatcatcaggatttgactacccacatctaacacttactggtct

SEQ ID NO: 126086 - DNA, 330 bp, Glycine max
  Clone ID: PAT_MRT3847_84864C.1
ttactttaaggcttttttctctacaattcttgctgtctgcttcttcttgcacgttgttttcgtgctcttgctcttcccttcttcttctttcccccctttttttctctttgtagctccgctacctatactttgtttattggctccatgttcttcttccctcactgatttatcttttgtcagattcgatttgtctcatttggtttgcataagaatctttggcaataagctggtgtggtgtttctttcatttcactttatatgagtacatataattttgaagggttttaaggatctgcatcatgttacgctcattacctatattgccactccc

SEQ ID NO: 126087 - DNA, 340 bp, Glycine max
  Clone ID: PAT_MRT3847_84865C.1
ggactacttctcgatttcttacgccatttgataggatacaatctaagtgggactgatgtattaacctgaagaatataactctctcaaaactaaagaataaaacgactgtgatcaacctccatcctacgagcgtagacaaaacttcagtttacaaaagttgcctgaaccactaaaataatatatctgtgatgaagaaggattacaggggaaactgtttacttaaacaagcaggtgaaaaaacaatattagatgcgccaatagaaactactcttaacagataaaaagattttggaagagtgaaacccctgatgatcaacaagcacctactgaacctgttttg

SEQ ID NO: 126088 - DNA, 132 bp, Glycine max
  unsure (1)..(132): unsure at all n locations
  Clone ID: PAT_MRT3847_84866C.1
gctgggaaaagttggaagggacatnctcattgtcaactatgcctcatngggttatatttnatttggaaggncctgctcctggagntgacctggctantacgntcagtagagatcaactnttccactnccana

SEQ ID NO: 126089 - DNA, 543 bp, Glycine max
  Clone ID: PAT_MRT3847_84867C.1
aagtcactcatctgaagaggacttcactgagaacatgaatggcctggagattgaagagaccactactgaagactcagttgcagtagagaaggccaatttgatcgaaaccgagaggccttctgcattgatggcacctagcccaaggcaatttcaaattcttggaagagaactgggcaatcttgaaataccaaaaaggggtaatgtgtttgaaggactagaaaatgagatagaaggtgttgaacaaagttgtgtgagtttccctatggaatcacacacaggtagtcaagaaacaacactagcatttgtaccagaactagaccataccatttcagagaaaaaaaacttatctgatgacaatgatgtagaaaccattccacaagagtccatactcaaaagaatcaactcacataaagaaatgaaatcatatcaactggggaagcagttgtcttgcaaatggacaaccggagcgggaccgcgcattggctgtgtgagggactacccttgtgagcttcagttccgagcattggagcaagttaatctgtc

SEQ ID NO: 126090 - DNA, 409 bp, Glycine max
  Clone ID: PAT_MRT3847_84868C.1
atggggaaacattatactatttttccctttaaataaataagcaatcttacaaaactttaccacaaattacacccgtgcttgggaacccctgaatcatttatcttttatgaatattctagagaaagagagaaaacttaagacttattatgccttaaaaggagttgccctttcgaagaacattaaaaatgggtggggcaaaacttaatagccactacccactaaaacatgttgattgtctcaaagatcatatctgagctaaccgttggatattaacagggtaagcccttgatgcaaattgagcacttcaagctttttgagccacaacaacttttccagcttctgttggaataaaagctttccaaaacaaggacctttggagccgaatttccagcttacctacccttgcatg

SEQ ID NO: 126091 - DNA, 485 bp, Glycine max
  Clone ID: PAT_MRT3847_84869C.1
ttttgacttaatgacttatccatcccaatcccttacaccctataaactcaccaactctctcccacactccttcgttcacactctctgcttcttctctccaaagctttatatttctttttctttttctgcgtttcacaatggaacaacctccttcgtcgtcaatcgccgcgggaattcaattcgggtgggccctacagctctctcttttgacaccctacgtccagaccctgggcgtcccccacgcatgggcctccttcatttggctctgtggcccaatctctgggctgctggtgcagcccattgtagggtacagtagcgaccgatgtagatctcgtttcggtcgccgccgtcccttcatcttagccggggccgttgctgttgccatcgccgtcttcctaattggctatgcagccgatataggacacgcagctggcgacgacctcgcaaagaagacccgcccacgggctgttgcaatcttcgtggtc

SEQ ID NO: 126092 - DNA, 261 bp, Glycine max
  Clone ID: PAT_MRT3847_8486C.1
gtatgacattgcagagtctgatgtgcaagttgcatgtgtggaggtggaggttgaagcatgcgtagaaaaggaattgaatggagaagaggtttctattgatgcgccgggtgaaaatagtaatgaatcatcatcagagattccaagttgggagtggattgttctagtgaacaagctcatgaggtgatgtaccttgctggcccagaatgtgaagaagtccatgtccatgtccacgatgaagtcttgcatggtgcaactgtactg

SEQ ID NO: 126093 - DNA, 517 bp, Glycine max
  Clone ID: PAT_MRT3847_84870C.1
ctccttgtgaaaaaagacaaagttgtttaaggtgttattgaagacaaagttgtttctatcccaccataaaagacccacacaggcaccaaagaaaatggcccactttcctgtaggggctgagagggggttgcctttcccttgcaggttgaattgaagccaatccatagtggctaagctaaaagtttagcctagttgtttttgtccacataatgggtctttgagcaaatggatgatccattcagattgcaaattgcatctaagatagatgtttgaatcaatcatgcatctatgcttcctaagatcattaatggaaaaacgatcgtgaataagcttctagagaaaaatgagaatgcatcagggacctttccagttccatgcctaaagtgaacaacttttgtttttggggaaaatgagcagggaaagttccatgtaagcttcttttagggagaaaaagccatatttagagctctttcagatagggatatcatcaggtccttctctaggagcagggatagga

SEQ ID NO: 126094 - DNA, 287 bp, Glycine max
  Clone ID: PAT_MRT3847_84871C.1
gaagaaaatgttttatttttttattggggagggatttggttttgtcagaggggggtggcaggaaaaaaaacaaaatttttcgaatttcaaaagcaggggggggcatcacgggggggggaaagaaccctgggatagcatccgaagaacaacaagccggggggggggggagaaacagcaaatggggcgaaccctctaggggatggggaacaccacccggggggattgaaaaagggtacaagaaaatttgaaagggcccaagcttgtcccccacagtcccaaggggggaa

SEQ ID NO: 126095 - DNA, 623 bp, Glycine max
  Clone ID: PAT_MRT3847_84872C.1
cggaaaatgtacctccagcaactctccttctgagtcacatcaacacaaacatgtatctatgataaaatatgtcacaccccactaactagtaagtgcatccttcgtcaactgcccaatcaatccaaagcagagcctccacgtttctttctttcttattaaagctgatgctttctgtgacttcattcattcagctcaagggaaatgaggggtaaaacagcactactaacagcagacaagaaaaatggagattgaggacacatcaagtagagtatctattgcatttcctcttggcttagctcttcttgttgccttgttattgttcttttgttgcttcttttgttgctgcttgcactgggaaaaactccaacctttgtttccattttgtatggttatcgtcgatactcagcctcagacacaagcagacttcactccccctcctcacaagccaggctttcctgtcttgatgatgcagcataaccgaggtgagagcttgccagtgctgatgccaggagatgaggttccaaaattcatagcactagcatgcccatgtcagccttcaacaaatgaaatgatcacaatccatgtgcagaagacagcaccaaatgatttttgcggcggagctt

SEQ ID NO: 126096 - DNA, 512 bp, Glycine max
  Clone ID: PAT_MRT3847_84873C.1
ttatctttatatttctatgaattatcttttgattagcaaaatctatgaggacaagatggtatttcagtccaaggccgacaaagttttcgactcaaacaatactttcagaagtatctatattttcttaagacgagtgcgattaatttgaaattgcaaactgtcctttttttataaactataaaatttaaacatatgttatgtaaatgttaattgaggatatagatacgtggcagttaattacagcctaataattattttttttgcaaatatttttattaatactgttcataatcttttctataccagactttttttttcaggtacataaaatttcgatcattgatattatccattttgcattctttttctgtaactcttttttttattattacagtgtagtattatttctcacatttattatttttggttcctcttttattaatttgattttctttatagatatctacacttatagtgtctaccgaatatatatatataaagagcatgagcat

SEQ ID NO: 126097 - DNA, 900 bp, Glycine max
  Clone ID: PAT_MRT3847_84874C.1
ggctcgagggaaatgagagaagaaaaatggagattgaggacacatcgaatggagtatctatttcatttcctcttggtttagctcttctcgttgccttgttattgttcctttgttgcttcttttgctgctgcttgcactgggaaaagctccagcctttgtttccattttgtatggttatcgacactcggcctcagacacaagcagacttaactccccctcttcacaaacctggctttcctgtcttgatgatgaggcataaccgatgtgagagcttgccggtgctgatgccaggagatgaggttccaaaattcatagcactagcatgcccatgtcagcctccaacaaatgaaatgatcacaatccatgtgcagaaggcagcaccaaatgatttttgcagcggtgcttaaagggacacaaattaattataaattaaagccttaattaattaaaataccaagttgcaattagcaaaccaatctcaattctcaagtccctcaaagaagtttcagccatcgaaacacaaacaattgtggatagctttgccccgagagagatgatcaacaaaaagctcgcggggttgaagtgctgattgggaaattaattaaagttgttcatcatccctggatagctttcattttatgttccttttagagggcacgagtcgcattgtgtatatataccatgcactgcagtatgaaattttctgttctggtaaatttacaagttggaaattaacaagatcttatatgtgacagaatccttgtatgagattgcagagataccaagtcattagataaggaaattaattttgctgaacaattcaaacatttgaatgatataaatattttattaataaatgaatgctgggggtttgaaaaattttaaaaaaaaaaaaaaaaa

SEQ ID NO: 126098 - DNA, 399 bp, Glycine max
  Clone ID: PAT_MRT3847_84875C.1
ctcaccattgtgaccgaactaatatcttgctttatttagcgatccgacaaaaactctttaggcaggtttgtttaccaggacctccttactagttataaacttctctctgactactttcattacaatgaaatcgataatagaatgctcttggaagttaagaggaagtgacttgttaaactaacaacatacgtagacacatgtacatactctattactgacgaacattgttatctataattagtggattatgcacttgtattttgtgattaacaggcttgaacagatttacgttatacttacttctcatggcatttacttcacttgggctcgttgtcaaagcatagttttccacccacacatactttgactactggaatcgacagctacttgatggctttc

SEQ ID NO: 126099 - DNA, 307 bp, Glycine max
  Clone ID: PAT_MRT3847_84876C.1
gaccgacgcgtccgtaaaaaaaaacatttaaagacaaattttttttttcagccagttattttaatcgggggggccctctacacattccatgctaacgtgccccccaatgctaaccttggtgacatgagtggactcacctaaatgcattcaactgcccgtcctttaaccacgatagatcgaggatcccttgacggcgcctaagcatacaaggacagcaaagtttgcaacatgcttacaatgcaagaattccaaagaggcccgcaccgtacacctttcccaacatttgttcaccctacccaggttgcat

SEQ ID NO: 126100 - DNA, 346 bp, Glycine max
  unsure (1)..(346): unsure at all n locations
  Clone ID: PAT_MRT3847_84877C.1
tgcaaacactgtaaaatgtgactcctcttatatgttgaagtcatcttctcaagtgggtgaagtggttatgtcaggtggtttaaaacccttattgcccaatgtcaatatatctggttctagtgcttgcatggtggagcctgtaactagaaggtatcttcctcgaagaaaagtttcagctctcagagacttcccagctttatgtggacgcaatgctccacatctcagtaaggacaaggatgtgtgtctagaggggatctcttctttaaataacaagaaagcgtgtcaacagaacctggccttagatgacaacaatccattgaaaatttaaaattanaaaaaaaaaaaa

SEQ ID NO: 126101 - DNA, 393 bp, Glycine max
  unsure (1)..(393): unsure at all n locations
  Clone ID: PAT_MRT3847_84878C.1
gttaccttttttttattttttttttagtttttttttttgtttttttttttaaaggggggcaaaagtaatccataaaaataaatcaatgacctttaatttaggaaacatatgataaatgttacaactgaatatggaaagacccccttctcttcagagggggggtnccctcttcgaataaaagggctccaaaaaattctagtggccccaggctctgggagaaaattacattggaagagcacatattggccttgataattaaaaataaattcctacttcttcataaaaatgcgataaatagggggtgggctactgtggctacattggctaccaaaaccaggggggaaattaccttgtatataaataaaatcaacctttggactatatataagggcc

SEQ ID NO: 126102 - DNA, 281 bp, Glycine max
  Clone ID: PAT_MRT3847_84879C.1
ttctataccttatcagtctacgcttctaattatctcatattttctctctcaaatcggggcacacttcggcggcgtgtgaggatttccatcggcgcgtaacggtgttagacgcgcgttattccaagttccccgatgacctatgcgttgtccgacccacattggatatttcacgccgcagagatggcggaatctcactggcacggccgtgatatgacacctccatggcttccgctgtccttacgaatcggaacgaccctatttagcaacggtatagaggcggt

SEQ ID NO: 126103 - DNA, 405 bp, Glycine max
  Clone ID: PAT_MRT3847_8487C.1
caacacaaaccaaacttattttcaaaggtcattacagacccattacacatcacatttcttcttaaaatgttggggaaaatccaacatcgaacatcacacagaaatcagctccagtttaaaaccccccacgaagacccaacaccaagggcaaagttgactccttctggatgttgtagtcagcgggggtccttccatcctttagctgttggccagcaaaaataagcctttgctggaccggtgggattccttcctggtcctggatcttagccttcacattgtcaatggggatggagctttccacctagagggtcatagtcttacccgtaagggtcttgacgaagatctgcataccaccactaagacgcaacgccaagtggagagttgactccttctggaggttgtttt

SEQ ID NO: 126104 - DNA, 495 bp, Glycine max
  Clone ID: PAT_MRT3847_84880C.1
ggaagatctatttatacatcattaaagggtaatactgatacatatgagtatggttaattttaaggggacatatgattttctgtaatgcctcatatcaattataccacaataaaaggaattcagagattatacaattagaataattttagaaaaataattgatattattaatattcacaacttgtatctactttttataatttatcacctaaattttttataattaaatgtgtttgatttaaaataattacagaaaatttgacccttggaggttacctatttcataacagtgaaggttacctatttataattgttccaagtgaagcatgtggttcgtccggttcttacacattcaacttggagtgtcaattcaaatgttgatggttttgtgtatggctcagtagataataggtagaggagcaaatgaaatttatttcaaatgtgggataattagttaggcaaagctgctacattagacaatgccatttgataagct

SEQ ID NO: 126105 - DNA, 446 bp, Glycine max
  Clone ID: PAT_MRT3847_84881C.1
aaaaaaaaccccccctttacttttttttacaatacttaaaaagagggggggaaattttaaaatggggagagctttttcaaacgggggggaggcctaatttcctttttttggtggaaaacaaaacccattgaaaaaaaaaccctcccccccaattttgccaaaaatttttctttttaaaaaaatttggctttggcctggggaacaaaaaaagctggctttaaagggtttcccccaatttcaaagttttgggaaatccctaaaaaaacatcaaaagtcggggtttgtttgggattttcaacagggaaacttaaatcccccgaagtttgtttacccctttcaaaactccacttttgaaaaccttttttgggacccccccctttttttggaaaaatcatttcccccaaatggggttttgatttaacccccctgcttgcgtaaaagggctc

SEQ ID NO: 126106 - DNA, 333 bp, Glycine max
  Clone ID: PAT_MRT3847_84882C.1
gaagagtaaaattcattaagcaccggaacattatacaaggatcgttatgccatgttaggtgtacgttctttactcctagcaaaaatagaaaaaaggtgtaactaatattaaatccacgtattctaatgacatttagagctccggccataacaaaccgcttaaaacttatgcagctgtacttggcactgtaactgttttcgagtcttgtgcccgttcatgtcccttgttgagcatcgtgttggttatcaaattgtggagtgctttcacacttctaaggagagacgagaggtctattaccagcagcatataatcggattccactgcgaaagcctt

SEQ ID NO: 126107 - DNA, 199 bp, Glycine max
  Clone ID: PAT_MRT3847_84883C.1
gccaaactacagcgttctgagtcttttcttcttcgttaccctctacacatgccttctctctgctactttccacgacgaccatattttcctaccgagtcaactgcatgaccatgacttagtgatttgtactacaaccgatctaagcctttactacaatccggtgatctgaatcttgactcacccctacgacggtgcctct

SEQ ID NO: 126108 - DNA, 361 bp, Glycine max
  Clone ID: PAT_MRT3847_84884C.1
ggcatgtgcttccccagtggcaagccaactcaagtccaccttctctaagactcttgtatctcccaggggcctctgtgtctcttcaccacttcacctcgcgccttctagagcgcaatatatcttctctgttagcgccatccaatcagagaagccaacctatcaagagattcacccaatcaacggagacccattcattgaaagcctggacaccccagttacatacagcccttagatcgtatggcacttgtacaacctgcccgtatacagaaccgcagagagccctctactaagagagatcgatgtgggtctggcacacatataccttctggtgcgcccattcgagaacgccgcgtctcttaag

SEQ ID NO: 126109 - DNA, 1048 bp, Glycine max
  unsure (1)..(1048): unsure at all n locations
  Clone ID: PAT_MRT3847_84885C.1
agcatttgntcatgccattcatgatggtgaatgctctggcctccaaatccatatttcaaatccaaattcagacaagaacaagaataccccaatcattttttcaagagtcacaggaccaaaaataaacaaatgagtatggtaatagcatgcaagcaattttggagccttcagcttttctaatgcacatccacaaccgagtttaagtatcttggattttttatcataatattatgtattttataaagattcatgatatatttttttgaaaaaaatattataaattatttattactcacgttaagaaaaatctcttgaatacgctgctgctaattgctatcacatgatgaggccataatattaatataattatgatgaacattcataaagttgatcggagcaagactttttctcaaaagtcgggaggcgggaggtgggaaggttgatcaaacgctacgcagcggacgtgacttggtagggcatggcacccacacactgtcaacagctggtggtaattttgttcctggtgcaaatgttgaaggtaacggcaatggtactgctaagggaggatcccctagggctcgcgttgttgcctacaaagcatgctggaataaactggatgaaggagggtgctatgatgcagatattctagaagcatttgatcatgccatttatgatggtgttgatgtcatctctgcctcgttgggtgggtctaatccctatcccgaagccttgttcacggatgggatttccataggggcattccatgcagttgccagaaacatagtcgtagtttgctctgctggaaatgatggaccagcacctttaagtgtcacaaatgttgcaccctggtccttcaccgttgctgctagtacaatggacagagattttcgcagcagaatttctctcagcaacaatcaatccattatcgtaagagatatcatctaattatctagagattaatttatttcatatagattaatttaattggatcatacgtacgtgtatcatatcagggtgccagtctcaatcgaggcttaccgtcttcgta

SEQ ID NO: 126110 - DNA, 370 bp, Glycine max
  unsure (1)..(370): unsure at all n locations
  Clone ID: PAT_MRT3847_84886C.1
ngncncngcacgcgtacgtaagctcggaattcgntcangttncaaccctagtcactactcactcacaagcatgcacgtnnttnnncnatgcnnncattgatggaccttccnagcancntaccatgacnanatcnngttgttntggcctcngtcctgtgaccnccntcanagaagnnagaantccctntgtattacaaggctaatgggtngtttgtggccgcntgtaggtcnaaaggactngactngaagtngaattcgnanccccccccaaattttctgacaaacnntgacttcatantggggcatacccttgttcacgggnttnttntgagacccttncctttttagcgtnggnnaattttncnccagg

SEQ ID NO: 126111 - DNA, 122 bp, Glycine max
  Clone ID: PAT_MRT3847_84887C.1
cacattggtatggcggctgcggcggcgacagtgggttgagtctagggcaaaaaaagcgaagaatgcccctgtcccttgcggacaattgcacggcgacaactcgcaacttcttctacaacaaa

SEQ ID NO: 126112 - DNA, 215 bp, Glycine max
  Clone ID: PAT_MRT3847_84888C.1
tacggctgcgagaagacgacagaaggggaaaacaaaaaccgtcaccaaaaaaaaaaaaaaaaaaaaaaaaaaaaaaggggccgcgacttagtgatcccttgaccccggaatttatttccgggcgggtatttgagggtgaaccggtttccccaaaaggggcccgtttaagagttggggaaatcaagggcaaaaggtttttccgggggaaatttttt

SEQ ID NO: 126113 - DNA, 149 bp, Glycine max
  Clone ID: PAT_MRT3847_84889C.1
ggtggtgtagttgtcctccatgtacactctgtcgttgccagccaagattgttgttagggctttacttttgttaatgctgatgcatccatcttcttgagaactgaatattgacctacggaggaattcttgtatacactcatgacccaaat

SEQ ID NO: 126114 - DNA, 432 bp, Glycine max
  Clone ID: PAT_MRT3847_8488C.1
gcacgctgcataagctagagcggccgagagcggccgtttttttttttttttttttttggggaacaaacagtagtaacattaatgggacaatagagttcaacacaaaccaaacttattttcaaaggtcattacagacccattacacatcacatttcttcttaaaatgtttgggaaaatccaacatcgaacatcacacagaaatcagctccagcttaaaaccccccacgaagacgcaacaccaagtgcagagttgactccttctggatgttgtagtcagcgagggtccttccatcctctagctgtttgccagcaaaaataaccctctgctggtccggtgggattccttccttgtcctggatcttcgccttcacattgtcaatggtgtcggagctctccacctcgagggtaatagtcttacccgtaagggtcttg

SEQ ID NO: 126115 - DNA, 230 bp, Glycine max
  unsure (1)..(230): unsure at all n locations
  Clone ID: PAT_MRT3847_84890C.1
gtancangcacgcgtacgtnagctcggaattcggctcgagngntagnangnnagaatnnnntcaaccatggctaccctcattnctcccatcacctnttcgcctggtttagatgcagnagctcttagaaaagcnttccaaggatgggngactgatgagaagnccgtatagcnatnttgggtcacagaantgnncancagaggcaacanatcagtcagatttatgangnntt

SEQ ID NO: 126116 - DNA, 425 bp, Glycine max
  Clone ID: PAT_MRT3847_84891C.1
ctcggaattctgctccaggagagttagacagagagaatattgcttttcgcttgttttttttatctttttgggggggattctatagaacttttgggggggtactgacgaagaaagaccaacactttatccctgtgcttcacttatctcaagagcgtacaattcatgcgagggccgtcaagtcggatagcgataagctctattacaagttgctgttggctagactgaacaaatcgacgcgtcagcttaggtgctcaggctctaatatacccctgccgaagcttatacaacaatgctgggcctctaggtgaccagtcatgacgagactaagcatctgggacctgtcacggagtggagactacacgctacgaacggacagttatgatgcttccaacaagcgttgcgggatgatcaagacgctatcaaaa

SEQ ID NO: 126117 - DNA, 262 bp, Glycine max
  unsure (1)..(262): unsure at all n locations
  Clone ID: PAT_MRT3847_84892C.1
cnaacatttcattaaatggggagagaaaaagttattctggatcaacttgatactgcctttcggttacgagctgttgatgtgtgacactgacatggtttggttgaagaacccacttccatatcttgctagttatcccaaagcagatgttttaacatccagtgatcaagttgttccaacagtggttgatgatagtctggaaatttggcaagaagttggtgctgcttacaacattggaattttccatggagacctactgagtctg

SEQ ID NO: 126118 - DNA, 347 bp, Glycine max
  Clone ID: PAT_MRT3847_84893C.1
ggaaaaaaaaccaaaaccaggaaatcctaaacaacgggtttggcctcctggggttccaacctcacaaaatcacaatcccttaaaaccctgggttgggaaacaaaaaaaccctcaaaaaaaaaaaaacctttcttcccccggttttactaaaaagggaaacaaagggtgttttaacttcgggctaaaaggggggcaagcacccttaaccccaatagtcttagggttctaaaggcccgggggaggcattttcggctctttgaccctaagccccccctttggggacacaaaaaaaatggcttcagggggggctttccaaggaaaaacaaactggggcaggaacctcccaa

SEQ ID NO: 126119 - DNA, 236 bp, Glycine max
  Clone ID: PAT_MRT3847_84894C.1
cccacgcgttcgcggacgcgtgggcgaagcaatcgcaaagtcgctgttctgtcccgcgggagcagacgacctgtcttgatcgcccaacaaccctaaaaacattcatcaacggtcactattaatccattcatcattaagtcagaaaatcatgatcgattcttttatctttgatctgcttctgatccatcatggacgtgccgagttcctgggatgcccttcgcaaacaggcaagaaaa

SEQ ID NO: 126120 - DNA, 151 bp, Glycine max
  Clone ID: PAT_MRT3847_84895C.1
ttgaaattcattttctctaaacatgagcaaaaaacataaaaggttgccagagcttccttgaagaatgaaacatttggatgcaagcaatcgcactttattggaaactttcaaatttaatccattcaagccatgctatctttttgaatcatta

SEQ ID NO: 126121 - DNA, 1813 bp, Glycine max
  unsure (1)..(1813): unsure at all n locations
  Clone ID: PAT_MRT3847_84896C.1
cgtgaatagcgaatcatgatttcagacatagtctgaggnatctgcaccanacaccccccaccctctcttcttctgtgtaaatgtaggaatctgcaccataacaaaatgttgaatgatgaggatccaggaataagaaccagaacaggttgcagtatataacttgatgcaaagaggagtagcagaacccaccaaagaaaagaagtgtttgaatttgatcgttaaactgagggagaagaagatgaatcacactcgactcgagtctactcaatagaaaacgctcatcagtgcataccacattgaccctgcacgaaaacttggtgatatggttatactcttaataaggtttggcattcttgtgtgtcttgttgcatccatatcacttgctctccactcagcattctctaaaccagcagacttgcagatgccattgcagacatttcagacttggcgaagttcgacggatggtcccttcatattcaatactcgacctatgagctctgacccgtgccagcagccagctaggtttttcctggatcaggctacaaaggtgggaaaaagtggaagtatcactatctacaagagacatgaaggcaaggaagcaaagtgcaacagagaaggcactaataatgaggaagtgcaaagaattagagtttctgccttgaagctggatccagaatattggaagaatgtaccccgtaggcattgctgtcaacttttgggtggtggaagcataaagaatggcagtatgaatatcaggattaagaagtgcagacctcatgaaacaattactatttagggatcagccatttttggttagttatgcttagttactaagttgatatattatagagtgaatcttaaaagtctggccactaacatttccacccatgtacatacatagttatcaaaatattcatatagtttcgacttttaatgaataaatgtccaaggaaatttttcacttgtgtctaagtagatacttctatttttatggttctgatcaaagagtctgggcctgtattcatgaaattgttcatttctttcagtttgacataagaggaaatccatatggttttctagcagctcaccccttggtaccacttgtatcactccatcaccttgaccaattgagccccttctttcccaaccagactcaattacactcaatgaaaaagctcatcagtgcataccacattgaccctgcccggatagtgcagcaaagtatatgctatgatcataagcgtagatggtcaatatctatttcatggggttacactatacaaatctatacaaaattgttgatagcagcagacttgcagatgccattgcagacatttcagacttggcgaagttggaaggatggtcccttcatattcaatactcgacctatgagctctgacccgtgccagcagccagctaggtttttcctggatcaggctacaaaggtgggaaaaagtggaagtatcactatctacaagagacatgaaggcaaggaagcaaagtgcaacagagaaggcactaataatgaggaagtgcaaagaattagagtttctgccttgaagctggatccagaatattggaagaatgtacctctctctcttgatttggctgtactgaaccaggtaccccgtaggcattgctgtcaacttttgggtggtggaagcataaagaatggcagtatgaatatcaggattaagaagtgcagacctcatgaaacaattactacacccatgtacatacatagttatcaaaatattcatatagtttcgacttttagatattatgggaaatatgtattatttttctctccatt

SEQ ID NO: 126122 - DNA, 2381 bp, Glycine max
  Clone ID: PAT_MRT3847_84897C.1
cctgcaggtcccacgcgtccgcccacgcgtccgcccacgcgtccggaatctgcaccataacaaaatcagcaacaaatatccataaaaaagggaaaaataaagaaggagaaggagaaggagaaggagatttctgttgaatgatgaggaacctaccctcttgtgctgattgagaataagaaccagaacaggttgcagttaaaaaaatataacttgatgcaaagaggagtagcagaaccatataacaaaccgaaagtaaaggaaaagaaaagaagtgtttgaatttgatcgttaaactgagggagaagaagatgaatcacactcgcttggagtcttgtcatgaatctccccttaaagtatacaaattctgttttgtcccagaaaaacttggtgatatggttatactcttaataaggtttggcattcttgtgtgtcttgttgcatccatatcacttgctctccactcagcattctctaaaccagaccggtggttcccgttaccggagcatattcgcgccgtccagaatacttcagtcattgacaacagaccaacaaacatctcacatcttcaatttggcattgctggatcagcaaacacgtggcatggccgtagcaactacactaaactatggtgggatcctaacaccactagaggttatgtttggcttgacaagaagcctaagattttgcacagtgacatattagtaccaccttatcaaatctcacggggctggactcggttcaagcacgtgcactcagcatctgctgttcggatagctcggatagtttatgagagctttaaacttggtttgccaaatgtcaggtggtttgtgatgggagatgatgataccgtgttctttactgagaacttggttactgtgttaggaaaatatgatcacaatgaaatgtattatattggtgggaattctgagagtgtggaacaagatgtgatgcattcttataacatggcatttggtggtggtggatttgcaatcagttatgcattagcagctcaactagccaaaataatggatggttgtctaagtagatacttctatttttatggttctgatcaaagagtctgggcctgtattcatgaaattggggtgccccttaccagagaaaatggattccaccagtttttggaatatactactgatatgcatagtttgatcaatttcccctcactcccctcctgcataacatccatgtactacaaagcttggaagtttagcaataaatttgacataagaggaaatccatatggttttctagcagctcaccccttggtaccacttgtatcactccatcaccttgaccaattgagccccttctttcccaaccagactcaattacactcaatgaaaaagctcatcagtgcataccacattgaccctgcccggatagtgcagcaaagtatatgctatgatcataagcgtagatggtcaatatctatttcatggggttacactatacaaatctatacaaaattgttgatagcagcagacttgcagatgccattgcagacatttcagacttggcgaagttggaaggatggtcccttcatattcaatactcgacctatgagctctggacccgtgccagcagccagctaggtttttcctggatcaggctacaaaggtgggaaaaagtggaagtatcactatctacaagagacatgaaggcaaggaagcaaagtgcaacagagaaggcactaataatgaggaagtgcaaagaattagagtttctgccttgaagctggatccagaatattggaagaatgtaccccgtaggcattgctgtcaacttttgggtggtggaagcataaagaatggcagtatgaatatcaggattaagaagtgcagacctcatgaaacaattactatttagggatcagctatttttgtttggttggcatagttacttagtagattactatagagtgagtcttataggtctggccactaacatttccacccatgtacatacatagttatcaaaatattcatatagtttcgacttttaatgaataaatgtcccaggaaatttttcacttgtatgtatagcctcaaatatctagatattatgggaaatatgtattatttttctctccattttccatattctgacttccgtttccaatcatgcaagcacatgcttcttatgactacaggaatagacctcttccctcattacgtctcttcatttgatgtaaatgtcttccacactagaaattgccaccacctcaccctgcaatggtaaagatgatcgctctacatattttgatattgttcacattttaatattactttggtgagcctttatgtgcaggttcaaatgctgagaactgaactgcagacttggcaaatatttgaatattgatt

SEQ ID NO: 126123 - DNA, 397 bp, Glycine max
  Clone ID: PAT_MRT3847_84898C.1
ttggagcttttccactaaaacccacaacttggaactctctttccataacaatcgcaaattcaaatggagcccgagctcgaacccaaacttgagcctgagcgagagcccgggcctgatttgaagtcgaatgacgaagcatgctgatacgaccactcttacgacttatatgagggctactgcgccataatcaaaggcagtcgcgaagatcgaatctacgggaactgcattgacgccaaattcggctggactcgctacgggactccaccgaactcctcataaacccaagtgcaaacgggcccgaacaagccccaaaactgattgctagggcttcatgcacggtgaacgaacaccctacggtacatggatcatctgtttcttcatcaaacaccataaccac

SEQ ID NO: 126124 - DNA, 262 bp, Glycine max
  Clone ID: PAT_MRT3847_84899C.1
gtagtttgattatgaaagagttaagttagaacatcaaacaatgtttcactggagaagtttgaattgtgaaatctagtttgattacgaaagtgttaagttagaacaccaaacaaggtctcattggagaagtttggaattggaaactagagtcatgagattgggattgaaaatctgggattggagaaggagcgaacatgattgaattcagaaaatatgtttgtagaattttttttgtaggtttaaggaaatggtttatttgtta

SEQ ID NO: 126125 - DNA, 1594 bp, Glycine max
  Clone ID: PAT_MRT3847_8489C.1
agctcggacgcgaactgacagcactgtaccgtaagtcttattatctccgaaagctttctaagaagagagagagagagagagggaaatgggtaaggggggaatgtcaattgatgaacatggagaaggcaaagaagagaatatggctgcttggcttgttggaatgaacactctcaagattcagcctttcaagcttcctactttgggaccccatgatgtcagagttagaatgaaggctgttggtatctgtgggagtgatgttcactacctcaagacactgaggtgtgctcactttatagttaaagaaccaatggttattggtcatgagtgtgctgggatcatagaagaagttggtagtcaggtaaagagtttggtgcctggtgaccgtgtggcaattgagcctgggatcagttgttggcattgcaaccattgcaaacacggtcgatataacttatgcgatgatatgaagttttttgctactccaccagttcatggttccctggctaatcagatagtgcatcctgcagacctatgttttaagctgccagacaacgtgagcctagaggagggagcaatgtgtgaacccttaagtgttggtgttcatgcttgtaggagagctaatattggaccagaaacatatgtgttgatcatgggagcagggcccataggacttgttacaatgctggcagctcgtgcgtttggggcacccaagactgtcattgtggatgttgatgactatcgtttatctgttgcaaaatcacttggtgcagatgacattgttaaagtctcaacaaacattaaggatgtggctgaagaagttgtgcagatgacgacagaaatgggagctggtatagatgttacctttgattgtgctggttttgacaaaaccatgtctacagcactgagtgctactcagccaggtggcaaagtttgcctagtgggaatgggacattctgaaatgactgtcccactcaccccagctgcagcaagggaagttgatgtggttggagtttttcgctatatgaacacatggcctctttgccttgagtttctaaggagtggcaaaattgatgtgaaaccccttataacgcacaggtttggattctctcaaaaggaagtggaagaagcctttgaaacaagtgctcgtggtggtaacgccatcaaggtcatgttcaatctttagatactggactgtgactttacaaactgtcgtatgttgaacaaagtaggtaatttacatgttcatgctcatgttaaataccaatgtattgataacacgggttatgaataaagtggtttcaagaaggacttgtaaaacatgtgaatggtaactgcagcatctacagattcagttatgaggtgaaactttttcttaatatgtaaatgagtaaaccctcaaatttgtctagtagtaattgagaatttcaatgcacaataacaaactgttgcttccaaagtagaagttcttttaggttctatcaacttttatccaaacatgtactaaaactttatttgtggttcttaagaaatcatgattgctggccacattagtcattttaaggaattagcatgttatttgcttaagaaaaaaaccaaa

SEQ ID NO: 126126 - DNA, 1888 bp, Glycine max
  unsure (1)..(1888): unsure at all n locations
  Clone ID: PAT_MRT3847_848C.1
cggatttttggttttgttgagctcagagaagctgaggctttttgggatcgaactatagctgtttgaacttgagtctagttcaagtcaggttgcaatgaagtgttttccattctacctttggagagatcaaggatggtcctaagagcttgcagtcaatatcgggccagtctaacagttctacttatgttgaggctgagtcgaggagatctggttctgaattgaactctatggatgcctcagataacagcacagactncactcaggagaagtgcatttcccagtttgtctcaaagacccagcaacctcagagaatttactgtatctgaactgaaaacagccacaaagagttttagtcgcttcagttcatgcttggagaaggtgggtttgggtgtgtctacaaggggttgatcaagagtgtagatgatccttccacaaaaattgaagttgcagttaaacaacttggcagaagaggaattcaggggcataaggaatgggtgacagaagtgaatgttctgggtattgtggagcatcccaatctggtgaaactagtgggatactgcgctgatgatgatgaaagaggaatccagcggcttctgatttatgaatatatgcctaacagaagtgtggaacaccatttatcgccacgatcagacactcctctgccatggagtaggaggttgaaaatagcccaagatgcagctcgtggcttgacatacctgcatgaggaaatggattttcagataattttcagagatttcaaatcttcaaatatccttctggacgagctgtggaatgcaaaactatcagacttcgggctagctagattgggaccatctgatgggctgactcatgtctccacagcggtcgtaggaacaatgggttatgcagctccagaatatgttcaaactggacgtctcacgtcaaagagtgatgtatggagctatggtgtcttcctttatgaactcatcactggccgccgtccaattgatcgaaatcgccccaagggtgagcagaagctgttggaatgggtaaggccatacctttcagatgggaggagatttcaactaatattggatccaagacttgagagaagacacatcctcaagtcagctcaaaaacttgctataatagctaacagatgcttggttagaaacccaaagaatcgcccgaagatgagtgaagtgttggaaatggtgactcgggttgtggagtcttcagtgagtactaatctacagccacccttgaagagtgtagcctcagcagaagcttctcaggctgctgaaataaagaacaaaaaagtgaccaaggatcaaaacccagattgcaattggttaaggatgtggaggccaaagcttttaagagcattagattgttgtagctttaaagtttaaactggtcaaggcaatgaattggaggcaaagtttatttatgataagaatcatctattattgccatacttggaaaccacaaagagcagctcatgttaatgctattgttgtcatgaaaaggaaatgtcaaacctcttcatctcccataccaaagtgtagtataaactggttgtgctacttaggggtgctttctagcttatcaagctatttaatgaaattttgagggatgctatattcaagtaggtaagaggaatgaattgtgtatttcaaggtagaggctggatttctaggatatgctagctatgttgatgagcctcatgcatctagctgttctagatcttacagaagccccaatacagaaaagtgaaaattaatcactataatgcatgtaaaatacttcagttgtaaattctatatctttatgttcacttttttttgtataaatatacatgttgcaattttattccttacatctatatcatgattataatattctctca

SEQ ID NO: 126127 - DNA, 1168 bp, Glycine max
  unsure (1)..(1168): unsure at all n locations
  Clone ID: PAT_MRT3847_84900C.1
cctttgttgcgccgaaacctcctctcaagtctcaaaacctatatcttttcttgcgccgaaacatcctctcaagtctgaaaacctttaagatattatgtcgcgctcttgccgtcgctgctctcgctgttgatcctcccgttttgaactcaccgatccaagttcactttcatctacaactactctgatacaccgtgaagccaacggcggccaagacttgtacggcattagtccttgtggcgtttcagctttaggagttatcaattatgggtgagtttacaattcagattagcaacgaccttgttaatcaacttgttgatgatgcggtcccgaagaaaaaaaccagaaagactagacggaaggtggcaagagagactgaaaagccccaatctaatgaaactataaagcctgatagtgcagttactccagggtggcctgtgcagtcccctttatttctacctgcaacattgcctgtacaaccggtccattcagagttagaaggtattcagtctgtgcttcaggaaagtgagagggttttggaaagattgcagaagcaagaggagaatatgttgcaggaagtaacccaaaaggcaaaggatcttcatgataaagagtataagcttcctaacccaaagcctgagccttgcatggccgagagacttgcgaccttatcatgttacaaggaacatatcaaggaccccttgaagtgtgccagtcttgttaccggttttgctgattgcctgcgtaggtttggccgtttaggtgacaagtaagttatactgagaagtggtttaaaaggaaattcgtgtgtgcctaatgcaaataattactagtgaactacatactgacaaatactcatttgttacggccaattttgtgtaatctcattcccaacattaaactacaagctcagaataagtgacctattcgtcgtttggaatctgaacattttctgttattttcgtgccctaccgttctgtcaagttggccagttttatatatacacacatgtatatgccagtgatgctactaattcgaaaaaatatagatgctacaagcctacaagttctattaaaaaaaaaaaaaaaaaactcgagactagtgctctctctctctccctcgtgccgaattccaaaaaaaaaaaaaaanaaaaaaaaaaaaaaaaaaaaaa

SEQ ID NO: 126128 - DNA, 362 bp, Glycine max
  Clone ID: PAT_MRT3847_84901C.1
ggctcgagactagttctagatcgcgagcggccgtccttttttttttttttttttttttttttgttccatgggaaatagaattagctgctgttatacactacaatggaaacatgaaaccggggtttgaaaaaatttacctccaaatagccgagggttattggacaacagcatgtaagacgtgatagtatagtgtgttccgcgagaatgcaacatgaatccataaaatacggatcttggggcacgtgtagggtttgccatttatattgcgggtgcttacaatttttgtacaaatatctaaaggcaagatgtaattagggcgtctcctgccttggaaatgaaaagggtcggggttgacatcttag

SEQ ID NO: 126129 - DNA, 404 bp, Glycine max
  Clone ID: PAT_MRT3847_84902C.1
ttccttcaacccctctaagatcgaaaggccaattttttttttcttttagtttttgttattatttcgcattctttttaccttttcaattcttcaaaaattctcgcgactgaattcacgtcagaccacggaaccataaagttcagttttttgcatcgtttttattaaaattggtgggcgaccaaaccagagaaaaaaaacccaaaaaatggaaatttcttatccgtttggccaaatggaccggcgggtccaatggggtggtggaatccaaggcaaagggacccgcgggggtccaaggatttccaatcctgcggtggttaaaaccggggtatttggtgggggagaaacctgggacctgggggtggccgaaccgacgtccgtggccggaaaaggaagggatggaaggg

SEQ ID NO: 126130 - DNA, 311 bp, Glycine max
  unsure (1)..(311): unsure at all n locations
  Clone ID: PAT_MRT3847_84903C.1
gagcggccgccccgccccnnnacctctatccctncgngnaaagggaaacacacgggggggacaaaggaaggcgccccgaccaaccgaacaaaacaggacagaccaggaaacaaaggcaaaagggcacccaccaaccacagagaggagacggggacagaacccaagaagacgcgacagcaaaggaaaagggggggaagaacccagaaaccccaaccgaacgccaaaaagaacagccaggaaagaaaccggaaaaggagcaacgggggggagaaaaaacaaggggccaacccaggccaagcgccgggggaaaa

SEQ ID NO: 126131 - DNA, 340 bp, Glycine max
  Clone ID: PAT_MRT3847_84904C.1
aagaaatccaatgggtcctctgaatccgaatcacgtatttcgaatgccatgtctcctcctcaaatagataaggaaacttcaacccatcctcagatcagtagtaacttggagcagaatgagtcacctcggtttaataagctggaccaggaatccgcctcacctcctcggtgtgatgtgcaagagcttaaaactacgttacctcctcaacttgataagccggattctactagtttggtttgctttgaggacaagctacctgaatcgaagttacaagccgcaaaaagaaactcttccagaaaatattctccaattcactatagggatgcttcagttgaagatg

SEQ ID NO: 126132 - DNA, 421 bp, Glycine max
  Clone ID: PAT_MRT3847_84905C.1
gtttagatagactcatactatcatagattctaaccttcttcgtacgacaattatatatatatatatatatatatatatatatatatatatatatatataaaccttttctaatagctaacctgaatgtattataaactatttttagagataaatatatctgtagttggtgtaaaaacataaatgttcgcttttatttcttaaaaaatatctctctttgtatttatttataaaaatgactgaggtgtagcttttattaccctcacctttaactaaaataaaagaggacacgagctacgcctaacatattttataaacgagagaaaaaaaactttagtgactaaaaatagtgattttttatttatttacagcgattaaaaatatattaatccttatttttctatcacaatgtatcctgtctctt

SEQ ID NO: 126133 - DNA, 421 bp, Glycine max
  Clone ID: PAT_MRT3847_84906C.1
cccacgcgtccggaggaatagcagcagtagcaagctatggcggaagaacagagaggggcaccaccttccaatcctacgttgtcgtttgatcctagtcgaacggttggtattatcaagaggaaggccttgatcaaagacttagctgcggtataccatgccgaatgccttgcatactgtcaagagcttttggaacttcaaactaaatgggaagaggttttcaggtggttgatgcataactcatttagagagcaaaatatgcaccgtcagaggataccttttgcttgctgctggtgtagctgatagtatcagagcacacatttaatgtagtattgatgtacttttcaaatgctactgagacgtcatgtttgagatttcatccatcggcctgcagttgtggaaacatttccccctactcgataaa

SEQ ID NO: 126134 - DNA, 692 bp, Glycine max
  Clone ID: PAT_MRT3847_84907C.1
aaaaccgtcactctatttcttttactccttctcaaaccttatctctttagttatcctcggccatggcgtctctactgctagcatcacctcctccactctccgttcaattgcacagttccacctctcacctttccttctctcactcccaaactctctcttcaccactctccacttccttcgcttctctctcagcctctgcaacctccactctttccccaaccccttctgtgtactgtggcagaggggaccggaaaactgccaagggaaagcgcttcgcccattcatttggaaatgcgaggccaaaggacaagaagaagggtagaggaccaccaaggccttatgctccaccggcaccttccaagaaagacaagttcgaagataatgaggtggtgaagattgaaatcgacgagtcccttttctcgggttgattttagtggtgaattgtaattttgagcctttccatggtttagttgttgatatatgattccattgtgacatacacaatttgggttttgcttatgttatatcagtttctatttttattgtccttcattgaggtcacttgctttattgctcttctttatacattaatgttatgaacagtcttgctttagagttttggggctggggattggaaaggcaataataattaaaaagagaaaaatatagggtggtttttgcttaaaacacac

SEQ ID NO: 126135 - DNA, 576 bp, Glycine max
  Clone ID: PAT_MRT3847_84908C.1
cggacgcgtgggtttcaagtgatggcctggtgtgacttcccaagtccgtgattttttgtgggcctgaatataatgtttgaatattgaaattttgtaaatttactaacaaaccgatagattagatgtttatttattgttaactgcagccaattcaacatatttaatgttgctattcttaaaaaaaaaaaaaaaaaaaaaaaaaaaaaaaaaaaaaaaaaaaaaaaaaaaaaaaaaaaaaaaaaaaaaaaaaaaaaaaaaaaaaaaaaaaaaaaaaaaaaaaaaaaaaaaaaaaaaaaaaaaaaaaaaaaaaaaaaaaaaaaaaaaagggggggccccttttaaaggaaccaatttttgcgccccggtgttgggaaaaaaaaattttttttttggggccccaaaaataaattaaggggccgggtttttaaaaagtctggggtgggaaaaccctggggtaccccaatttaaaccctttgggaaaaattcccttttttcccattggggtaaaaaaaaaaaggccccccacaattcccctttaaaaaaatttgcacaccttaatgggaaatgggccccccc

SEQ ID NO: 126136 - DNA, 603 bp, Glycine max
  Clone ID: PAT_MRT3847_84909C.1
agccactctacatgaaactaccgcagcaggttgagttgagatgagatgagaggaatagcagcagcagcaagctatggcggaagaaccgaaagttccaccaccttccaatcctacgttgtcgtttgatcctagtcgaacggttggtattatcaagaggaaggccttgatcaaagacttagctgcggtataccatgccgaatgccttgcatactgtcaagagcttttggaacttcaaactaaatgggaagagccatatattgacttaaaaactccagaggaatcaaaaaaggagacagcacgaccctctaaacgtgtaaaaaagttgcgttaggttttcaggtggttgatgcataactcatttagagagcaaaatatgcaccgtcagaggataccttttgcttgctgctggtgtagctgatagtatcagagcacacatttaatgtagtattgatgtacttttcaaatgctactgagacgtcatgtttgagatttcatccatcggcctgcagttgtggaaacatttccccctactcgataaaatacatatacgtaatacattgattttttattgtgggaatgatgtatagaatgttttcggtcctg

SEQ ID NO: 126137 - DNA, 158 bp, Glycine max
  Clone ID: PAT_MRT3847_8490C.1
cccacgcgtccgtctgcgtgagacaacacaacggtgatcgcgggctgcgaggataggaaagcgctagtaataagaatagcgttggatgacggatcgccatgcctcgcatactgtattacttttgcagagctcacaacaccgaaccttcattcccgact

SEQ ID NO: 126138 - DNA, 300 bp, Glycine max
  Clone ID: PAT_MRT3847_84910C.1
cggccagaatttcgggggccaccccacgcttcctgccactcataagacagctgagagaggacgaccgtgtgtccactgaaccaaataactgctgaaaagcgtccgctatagctgcttcctgctttatgacgctctcatgcgaagaacatacccttatgaaacagttccttatatacatttggagggggcgtgaagagctcctcttcagactgggaaaaccatagcctttaccctataaaattatccttggagaactcaccttcttcaccttctatggcctatgagatgaggtggattcct

SEQ ID NO: 126139 - DNA, 291 bp, Glycine max
  unsure (1)..(291): unsure at all n locations
  Clone ID: PAT_MRT3847_84911C.1
cccacgcgtccggggaagaaccccacacgttccatcaattgcattgttnncaacccnaccttgtattctgcgcgggcgcacctaaatgacctggtctcaccataatccccaacgatctaccactgcacccactctagggaccatcccttggcaccagcagccatatacgagcccaaatccacgctcacctctctctaatcctctatctacccgcgtcgctctgagcgctttctgaccctcaacagttccccgttggctaaaccaacctcgctcttcaacctacaccacacc

SEQ ID NO: 126140 - DNA, 217 bp, Glycine max
  Clone ID: PAT_MRT3847_84912C.1
cttgaaaattcattttcgagaacctgcacagtttctttcattttttcttgttacaaggtcatgacaaaagacaacaatggatacctcagtgccctacactggggcaataagaggcaccgtgcataagcctcaagcgaacctaggggcagatcagaagttctcacttggtaggtcgaaaacccgaaagggcggcctaggaaaaattggggttaattat

SEQ ID NO: 126141 - DNA, 513 bp, Glycine max
  Clone ID: PAT_MRT3847_84913C.1
ttagattagaagttgatagagagagagatatcacttgagatgagaatgtttaccttctaatgtagcacgcacatcacactgagtagtcgagagagtttggtactatattggaatagaagtatcctctttagccacaatcttgagaggtgtttcctcgatgtgcctttcactgcagaaatatggttgataaaatggcataaatggaagatctcagtactctggggatgtgagaattagatgacattgattccgggaaccactagtgaagaggcttacaacatgctaattaggtgacatagtaaacttgttcctacattggttgacatctaatgttccatggatgagaaacctgctggaatcataatttttgacaaacctaacacccgctggttcactattctccctatggagcttaattcttgtggtccgtcggaagattttaaattttgcgaggctcattatgaagaaaagagacaagcttagttgtcaagttggaatcaacccatactccat

SEQ ID NO: 126142 - DNA, 997 bp, Glycine max
  Clone ID: PAT_MRT3847_84914C.1
agtctaggattcgaggcctagaacctccagagcagaataaaggaaggaaaggaaaattgtattattgtctgataattgaattgcatcccctctcatatttatagatgttcttaaacaattctggatgaaaattctttaacagattttggcagcatgccttggaggaaaatcaaaacgctaccaggagacaacatctaacgacacaaagatttgggattctgtttctagaagactgctaccaggagacaacatctaacgacacaaagatttgggattctgtttctagaagactactgccagcgcatccatacttcattgcatagtccttcaggtactgaggcttgttcattttcctttttgaccttctacgttcttccttgtttggttccactgcatgctctgtttttgctgcctcttcatctttcgattttgtatattgttctggtgctgcatagtgttccatgttctgctcccctttcataacaatcttccaaaatatattcttcatccagctgaattgctatcaaaacctgagagtttgataccaaccatatgcttcatataatcgagagtcacattgccaccaagttttcacgcttttccctatcaaacttataaggggatcagaactccattatccttggagaagttggatcagtagtttagcactttagtctcctaacttagaagctccctgtctcgtgagaaagatgttgaactttcgaccgatggtggttggtagtgccagttccggcacggttgtgatgttgctataaacaaagaaacaggttctgctgtagtctttcaccaaatctcttgatttccaacatattttcttggagagaaccatgttgaagattgaccaacgttgttggtagaggaaattcggccgacgtactctgtagaggttccgatcaactatgaagatctttgttctttgcacatctacaaaaagaacacaacacatcccaagcgaaaggactgtgagaaggagaga

SEQ ID NO: 126143 - DNA, 505 bp, Glycine max
  unsure (1)..(505): unsure at all n locations
  Clone ID: PAT_MRT3847_84915C.1
tacattatataatgttaaaatatcctgtctatgaactatgagcaaactgctggtcaaggagaggaagccaaaacccagccatacaaacattctacttggtaagtgaaatgagattgagatacttttgagttctatattgttttaacaatctcttatgcaacagacaaaacaaaacaaggcaaaaatggcacaaacattataacgaggagaaaattttatgagttatcaagcaatgctaatatcgaaatgagatcaatcaatcttgatgattcatattgattaaatattcattgaataatatactttatataggcctctatttatttgaagtcacagaatatgattctaagagtatagaaaaacacactaaaaaaaaaacacccaaagtgagcaagtttgtcaaagataaaattcataagaataaatgaataacacaatccatatatccaaaagaaacatntttcctgtgcccaaggtaattctatagaatcagaaaaagtgacaa

SEQ ID NO: 126144 - DNA, 280 bp, Glycine max
  Clone ID: PAT_MRT3847_84916C.1
cccacttctatttctaccattttttttttttatttgccgtaaaaaactaaaaaagggctcccttatggggcttgaaaaacaaaacatctttatcaccccatctatttcttaaaccaaattccctacttatatccaggtccctaaagcacactttctgaatccttaacaccctccttttagataaccctactacccaaatccgacttaattccaagggctatttaatatatattctccctcactcacaccctctatctctttgtgcgaaataatttattgg

SEQ ID NO: 126145 - DNA, 530 bp, Glycine max
  Clone ID: PAT_MRT3847_84917C.1
cactatagcaaggagctatgactgcgcacgcacgcgtgcgtgaaccctgaacatcggccgccctcgccctttttttttttttttgtgtaacaccagaaataaatgaccaaatttttgtgaaccattgccctggcacatggaggctcaaaaagaccacttagaaaatgctaactcaacaccaccctgcaaatgtaaatatcaaaaacaaatgaccattggacacaatttttagcggaccaaacttaaacactatatgactgaatttcatggaaaccaccaggatggaagtctctgccatcatggaggcgactacatatggatccatattataaacatggcttatgtacttaaaagcaccggtgccaactttacatgggcatttgcccactgacaaggagctcatcacggacggccacaccctatgaaaaagagtgcatgtctgcagtttcatgtgttgcattgagaccattctaaacgccttccatatatgaggcagggagctccccgtgcctgaggccaagcttgcgaat

SEQ ID NO: 126146 - DNA, 691 bp, Glycine max
  Clone ID: PAT_MRT3847_84918C.1
gacccaaacaaggaaacaacaccatcaccaccatccaagaggcgtcgcaccgtccaaaggaaaaaactcaagaaccaataatattgccaattattgatctcaaacctttgtccaacgaaaacataaccaaagttgaaataatgggaaagactccaaagcctctctctcaaacctcttcttcactccctcaaatgccctatgtgttcacaaaaggggacaatgggagaacggttaatgggtttctctacagatacacaaaatctgaggtcagcattgtttgtgtctgccatggaagcacattttcacctgcggagtttgtgcagcatgcagggggcactgacaccacgcaccctctaaggcacatcactgttattccttctgcatttgggtgatcttaattccctttttttgtgtgtaattaggcctattctcggttctgcgtcgtatagcgtgtttggaaatacgttgagatgtaagaaatcacgttgagacgtaaaaaatcatcaattctgggatgtggaagttataactattaggtgaaacctagcactctataagatagagcagcggaagaatttgattcaggtgtctacgtaatgtgatatctttaatttaggcagggtatatattttacaggagttttttgttaactacgctaactgcattaacaaacaatctccaattgagattg

SEQ ID NO: 126147 - DNA, 420 bp, Glycine max
  Clone ID: PAT_MRT3847_84919C.1
cccacgcgtccggaatggttttccaattttaattcctaaaacaaaacccggttccttcacgcgacggagattttaaatttttattttttcttcctccgaattagacattaaattaaattaatgtaataaacccaaaaaagaaatagatcaattttgctttagcattattcattcatcaccaaactccaactgggccccacctaccacctcactctttactaactcgtactgcttcatatttttatttttatttattataatttcggtgtgtttttttcctcctttttaataatcttagctttgattacttttcctctcgatctctctgtcccacccctccccccctctcttcttcctctagtgttgatggatctccatctctcttacgcgtctttattttcactcacacacacaacactt

SEQ ID NO: 126148 - DNA, 437 bp, Glycine max
  unsure (1)..(437): unsure at all n locations
  Clone ID: PAT_MRT3847_8491C.1
naagttctggcaattggctaacgggcggnttaacggnttaaaagnctncccggggnaaatttcccggggccttccggaaggggggcnntngtancggntantcccntcaagcnanccaantcattttacttttggcaaaccattngcctgcggaanncgnanatcgacttntgcgtctcnaggtactagtgtgtncatcnacatggganagnnntatcataagcacacgtcanaacnagcagcgacnnggccacctacatnatttccatcctnncctacgtgcatctncgtganaagncnatttaccnantcannggcccaatcantngatggggactgcaantcgagatcattnnntncnggnacttnngnnttngttncntaaanggnnggaanannctnatnnnnaaccannttangtgaccnntggctggggn

SEQ ID NO: 126149 - DNA, 730 bp, Glycine max
  unsure (1)..(730): unsure at all n locations
  Clone ID: PAT_MRT3847_84920C.1
gccccgcgaccaacacacacaaattaaatcatcacaataactcactctttcctctgtcaaccaacatggcttcaaagttttgtttcttcttatttctcattctcttgccattatttgcttcctcagacactgttccaaatcccaccactcctgtctctcccggaaccgcatgcaaatcgactccagacccatccttttgcaaatccgttctccctccccaaaacggcaacgtttacgactatggccggttctccgtaaaaaaatcactctcacaagcccgcaagttcttgaacctagttgacaaatacctccaacgtagttcttctctttccgccaccgcaatccgtgcacttcaagattgccgcactctcggcgaactcaacttcgattttctttctagttccttccaaacagtcaacaagacaacgaggtttcttcctagttttcaagccgacgacatccaaaccttactcagcgccattttaaccaaccagcaaacatgcttggacggtctcaaagacactgcttcagcttggagcgtgagaaacggtctcactgtcccactctccaacgacaccaaactatacagtgtctctctcgctctcttcaccaagggttgngttcccagaaccaaagccaaagcaatgcaccctaccaagaaacaacttgngttcaaaaatgggcgtttgccgcttaagatgtcgagcagaacccgtgcgatctatgagtc

SEQ ID NO: 126150 - DNA, 2478 bp, Glycine max
  Clone ID: PAT_MRT3847_84921C.1
ccacgcgtccgcggacgcgtgggcggacgcgtgggttcacttagtcatattttatttttaatttttgggaaaagagtgagagagagagaggagtgggaaatcgagaaaccctagtggagccggaagtggaagtgaagagagtaaatgacgatccattcggtggtgatacagaagctgcttagcaccaatgctcaggtgggtcgacgtgttgccgctcaccatttgaaggagttcacctatggcttccgcaacaaaatggccatcatcgactccgacaagaccctcatttgcatgcgcagtgcctgcaacttcatggcctccctcgcccgccacaacggccgcttcatgttcatcaacaccaaccctctcttcgacgaaatcttcgacctcatgaccaagaaggtgggctcctacagcccctccaccaactctctctggcgcaccggcggcttcctcaccaatagcctcagccccaagaagttccgctctcgcaacaagaagctcgtcttcggccccacccagcctcccgattgcatcttcatcgtcgacaccgagcgtaagtcttctgtcatcaacgaggctttcaagcttcaaattcccgtcgtcgccttggtcgactccgccatgcccctcgacgtctataagcgcattgcctatcctgttcccgccaatcattctgtccaattcgtttatttgttctgtaatttgattaccaaaaccttgcttgacgagaaggccaagtctgatgctgccaatcccgatattgatgctcaaatggaagaagctccgcgcaagggcaagggcaagacctatttggataaggtcgacgtaaccgtagttctctacgataatttagctcccttacctcaagatatagaagaaactaagaagcttttggacaagcttgttgttttgaagtttaatggttctcaaggaagaaatatgtgttttgacggtcccaaatctgcaattgatatttgtgatggactgacatatctggatttgatcattaaccagattgagaccctcaattccaagtatggaagcagggttccattgcttcttttcaataaagatgacattcatgatagttctctaaaggttttggagaagtattctaaatcaagtgttgaagtgcacacttttaaacagggtgaagatcgagagttgaaatcattgggtgaatattatagcaaggaggaagtgcatccatttgatgatgttgatgtgttccgtttactaatgactggtggaacccttgattcattattatcacagggtaaggagtatatcctagtgttgaagtcggacaatgtggcaacagtccttgatccaaacatactaaatcatttgatgataaatgatattgaatattgcatggaggtgacaccaagcaattcgtttaatttaatgttacccacaacgaaatttaagcttcgggagattggtggagaccaagataaacacttgaaggacaatttcaaactcatcgatacaacaaacatgtgggtgagtttaagagccatcaagaggtttgttgacactgttgaagtaaggcagaagaagccctcattttcaaaggacacagcagctggaccagcaataaagttctttgataatgtatttggtgtctccgtgcccgaatctcgctttcttcccttggatgcaacatcagatctattacttcttcagtcagatctatacacttgtagagaaggtgttttaactcgaaatccagctagaactaaccctttaaatcctgtgatagacttgggacctgaatttgaaaagtttggtgactttcaaagtcgcttcagatccattccaagcatcattgagttggacagtttgatggtgagaggtgatgtgtggtttggggctaatattactttgaaggggcaagtgactattgctgcaaaacctggcttgaaattggaaattcctgatggggtgacgattgagaataaggagatcaacgaccctgcagatatctaaggatgaatgttgtcgaagttgctgagatttggttccagtgaatacatgactgctgaactttgatttgcagtgctatacaatttagtttgtcacattagcagccagccatcttttagcttttctatttgctgggaactaaaaggttgcagaagcaaatagttccttacacatttttttttcaagcggcatgatagtggtgaaataattgtctgctcatctatttattcatcctgtaactcttagggcaaggcttgatatagtcacagctgagagcctgagaagctgagacaaggaataggaatagtttcagttttgctggtctttttgccttagatactattagaatcacaccaattgtttactgtaccaatgagttggagcatacattacagaaaagacatttttaaggcatatttgtcattgacttatataagctacccccaaaatttactgctttattaaaaaaaaattttgttagcatct

SEQ ID NO: 126151 - DNA, 714 bp, Glycine max
  Clone ID: PAT_MRT3847_84922C.1
aggaaaattaatttcactttattaatttcaggtctatctgaataagttttttttttttttttcacagaatcaaaaacaatagtgctacacctgcacatctaaaccgctctacatagtacatccaacaagagaagaataatcgaacagtttttctcttttttgagagagagaaaggattcaattgacgacgagaagatcgtcgatgacgagatcgggcgagtcggcggcgggattgacgggaacgaagaggatggacttggcggccatgagcttcttccgctgcgggcagcgcgggccgtagatcctagcgaggaagaacgggaagccggtatcggcggcggtggcggtggcctgaggctggttggagtcggggagcggcgacggagagggagggcggtggagggagatctggtggcggaggagggagttgaggcggtgagatctggcgctgatgcgagagtcgcggatgcgggcgagcgcgccgggtttgaggtacttgtggaaggggtgagggatgcttggtctggttctgcggttcatggcgaagcgtgcgaatcgaagaatgaattgagagtcgaagaaaaaaaaataaagagaggaagaacaaagaagtggtaatagagagaggtgaagattagggattttaaggaaaagagagggagagagaggcgggaaagggagagagcggggttggctgagggtttcaaaacaacc

SEQ ID NO: 126152 - DNA, 382 bp, Glycine max
  Clone ID: PAT_MRT3847_84923C.1
gtataaacctgattgtccatttagaaaacaattgacatgtgctgaggccttggttgaggccgcggcccaattcaccccgcgcagtcaagcccggagagccgcccatactgaccgaagaatcagccctgcggatcaacaacctttgggatggtcatgaacctagaaagcgaccaatgtttcttatggccacgccggcctcaaacggagcctttgcctttggtgaacgctatgtgcacaactgaacaacgccctaattcgaaccggcatgtgcgacttccggttcctaaaatgcagggtgccgccactccgactccttggagtactcgtggagcctgctctccctaggaccccacccgtggaactggacgccatgcccccaccg

SEQ ID NO: 126153 - DNA, 437 bp, Glycine max
  unsure (1)..(437): unsure at all n locations
  Clone ID: PAT_MRT3847_84924C.1
ctcgagccgaatcgactggagacggctgcgagaagacgacagaaggggaacctagtaatttactattcggttttaataaccccattacaagttcgtaataaataaaaccatcattaaaaaaggaagagggggaagaaaagagaaaattttccgagaataataaatacggaaggatatatgggacttgagttgagtctccttatgcctttatcttccaatataattacatacatgaaagagcatagagagaaaagaatganaagtcttgggttgagagggatataaatgaaataaaatttaaaaagaaaagaactttacatgaagatggttctggagcgatctgatgcaaaacgagaaggatatgtagacatgttaacaccaacggggattgcaaaagtgctntacatggaaagacgttgctgaaaggtttcaatggc

SEQ ID NO: 126154 - DNA, 411 bp, Glycine max
  Clone ID: PAT_MRT3847_84925C.1
ctcgagccgaatcggctcgagacggctgcgagaagacgacagaaggggaacctagtaatttactattccctttgaataaccccattacaaggggcgggtaaataaaaccatcattaaaaaaggaagagggggaagaaaagagaaaattttcagagaataataaaaacggaaggatataagggacttgagttgagtctccttatgcctttatcttccaatataattacatacataaaagaaaatagagaaaaaaaaataaaagttttgggttgagagggatataaataaaataaaatttaaaaaaaaaagaactttacatgaagatggttctggggcgatctgatccaaagcgagaaggataagtagacaagttaacaccaacggggattgcaaaagtgctttccatgaaaa

SEQ ID NO: 126155 - DNA, 1316 bp, Glycine max
  Clone ID: PAT_MRT3847_84926C.1
ggattcacactcaataatatcattatcctctcataaaagatggaggcaaacatacaaacaaatgaaacattcaaattccgagcgagcatttatcaacccaatttcctcgtaattacaggaaaacaagttttaagtatattataattttgaccaaaacagaaaaaaattgcgtcgataaatggccgctgtgaactgtgatcctacaactctatgctctcagtctcaacactcaaaatactgtagatacataaacatacatacatctccattttttttataaaaaaaaaaaaacaaattaggtaaataaattttcttttcatttttttacaacctgtaaataataagaaagcagggcaataccgcacgcgagtcaaacactaacaacgcgccgttatccccactcaccgagtcgaacccgactcgcttgtccaacaacgagtcaagaaacccgagttgcttcgagacccgacccgccacgacccgacaaaccagcatggcccttctcccctttcctccgccggctgtctcatgcgcgccgccgcttccggagaaagtacaaatcgccgcccccttcttctccggaaatgaccatgcacagccaccaccgtcgtagggtacaccgtcctcggcaaaacccaagcaatgaaaccgcatgacctcgttcccgtcggcgatgcatcgcgcgttctcctcgccgtcgttgccctcggcgagccccgcggcggcgcgtgccttcaccgcctcgcgaaactcctcgaaccgcgacacggagcgcggcgcgttctgcaccttgaaaatcagttcgacccgacccgggaagggcttggggccccagcttgtgtggaagatgatttcgacaacgttgcgcgaagggtggccttcgggaagttcaatgatgccacgcgacgaggttgtcgttgtcgtagtgctgcttcgagaacgtgtcatggtggttcgtgcttcgaattcaggtttggttgttgatgatgggtatttcgagcttggatgtttctccaagggtggctttggcttgggcttgggctttctgggcctgggcttgggcttgggtatatccaccatttcttttatgctctccacgctctttctgcaacctgcactcaggattttggggtgtgggtggtaaacgtcttcgaaagctcttgacttgcactgccacgacttcacccatgcactcgccatcgcatgtaaaacgcaatgtttgagtttgggtttgttcaaaatagggtttgggttttgatgttgttggagaacgagaagagaaagagagacagaagagaagagtgagagacaatggt

SEQ ID NO: 126156 - DNA, 437 bp, Glycine max
  unsure (1)..(437): unsure at all n locations
  Clone ID: PAT_MRT3847_84927C.1
cccactcgtccgtatccaacaagcttacttttataccagagtcctcgaagtacataggaagggcacatttttgcacagaggangaaacaccatcctctctaatattccatactacaaaaaacatggatatggggtgctgatatgacactcctccttatattatggactaatctacatggacactgcaccaactctgccctagaactttaagaattacagcatgcttgcaccccttgacttcaaaatgatttatttatctggtattacactgtacatacagtccataacagaatctaactgtgagcaggctgcctaccacacatggtaacattaagattaaaggatccacatgataccttcacctcaaatgcatagtgatacataacatcactcggagagatactaattaggcatggatacaacatggttgagatcat

SEQ ID NO: 126157 - DNA, 151 bp, Glycine max
  Clone ID: PAT_MRT3847_84928C.1
cgttattttcttggcacatacttcttaacttgaaagaccttaactaaagggggtggtttaaattgggcccaccgggtttggtacctttttgaattttattggaagacatggattggtcatcatggattaacactttcttggatctcaacat

SEQ ID NO: 126158 - DNA, 261 bp, Glycine max
  Clone ID: PAT_MRT3847_84929C.1
gactcaaaagataccattttactgcatcaaacttcaatttggagtgtaagagtaaagagagacactcatataatagcgcaagaactcttaagaaaaacggttcatactcctcagccaattacatttattaaaatgtagggactattatcccgtgtggatccttactgccaacacgtagcaaaaaaaccagccttagattggagccatctggtcctccttgaaccacgcttggtgacacccggcagaagagaagacacgatt

SEQ ID NO: 126159 - DNA, 392 bp, Glycine max
  Clone ID: PAT_MRT3847_8492C.1
tcctgtatagcggccgcgctccacgcgtccggtttcccctcgtctccgagctcgtttggcactccaagaatctatctgcgataatgactggtgttgaccagagggatcgtgatcgccacatgtctaagagctacacctgatgtataggtatgcaaaaagatgatgggttgtcccatgatcaggcaggaaaagagaacataagtgctgcatgatacggtggatacaaacgcggatgtgatgctggagggaataatgcaagtgtgagcctatttttaggctctacttcaatgaattggctcgagtctacattgccgtttgtttacatggattttatggaaaatctatgttgtgttattcgctgagtttgatgggggtattaatgtaatttgtga

SEQ ID NO: 126160 - DNA, 271 bp, Glycine max
  unsure (1)..(271): unsure at all n locations
  Clone ID: PAT_MRT3847_84930C.1
ttattcttctctccctccttcatnttcatntanttctctggaggtatataantagtattcttgttttngnttaancnnaananttggttgaantcttntggccntgggaacccagattttncggcntcaggnctgttncgtagaacgaatcangtctcctccctctgacttttcccggcggaggngttccggtaactactgtnattnntntgaccacngcnaccntgttgccacttccaggtngtgccggaagccggttgcncnanccgag

SEQ ID NO: 126161 - DNA, 1799 bp, Glycine max
  Clone ID: PAT_MRT3847_84931C.1
aaggaggtctgtggaacgtcccacattttgacttcattcaacattatggaataatatatattcaggagacttacactatatcacaagtaatataaatgaataaacaaaaccaaaaaaaaagactgctcaggagctctcactcgactgaaataatgaattgaattgacagatgtcaacaaaaagatactagtattttacaacaaaacatattgcattcattaagcatcggtcccccccccccaaagaaataacatcgattacagattactctccggtgtaacctttggccatcctgacgccacacaagaaattgattttctacaatgattttccatcatcgatgcaacagaacttcaatcgaaactcgagcccttttattggtgtactttaccatgtacctagtatggattgaacaaagtaaaactttcaaagcccttgttacagttgtggatggtttgatttgtgttgttaccatgactatgtgcatatggttttattgactttgttgacatgttgggcaaaagcatgtctttggcatgtccatcatttttacggcatcaaacattgtcaaccacttacattaccgcgccccccccaatatcacatgcaccagacaagaacacagacgccccacacccagaattcggagggggcgcatattgcatgttacatcatagcccttagaacagccagaggaacccagaagataaatctttcaaagaaaaaaggagagtgcttagagagagagcaaaacatattattttcattttcatctttttttgagtatcaacaaatggcaaccactgtgatgaccactctcccccaattcagtggtcttagaccccaattctcagctgcccctgtgaagaacttggttgctgtgcaacccatgagtcgcaaggggaagggtgcattgggagctcgatgtgactacattggttcatccactaatctgattatggtggcttctacaaccctgatgctgtttgctggaaggtttggattggctccatcagcaaacaggaaagccactgcagggctaaagctggaggtgagggactcaggcttgcagactggtgaccctgctggcttcacccttgctgacaccttggcctgtggatctgttggccacatcattggggttggggttgttcttggtctcaagaacattggtgccctgtaaaaagcaactatataagtttagtgcttgatgcatctgtaatcaatgttattatgtacttcattttcacatcactctgcagtctttctcaaacttaacataatattcagtttctcccttttccctcctaatcccacacccaccccctcatacaaaaacaaaaaaagatctgttttggcaaaagatcaaatgctttgtttgctggaaggtttggattggctccatcagcaaacaggaaagccactgcagggctaaagctggaggtgagggactcaggcttgcagactggtgaccctgctggcttcacccttgctgacaccttggcctgtggatctgttggccacatcattggggttggggttgtccttggtctcaagaacattggtgccctgtaaatgagcaactataatcaaatttagtgcttgttacatcagtaatcaatgttattatgtactttattttcacatcactcttcagtcttccctcaaccttacttaatctttagcttctccctttccctcctatatatctatatatatatatatatatatatatagttaaaaaatagtttaatgtttatgtattgacaaaataattttacagtattatttaattagta

SEQ ID NO: 126162 - DNA, 218 bp, Glycine max
  Clone ID: PAT_MRT3847_84932C.1
aatgattatctttttttagatgagcatggtcagcattagattattagattaccaatgatcctaagctggttctatctttcttgatgccaagctattatatggaggagcatgcaaatactgatctcaaaagcaatcaggggtgaagattaactgtcgcaaaaacccataaaccatagacatgggaggagaagaggggggacaggagagggggcccctat

SEQ ID NO: 126163 - DNA, 740 bp, Glycine max
  unsure (1)..(740): unsure at all n locations
  Clone ID: PAT_MRT3847_84933C.1
gtgttttanggcacaaaacgaaaaggaaaaagttattcctttagaagtaaatatttttgaactctaccaacttttaatccacacatatcctatgttgggattaaccattaactcatcttttctcaattgtgagatttgaaagaaccaaataaaatatccattaaggataatacatggggtgaccacaatctcacaaatgttagccttgactccatgttgaccatttgtttcctatgctgtttaaacaaaagtgacaagattatgtataaatttttgaacaaaatgtttttatcccctcaaaacagaatctttctattacctaggaaggtatccgattggtcaacccaatcaacctgttcttgatcatggttaattcgatactttgtgatccgaattatggaaaaataattctccaaattctatccaaatcaaccaataggtagtgtttactttaattacactcgagtgtatttgagtagacaatttcaaaaatgagtctggatcccacacctctatgaatttcatcttttttcacttcagnactctttcattcctttaaacnnggtgcctgctttttggcaaataaaaagaaacagtgactgcacgacgaaaataatatctaccataatgtatattaatgcgtttcttaattgaaaataccatatannnnngnaatanatnnaattngagncnnnagtattttnnnnnnatnnnnntattcttgatttctatatttaaaa

SEQ ID NO: 126164 - DNA, 426 bp, Glycine max
  Clone ID: PAT_MRT3847_84934C.1
acgaagcgaggacccacagagcggccgctccacacccctaataaaaaaggcaagcacaacacaacggaagcgggcaagagtataagaaacaaccaacccaacagacacacggacagagaccgactacaacacaggagcaaaaaggcgaaaccaacgggaaacagccccacaacaacaacaacgaggggcccgacaaagagccgagagaaagccacgggaggaccaagcaacgagaacaaagaccccacacgccaaccgcagaagaagcaccacaagcacagagaaagccggacacggcgcaggaacaagaggccagaaccgccgaagaagaacagaaagccccgggcgcgcacacaagggaaaggaaggccgcaagccccaccagcaccacgccaaccgcggaccagaaaggggccaggccagaga

SEQ ID NO: 126165 - DNA, 252 bp, Glycine max
  Clone ID: PAT_MRT3847_84935C.1
tacggctgcgagaagacgacagaagggcctacaaaaattttccagccttctttgtctggtgcctttgattttttaaaggtaacaacttttttttctttctttggtttaatactccccctttttctttgtccatgtcataagtcttatagccgaccttcttattattctgattttttttaaaaataacagtatggcaaaataagggatcatcaaatcctcctagcaccaatcctggatggaaatattgtactc

SEQ ID NO: 126166 - DNA, 338 bp, Glycine max
  unsure (1)..(338): unsure at all n locations
  Clone ID: PAT_MRT3847_84936C.1
ccacgcgtccgatttcgagcaactcacttagcgagtcaatccgctaagcgagagaggtgtttggctttccgcctcctctcttggcgggccgacatgggcccatttaaaattcaatttttttttgaattgcgctgaacgcaaagcagcgcgctaagcgaattatgcagataaggaaacctccaactctggctaagcctggctcattgcaggcttagcgaatataatgcatcctatatataggggggcctgcgcttagcgagtggttgctagcttagcgctatttaggccacaaggaattgagcttaacacgggtacatgacgcttagctcanttaaact

SEQ ID NO: 126167 - DNA, 119 bp, Glycine max
  Clone ID: PAT_MRT3847_84937C.1
acgagtattatggttgtatctgtgtgccatcacgagttttaaggtccattcccgtgagcttgaaaaaatgcaattccgtccacagaacttgaatatttctcacacaatattgcttaaga

SEQ ID NO: 126168 - DNA, 482 bp, Glycine max
  Clone ID: PAT_MRT3847_84938C.1
gaattcggcacgagtttctctcttctttactttctgcacccccttaattcgctatggcaccaacattcaaggccttcgctcttttcctcctcctcgctctcttctccgccgcctccgctcaagaattatcccccgcctcgtctccggcaccgtcgcctgaagcaggagccgcagactccgtgccttgctccgccatcatgatcggtgcctcgctcgttttgtctctcatggcggtcttcaagttctaggatttcttattttgcatttcatgaatgaattaatattccaaaataacatatataataaacttgagactttccacgttaccacttcagagtttattttattatttgttgtaggtcttatggtgaagtaacagggattttatcctctctacatttttattattaattatgtaatgctatatattatgtatgtttatatgctatatggatataacttagatccagttattttatgtg

SEQ ID NO: 126169 - DNA, 343 bp, Glycine max
  Clone ID: PAT_MRT3847_84939C.1
cctacatacacaactacatccctccttttacaaaaacacttatcccaaagttcactccattgttcataaagtcatcaggaacatttcaaataaagatccccatatgcttactactctcattacacttcactttcatgactgctttattcaaagatgtgatacatcagttttgttgaacaacactgccaccatatacagcaaccaacaagctctaccaaacaacaactcactaacaagtttggatgttataaacaacattaacacatcagtaaaaaaagcttatcccaacataatttcttatactaatattcttacccttacatccaaaatatcttctattcta

SEQ ID NO: 126170 - DNA, 413 bp, Glycine max
  Clone ID: PAT_MRT3847_8493C.1
tacggctgcgagaagacgacagaaggggaaaacggtcctgttactgatgttgatccaattggcaattctcctgtaatcattaagaagtctttgatggaggaaatagcttccacatgggtaaatgtttcattgagaatgaaagatgatcaagagactgataaagcttttggatgggtgcttgaaatgtatgcttatgctgtggcatctgcattgcatggtgtaaagcataatcttcgcaaagactttatgcttcagccaccttgggacttaaatgttgagaataagtttatcatccactatacatatggatgtgactataatatgaagggggaactgacatatgggaagattggagaatggcgttttgacaagaggtcttatcttttgggtcctccacccaaaaacctgccctt

SEQ ID NO: 126171 - DNA, 340 bp, Glycine max
  Clone ID: PAT_MRT3847_84940C.1
gtatagaattcccgggctgacccacgcgtcaggcgtagtgcaactggggtacatgaaagcaaatattggcgtggtggctatggcgactatggtggttggcgtgatggtggttggcgtggtcgctattgaggctggcgtggttgctatcgtggtcggcttcgtggctatggtggctggcgtcgtggctatggtggtgggcgtcgcggctactgctgttgccgtggtggctttggccctaacgaacatactgaggctgtgattgatgcgatccctcacaactcacagtgaaaactgctaaagcctatatatgatttaagttatcgtactaaataatacttca

SEQ ID NO: 126172 - DNA, 1848 bp, Glycine max
  Clone ID: PAT_MRT3847_84941C.1
ggtccggggaaagccacgttgaagcaggagagaactggcaagcctgggcgtacgcgtgagaaaccgcactgtacacctatttatatttatgacaaaccaagtgattcaaagacggccaagttcttggcctctttgaactttaacaaacccggtgcttagaatcatatcagactgagcacctcggtttatttacttgagtgaggagttttttctctgtttggggaagaagggaggtccaggactataaataagaagatggcaacctaacctggcggaagggaaaaaacttcttctgaaggtggataggcagtattttctgatcgcgggtggggacactggatcacacttccagatctggaagtttctaataactacttccctgctgagaatgtgatatgtgaagtaggatatggtgttggtcatgggagaaatttgattattggacccgaggtggcatttaagaaaattctgaataaattgggaccagctgaaaaagtatttagggtgtgattagatactacaatggatgtttggcataaaaatcttgtacgattacttggtcattgcgtagagggtgttcacaggttgctggtctatgaaaatgttaacataggtaacttaggacaaatagccacatgggactatgagccaaatagggacacttacctgggaagctcgcatgaaagtcattgctggggcagccaaagcgctagcttacttacatgaagcaatagacccgaaagtcgttcaccgggatataaagtcaagcaacatattgattgatactgatttcaatgcaaaggtttctgactttggtttggccaaacttttggattcaggagaaagtcacaaattcggctgaatcggctcgagatttggttatgtggcaccggaatatgctaatacaggtttgttaaatgagaggagtgacatttacagctttggtgttctcctgcttgaagcagttactggaagggatcctgtggactactcacgtccttctaacgaggtgaatcttgttgaatggctcaagatgatggtggggacaaggagaactgaggaagttgtcgactcaaggcttgaagtgaaaccatcaatacgtgctttaaagtgtgctcttctagttgctcttagatgtgttgatcccgaagcagaaaagaggcccaaaatgagtcaggttgtgaggatgcttgaagccgacgaatatccattccgagaggatcgaagaaatagaaagagccgcactgcaagtatggaaattgaatctctgaaggatatttctggtccatctgatgctgaaaagttgaaggggggttctgaaggccatgaaccagagacaactcaagggtaggattgacaaccatacttgacttgacttaaccagcttgtacaattggctgtttcgatttccgtaaccaatcaaatactatatatgttcaaagtttgtattgagattttttttccacatccgagaagagaatcaaatctaagaggagaatcaagttggaggtagctcatttggacaatgaagcattttctttttcaacatggttatttaaggatatgataatgatacacgaaatttgcaaggaggatgtagtcagggcgagtgcattagttaatgttgtacatacagatgtctgctgagccaatctcttccatacatgactgttaatttgctgccatttttgtctgcttgagagtggagatgatgaaaaactgatatttggcttcattgtagttgccgttttgctttaagttaatcattatgtataaactccaaaaagtattatgtgaagtgataatatcccttttacttttgcagtagttctgattttattatgttag

SEQ ID NO: 126173 - DNA, 661 bp, Glycine max
  unsure (1)..(661): unsure at all n locations
  Clone ID: PAT_MRT3847_84942C.1
agcncggaccacggctcgagccatcccatcccaacccaaacaaacaccaccctgaaccaccaccaaccagcgacccgaaccaccatcaaacaccaccgtcaccaaccaaaccaccaacgcaccatcggcacgccgcgcgatcttctctatcgacgcagacaacatctgctccgcctcccgctgcttcaagtgcagccttcaacgctaatgcgtaacccaagaagatgaaggtggcttgcgattagccaagatttgaaccaaaaatttccctttgaagaggcgaggaggtgccttgtgcggttacggcgtggcgttgccgaagtggtggcagcagcagcaagtgtttcatttctcttatgtcaaggtgctccagtactatattagctgatcaagaatggtgatggtagcaatgatgcactatagatttcttctttgtttccgccctattctgaaccgatgtcctttaggtcgttcagtgtcttcattgcaaaatcttgagcaggcagttagagcggaagtagaagccaaaaactatattaaaattcctgagcttctcatttcctcggatgcctgccaaatatcaaaacccttttctttcttttcttcatttcctcagaacataccagtgcaaattgttgatgaaatgctggcatctttaata

SEQ ID NO: 126174 - DNA, 586 bp, Glycine max
  Clone ID: PAT_MRT3847_84943C.1
agaaaaaaaatacatgtactaataccattatggcactgtgtggttcaaataaaataagattaaatacacgcatgtacacaaaaaaatataaatgaatggaacccaaaataagttcactgccataacatgaatcatagtgatacactttgtatcagaaataacttgattgaactagtagcagctccagcactgctaagacttttgcaactgtagacttcaatctagaatcactcctctgtgccatatcaataagaaccatctgggcgaattctgcatatttcattctgggttctttaatcctgaatattctctccaacatccatagcgctttttcttgaaccttcacatcacctgcttctaatacatttacaatagcttttacacctgacaatttggctatgtaattggcaccacctttccagaattcatttcgcaatagagttgaaagggcatttagagcagctttcactgcttcccaattcttatctttcaatatttggataaagggagaaacagcttctgccttgatcaaaacaaatgtgttgtttacaaaacaattaccatcatgaactttacaaatttcatt

SEQ ID NO: 126175 - DNA, 321 bp, Glycine max
  Clone ID: PAT_MRT3847_84944C.1
gcctcagttaacgaaaaaatcacgcgtaaagtacattaaataacatattgaattcaccagacttctaagatattctttttttttaggcaaaaacattgcgatgtatatgaccaggcgattggtccggttgttggtttaagtaaaaacaggacttattacatattgatggatcttaagccttctttctaaaaactaaagggaattaaggggcggtctcgtaccgattcgggaggaaatctatccgatttgcatgattaccatcgcgtgcatactaccgaatatttttactatatgccaacaaaattgaactgaatggcggta

SEQ ID NO: 126176 - DNA, 688 bp, Glycine max
  unsure (1)..(688): unsure at all n locations
  Clone ID: PAT_MRT3847_84945C.1
cccgggngaatcctctacgaatnncgacctgcaggtttcaaattcctcaactctagatttgtgttgttggccattaaagacatatgtgccaaaaaaatagaaaattagaaaagtagttctaaacttatatacagacaatttgtgacagtgaccactcatgtaaaagtcttctacttaataacactttgtttgatacaactgaaatagtcaggaaataaatgtggaccggaggaagaaactcaatagaatagaagttagggtgtgttgggttatgaagaagaaaaaagagacaatgaaactgaatagaaaaaaaagaaaaaaactgagattatcaagttgaagaaaaataaaatagaatataaaataatatttaaattgaaattgtttgatgatacaaagaggaaagggtataatattttttgaattccctgggttacacttcatttatattgctatgttaatatagtgtaacctgnggagtggtgtntggtattttcaattttattgaacaatacttgtacatagattggagtatctttgngtcctattcatataaatatatatcattacttttgctgattaaaaaaantaaagttgtttgtagaatagaaaaagagggtgattaattaatattanatgaaaaatatattattattttaattggaatcattacgaatttaattaaaat

SEQ ID NO: 126177 - DNA, 305 bp, Glycine max
  Clone ID: PAT_MRT3847_84946C.1
ccgctcgcgatctagaactagctgtttacagcctgcccaccctggaagcggctcagccggaggtagggtccagcggctggaaaaccaccggactccacgcgtcggggggcgccgcctaagtctcaggaccttgatccaggctgagcgtgttcgagactcgagcactgctcaattaatagatgtttcctagcgtcactcaagcacgttcaactggccgtccatcaacagtcttctagagtgggaagtccatggggttaccaaaattaatcgcattcgttcatatcactatttcacatgctggagca

SEQ ID NO: 126178 - DNA, 575 bp, Glycine max
  Clone ID: PAT_MRT3847_84947C.1
cactcttttttttatacataaaaataatcttgacttgatcattaagaactgggcggtaaatcaacagacaaaactgcgacttatatactgttcttgttttaaatattgtaagtataagacagatatacctcaacactagcagcttttattaattgtggtacagggcaaacattgataaatccctcacaatccttacacaggcacaggtgcctacaaggcattaacaacatggaatcagcctttgactggcatgctctgcatgtcaaatcctacgtatcttggtagcttttgcgagtagagttaataggagcgggcggattgttcaggaagtttttaggatctatatatgaggcaatctggttaaccgcactcttatgaaacccttgattgcattgtacaggtccttgtgagatgggctgctgaaggtggctcattaaagattagacagctgactgatgatactatgctatgtgatgccagctttgtgcttcaacagccacctgcttaattctttctgccaactgacctgctgttcgggcatgtagagtatttacacgtaattttccttaagcttt

SEQ ID NO: 126179 - DNA, 310 bp, Glycine max
  Clone ID: PAT_MRT3847_84948C.1
agtcgttgtcttgtctatggtttagagtcttttagcagatgagattccctcaaaggcaagtgtgtagttcataccatctcctatgactattacctcaagattgataacgtttggctgaaatatggcgtccaaatgcctaatattgcaactactttaataaacaatgcattacagtctgcatgattgaagtccttcatcaaagtcttcaaacttctgtataactttcaatattatcagtcgtttaagctgaattatctgcgacataaatctttaagaaaaggaaaagaaagtctacaaaaaaaaaaaaaaa

SEQ ID NO: 126180 - DNA, 678 bp, Glycine max
  Clone ID: PAT_MRT3847_84949C.1
tgcaacaaatgcaaaaataataatttctattaactcgaggtaaactttgtaaatatacttttccatgatgacctgttcaacaagttgaataaccttcatagtcattctcagactaatgacaaccattgaaacacaagggccaaaaaataaataaaattttaggatacaacacaagggccttttatgaaccttcttttaccttttgtcctctcccttaagcaggtcatttttatctctaccatggatttgatgtttattcagccataatagtaaataagcattgatagtttcagaaaaaaaggagtgaagttctgatatttacagaaaaaaaggcaagtgacaggacgtttcaaagcagatattcatcaaccactagtcactcgagttctctgttggcgttgaatcaaatatgcatatgtcccctcgacaaagtgggcataccctgtgaatctccttcagccacttgtctatacatgttctatgaaattcatgatggcacggtagtactcgcatgttgtctccatcctcatactccacaaggcatatatagcatatcactagcttcttagtaattggacaacaaatggacggccatggcattttaattggaaacaatggaggatttgattgtgtgcagcatcctcttgatgcttatgcaacttctcatataatttgaca

SEQ ID NO: 126181 - DNA, 452 bp, Glycine max
  Clone ID: PAT_MRT3847_8494C.1
aaaacaacacaatgtgacaattagtcgttgaatatttcacacattcataacacacgtctgagggatattacagctctatgatgaagggcacacaatcgcgttctacacaaaccgatcttattttcaagggacattattacggacccattatgcatatgagttcttcaaccgttgtgggaacacatacaacattacgacatcgagcttaatacctcccacggatactgacgacaaggttaagggaccatcacttatgaatggggaggcagaaagggtccttccattctcgagctagttgccaaacataatcaacctatgctgctcctgagggatgacttcctaggccagaatcttgaccttgacatgggaacggagcgctagctctgaacactggagggcaataacctcatccgcagaaggtttgactaaaatctacttaccacctctaatac

SEQ ID NO: 126182 - DNA, 190 bp, Glycine max
  Clone ID: PAT_MRT3847_84950C.1
ggaagctgatcacattccaacctggttgaaggcgtacactgatggacatgatgcaccatttgttaagtctgaacccatgcccgagactaacgatgaacctgtcaaagtggtagctggggccagtcttgatgacattggttgcaaatctgggaagaatgttgtgctggagtataatgctcaactggtgtgg

SEQ ID NO: 126183 - DNA, 134 bp, Glycine max
  Clone ID: PAT_MRT3847_84951C.1
aggacacgcacatgatcaccgcattaatcacgacagttattgatgctacgcgcagcgaggccgttacactctgcatcgcaatatcgcccgttcctatcgctgtctttgcatcctttcttgacacgatcatcggc

SEQ ID NO: 126184 - DNA, 193 bp, Glycine max
  Clone ID: PAT_MRT3847_84952C.1
acggctgcgagaagacgacagaaggggtacgtccgcgacacagcaaccaccttctgcgtacctcgtttgccgccgccgaccaccacaacgcaccttcaccttcacctcacctaaccgttcacaacgaaccaacaaacctgagacaatgccgcacgacaaccacacgaatgcatcaaccatcataacgcaaaaa

SEQ ID NO: 126185 - DNA, 579 bp, Glycine max
  Clone ID: PAT_MRT3847_84953C.1
aaacattctcctaaatccatggcaacccttcttgtccagcaccagtttcaagccaccgaagaaggacaagatgagtgatcatggtcgtgcaaaggcagcatctggttcaaggaatcgtttggaatccaagaatattgtcaatagaacttcctcctttaattacagaagcagctctgctgttccccttcatgagttgccatgggcttcctttgatcaatatcggctgcgaaagggaagagtaatccgatctatatttccagaaaaatcaacaagtcagctcctcaacagggaagagtggagagttaagatgactcccatccaagtcttgttcttaacatgtcaaccagtagctcacattacagctaaatgtatatctgaagcagatgattacccacccgagattcctggtcatatcaccaaattcttcgagattcaaattgtcctcgaaaattacgcggaggatatcaataatggatttgctgttggactgttagcaggttataactcgttcaaaaagaacaaggccaaatattcggggtaattttgcttgtagatatccattattcatgcatgaatcaa

SEQ ID NO: 126186 - DNA, 269 bp, Glycine max
  unsure (1)..(269): unsure at all n locations
  Clone ID: PAT_MRT3847_84954C.1
aaaaaaaacacaaacaaaacaaaaccatatatacaatcaaacgagttgctagcttcttcgatcgattgaccttcgtttgcgttcagtttcttattagatccttattacctgaaataataattactattcacaagttggacttgtggaataaatttctccacataaataatttttctgggatattattgtgttaattataatattcntggttggnttcgtgatggaatggtcttcaaactctgncacaaaggcgtacttgatacccttca

SEQ ID NO: 126187 - DNA, 571 bp, Glycine max
  Clone ID: PAT_MRT3847_84955C.1
cttatccatctttagttcagttactacttacgaaaccatcttctcttctcttctcttaaacccttcaaaaccccacgacgatgatgactactgctcccactacctctactttcttcttcctcctctcttctctcaatccccacccacctcgctccttcttcagacacaaaccactctttaacaacccctcccttctcctgcgccctcctttgaggtctcctcgacacttaacccgcgccgacatgacgacggcgacggcggcggccccgaccactacgagatggacgaggacgaaatggaggagctcgacaacaagaaggactttgacatcgagtacgaccccctcgtccccgccgccgccgcccgccgcctccgccgctgatgacaacatcgccttcgtcgagagcaagagcttcgtgtccacgcagggctgggactccgacacagtcctcgactacaaaatcaacgaggacgagttccacaagatctgcctggtcgattgcgacttcttcattcgcaagccccccgaccccgacaacgatgtctacgatttcagagagatgtatgttac

SEQ ID NO: 126188 - DNA, 710 bp, Glycine max
  Clone ID: PAT_MRT3847_84956C.1
cgatggcttgatcctctgagcggccgccctttttttttttttttttgcaccttatcacttctagcggtatgatatagataacatcaaaataatggggatccagggtccagagaattgatcatgcaaagaactagtatttcctacttaccaattgaaaagaagataagttgtgcaaatgacaaacagaaaacattgcaccttatcacttattctaccaacatggtgttaaataatggcgatccggtggttggagtattcaaaatcaactcaccaatgtatgttcctccttagttagtgggtttggatgctacctatagaaggaacatgcattcatgaaatgaaagcaacactagcctacctacagtaaaaaggatcccctaattcagaattcccaatgtcgatatagtcaaattaaataatcatcatatgattgcgtaacgaaaactccattttgcttgatttgtttgatttctcctccttcaaagtgtcacacttgggaacttgcaagatccataacttggatccttttgcggttttgagttgcaagcccatttgaagtaacaagtaccacccaccttcctaaactgcgcccaataagcgctaaaagcatagcttcgcgtgccagaaaaccgaatcgggtttaaaacacttccccttcggttggatccgatccgacgtgccatttccctgcgagcacgcgtacgcaagcg

SEQ ID NO: 126189 - DNA, 326 bp, Glycine max
  Clone ID: PAT_MRT3847_84957C.1
atagaagggcatggtcgtgagaagatgatacaagggtcgggagtaatcttgctataaagattactcgcgtttacacgcccgataaattatcccttaatatctttatcgctcacgatcggtcgcatagcggggagattagaactacgtattgtcgaagtcgaagctcccactcaacgcgattgcgggccgtacgcaaacaccgctgccccctgccaagtactcgttatgcccgtaatcatcaccatcaccacgcgctgggaacccaccgtcttgccgtccatctaaatacaacaccatcagttcccccggcccccccccaataagcc

SEQ ID NO: 126190 - DNA, 1368 bp, Glycine max
  Clone ID: PAT_MRT3847_84958C.1
ccacgcgtccggtttgacatcaagtcctggtgccaaaaggcagcaaagcagtgagacgatgatgactagctctagcttgttcttctcctcaccacccctctttctcaatccccacccacctcgctctttcctccccttcagacctctcaaaccactcttcaacccctctcttctcctccgccctccctccaaatctcgccacaaccctttcctaacccgcgccgacgatgacgacggcgacggcggcggccccgaccactacgagatggacgaggacgaaatggaggagctcgacaacaagaaggacttcgacatcgagtacgaccccctcgtccccgccgccgccgccgccgcttccgccgctggagacgacgacatcgccgtcgtcgagagcaagagcttcgtgtccacgcagggctggcactccgacaccgtcgtcgactacaaaatcaacgaggacgagttccacaagatttgcctggtcgattgcgacttcttcattcgcaagccccctgaccccgacaacgatgtctacgacttcagagagatgtatgttactcctccagatacagatgtttattcagttccccacgcgtccgctccaatgccgcagaagtacattagatgtgcgcagagtgattatggaagctacaatgtgacagagccacctattgatgcgccgcgagatcctctgtataaaactgagagggagatcctcaaggtgtacttgacaaaacactacaaaaatcgaaggaagggtgattctgagtttgtgcttgattttgaagagatttatgttattgattccaaatccaagtcaattaccagagccaaagttttggtaacagctcctggagggagaacaagagatagaaggagtgacttgcttgttatatctgatcgtgggagctccttcaaaataatacatgcgagtgaaaaagaggatccaacgactgtcatagaaaagcaggagtgggagcatagcagagaagaaatggagagacatcttagaaagctaagagacttcagcatttcaaattggttttgagtgataagaagatattctaagagtgcctcatgggtatacacagcatgacagggaggtcaaacttgagcacgtgctgaccggcaattagacttaacctttcatttttgaaatcgtgtgctggctgcttgatcatatgtatattttgttgtaacttattgaagatgcggctgttggaattcagaaatctattgtgagagtgacgagtgatctgccaatttgctgttgtgaactacagttgactgttatctggatatagtttggttttgccccaaactcttatcaaacctagtgaattaagaatagaatataatttcttcttc

SEQ ID NO: 126191 - DNA, 507 bp, Glycine max
  Clone ID: PAT_MRT3847_84959C.1
gctctattatgatttttttgagtgaaagactacaaggggaagataaaatgtaacgattagattgcttattactgtcacgttgagttctagcctcacggggttctaagatgaagcccctaagtttcaaggatgaggatcactatttaagttcaataccaaataatcacatatggaggctggccttacagcaaaagctactgaacactttgcttttaatagatcggaagcacttgtccttgatctacaggcagatgatggctctggtattaagacacatagatatatgtatacactgctataagaggggttaaaagttcatactgttaaacattggtgaccgtgttgttgcaaatggatagataaagacagagagtgctgcctaaacaaaggcgaactactactggtatatataacaagcgcctagaacgctcacatagtaggatatcactcagagggacaaatagtgatggtgattctcaagatcaacatgtttggcaggatcttacc

SEQ ID NO: 126192 - DNA, 449 bp, Glycine max
  Clone ID: PAT_MRT3847_8495C.1
ctcaccaaaatacacatctggaatataatcggcacatttaatcggcacattcacttttaaactccggtatataaagagcctgtggaggataccaaaaaagagagtttccagaatttctatgcacatgagcgcattctatctttctaaccaaaatatagtggcattttctaggatccctataaacacgtcctaccacatatggcctttaaaagaaggacaggtctctcccactatttgggtgtcaaatatttaaaaggttctactgctccatacataagtttgggagacacaaaatgactggagacaaacacaaacccatggtggatttctgggagcatcctttacctcatttactccaagaaatatgtttagcttccttggcaactcatcaatgtccggataaccatcaaaaagaacctccccatccttggcagttacaaaagcatgaa

SEQ ID NO: 126193 - DNA, 2803 bp, Glycine max
  unsure (1)..(2803): unsure at all n locations
  Clone ID: PAT_MRT3847_84960C.1
aagcaaacacccccggggagggaccaaaccgaaatacccaggacgacccacgcgaccgaggttctccgcagctctgattatgaacaagttagaccctgaaagacttggctacattgagctatggcaattggagacgattctgttacaaaaggatacgtatctctaaaaaaagaaggccctaagctacaccagtcaagctttgagccagaacctacaaggactaagggcgagaagtccgatacgtaggatgagccgcagaatgctgtactacttgcaagaaaattggcggagactttgggttttagcattgtggatttccgctatgattggactgtttaccttgaagttcatcgagtacaagagaaaaaatgcatataatatcatgggtaactgtctactaacggctaaaggtgcatctgataatctaaagtccaaaatggcacttctactcttgcgcgtgtgcagaaacaccgtaactgggctcaagtccaccatgttggcttgccttgcacctttcgttgataatatcaactttcataaaataattacggcggcagtaatgatcggtgttatacttcatgccgggaatcaccttgcttgtgattttcctagacttgtaagttcgtctgaaaaagattataagacgtatttggatggcgtatttggtgatcatagacccagttacggagacctcgttaaaggggttgaaggtgtgacaggaattctgatggtgattttgatggcaatagcatttactcttgcaacaaaatggttcaggagaaatctcattaagctgcctaaaccgtttaataggctcactggtttcaatgcgttctggtattctcaccatctatttgtgattgtctatgtcctgctcactattcatggtgtatatctttacctcgagcgcagatggcaccttcaaacggtatgcaatttgtagtatcatattccaattatttaggagcattatcagaggtttttctttccttgtcggttattggttacttgacacattgatctctgttttcagacatggatgtatcttgcagttccaattttactttatgcgggagaaagaacgctaagattcttccgttctggtttctatacagtccgtcttataaaggttgccatttatcctggaaatgttctgacattgcaaatatcgaagccctctcaatttcgttacaagagcggacaatacatgtttgtgcaatgtcctgctgtttctccatttgagtggcatccgttttcgattacctctgcccctgatgatgactacctgagtgttcacatacggcaactgggagattggacacaggagctcaaaagggtattctctgcggcctgtgaacctcccgtagctgggaagagcgggcttctcagggctgatgaaaccaccaagaagtgtttaccaaagctaaggatagatggaccttacggtgcgccagcacaagactacagaaactatgatgtcctgttacttgtcggtctcgggataggagcaacaccttttatcagcattctgaaagatcttctcaacaatattatcaaaatggaggagctggcggattcagtctctgattcaagtagaggttcagaccttagcactgggagtgcagattcaatatcttctaataagatttctcctaaacggaagaagacactgaagactacaaacgcttatttttactgggtaacaagagaacaaggttctttcgattggtttaaaggggtcatgaatgaagttgctgaacttgatcaaaggggtgttattgagatgcacaactacttaactagcgtatatgaggaaggcgatgccagatccgcccttattacaatggtacaagccctcaaccatgcaaaaaatggagttgatattgtttctgggactagggtgagaactcattttgccaggcctaactggaagaaggttttctcaagaatatgctctaagcactgcaatggacgaataggggttttctattgtggcgcaccggttttggccaaagaattaagcaagctctgcttcgagttcaacgaaaaaggtcaaacaaaatttgagttccacaaggagcatttctaagggaatttggagggagcttcatatctgtatctagaatcaacacaattaattttagcaactagtcgtagtcaattataagatatggttcaataagctaaaaccttaagtatagaatatgaggcattgtacatcccggccggccggcaagatggctgggcattgatcatacatgtggctgcagctcaaaggagatattgcccttacaaggctccagcaacttcagatacattctgccgaaccgcatagattattggccgatacatcccatagaaaatatacaacagttttgaaagtgataaaaaggaattagttagtgttctgcctcaggagcaatgcattggtttgtggataatttatttttttaaaaattatcgttttctaatatttattttaaaaaatatacttgaaaatgatttttttttttttaagtaaatgtcaacaaacatataccaaattttcgttttcttcgagtggattccattatctttgtggaatattgtgggtgaaactattgtttcgaccctgctgcttctgcttggatttcttctccgggagaaaaaaaaaagtctacncctgccatagatagactcttaatcgtatgttgactatgttctttttctttatgctttctttattgtcagtgtgattatgttacacaatacattttaagttattttttagtttttttattagatcaattattttattgttcaa

SEQ ID NO: 126194 - DNA, 493 bp, Glycine max
  Clone ID: PAT_MRT3847_84961C.1
cccccccccttaaaatataacatgggtttttggggtcaacccccccaaaaaactggggtaaaaaaaaattccataaacccctgaattttttatctctccccaaaggggggggtttccatcggggccggggggttgggaaccaaacggttttttgtttagggtgcaacccaagtttttggggaagcttgaccttcctttaagggtaaagcttgttttaaacccaaaagtttttttccaaagccttaatttgttccaaacttaaggaaccctttttttaaaaaggaggccccggtttttaaacacacccttttttgggggggccccccaaaaaaaaagggaaccccccgccaaacaagggggggggggtcccgggacaatgcccctttggggaaaaaaaaggaaaaattgtcttgggggccggggaaaaaactcagaccttaaaactctttctgagggggaaaaaggggatctttttgttgtggggagaaaaaca

SEQ ID NO: 126195 - DNA, 492 bp, Glycine max
  Clone ID: PAT_MRT3847_84962C.1
atgggaaagtagtaactctggtatgatatgtcgactctagatcgggaatagacatcctgaatataagctcacttacgatagagggaattgctgacaagagctatatatcaggcggtggttcacagtctgcaggggatgtatctgcaagggtagatcaggagactctccatagagtatttattcctgagttgagtcctataatagatctcttaggacagggaaggagtagcctagatggagaccattccgaaggttcattctcgcgaagaggagcacccttgctgtaggcaatatttactatcataaaaggattcaagcatgcctagcaggtgctgggagctcagtaccagaatctctcttgcttatctaaatatctgcatgcatgtgaccttacttccagagagatgaagaaggctagaatcctcgcactttggcgtatatgagggatgattacgatctagtctacatttcagaggatcagcaaatatttgt

SEQ ID NO: 126196 - DNA, 268 bp, Glycine max
  Clone ID: PAT_MRT3847_84963C.1
tacggctgcgagaagacgacagaagggggagtaccatatttgacacagtcatcatttcttttcctagctatggccttggaataacgatcaaggtcaagtagccatgccatatgggaaagttcttctgaagctagcacctcaggatcagtttggtttctgaaggtccaatgtttcaatgtaacacttccaacattgattttaagcgactcctggagggtctatgactgcatgcatcggatcattagctaagatttgcatgcttcgagac

SEQ ID NO: 126197 - DNA, 477 bp, Glycine max
  Clone ID: PAT_MRT3847_84964C.1
ccacgcgctcgtacggctgcgagaagacgacagaagggggattttatgtagtcatcatctagcagatccaaatctcgaaatcccctcaatttctggagaagattctccttcattaagtgaagcttcagcttcaagtccttttccattctcatcaaacctgcctggaaaagagataataaatatacgatacttctttctccgaagctactgttcctactcttctcttccactctcatcatcctcatcttcttcttcgcattcctcacctcacacccctcaaacccttcaaaccctaccttcaccgccttcaacacccgcctctccttcaatgccaggactgagggtaaggatgggttttttgtcgacgttggtgccaacgtaggtatggcgtccttcgccgcctccgctatggggtttcgggttctggctttcgagcctgtgttcgagaatttgcagaggatctgtgaaggggtttac

SEQ ID NO: 126198 - DNA, 423 bp, Glycine max
  unsure (1)..(423): unsure at all n locations
  Clone ID: PAT_MRT3847_84965C.1
tgttgttttttttttggttttttttttttttgggggttgcttttgtgttttcttcttgctggtcctcgaccctcttgtctctgtcgtctacgccaccgttctttccggcgtcgttgccctgtggggggggggattgttcctngaatctgcnnatcgagacctcttcgaccggggtgttgtcggaaacttgtncatattaggattgggctggttttcgtgctctgctggccgctgttcngtgctggtccttgggcctctttctttggtgctctcattccggtggtcggtntcttgtcgggtgcttggtgttggcctgggcctntgggggggtgaggcccccgggtttccgtggggcgatttggtgattgcggggaccttcttngggggcccctgtgttgtgccgccgccttttgcttggggcgc

SEQ ID NO: 126199 - DNA, 818 bp, Glycine max
  Clone ID: PAT_MRT3847_84966C.1
gcgtggctgcgaggacgacctcgagccggctcgagcggctcgagctaatcataatcacttccaattgctctcactagtcactactactactggagatggcttcaactgcctcttgcacttctatttccccttctagtgatggttgcctttgctggtgacttaaacaaagactttgacatcacttggggagatggccgcgccaagatactaaacaatggagagttactcactctttcattggacaaagcatctggttcaggttttcaatcaaagaatgagtatctctttgggaagattgacatgcagctcaagctcgtccctggaaactctgctggtaccgtcactgcctattatttatcttcaaaaggatctacttgggatgagatagactatgagtttcttggaaacttgagtggtgatccatacatccttcacacaaacgttttcagccaaggcaaaggggacagggaacaacaattctatctgtggtttgaccccactgctgatttccacacttactctatcacgtggaacccccagaggattatattctctgttgatggcactcccattagagagttcaagaacttagagcctattggggtccccttcccaaagaatcagccaatgaggatgtactctagtttgtggaatgctgatgactgggcaacaagaggtggccttgtgaagacagattggacacaagctccattcacagcttcctacagaaacttcaatgctgagacttgcatatggtcttctggagcatcttcttgcgctaaaacttcttctacacccaccactagcagtgggtcatg

SEQ ID NO: 126200 - DNA, 1200 bp, Glycine max
  Clone ID: PAT_MRT3847_84967C.1
gggacttaaacaaagactttgacatcacatggggagatggccgctccaagatactaatcactaatcactaccaattgctaaagatatttcactcactggtcacactactaatacagctttctggagatggcttcaactgtctcttacatgcttctacttccccttctagtgatggttgcctttgctggggacttaaacaaagactttgacatcacatggggagatggccgctccaagatactaaaccatggagagttactcactctttcattggacaaagcatctggctcaggttttcaatcaaagaatgagtatctctttgggaagattgacatgcagctcaagcttgtccctggaaactctgctggcaccgtcactgcctattatttatcttcaaaaggatcaacttgggatgaaatagactatgaatttcttggaaatctgagtggtgatccatacatccttcacacaaacgttttcagccaaggcaagggggacagggaacaacaattctatctatggtttgacccaactgctgatttccacacttactccatcatgtggaacccccagaggattatattctcagttgatggcactcccattagagagttcaagaactcggaggctattggggttcccttcccaaagaatcagccaatgaggatatattctagtttgtggaatgctgatgactgggcaacaagaggtggacttgtgaagacagattggacacaagctccgttcacagcttcctacagaaacttcaatgctgaggcttgcatatggtcttctggagcatcttcttgcgctaaaacttcttctacacccaccagtggcagtggttcatggctttcacaggaattggacgctacaggccatcagaggttgaagtgggtgcagaagaactacatgatttacaattattgcacagacactaagcgcttcccacagggtcttcctccagaatgcaacatctcttgagagaaaaacattgcaacgcattccttatattttctatgatcagaatgtcataccactaccagtattagttttattgttgtagctactgtagttaaattctttcatttgttcccctgtttggcatcactatgtaaacaaatatggccatttttataataaaataaattcttttgctatttttcgtaacaaaaaaaaaaaaaaaaaaaaaaccccaaa

SEQ ID NO: 126201 - DNA, 328 bp, Glycine max
  Clone ID: PAT_MRT3847_84968C.1
ctatgaacattcgaatacatttcattaatatatgaattcgttattcaaatgatataataagatattccgagcttctatttatgagactgcgaacgtgatcttcttctgttctgatgtgagcaaacagatgtgtcttacctgcccctgtaataagaagagcgccttctgctattgcattgcttgcgtctacaggacttttggctccccagcgaatggcttgtgagaaagtaagacggccttgaactggggtttattcctggttcagcatgcacgttactaaccaagagatttgcttacctgttcaatctctagtgaatcatgataacca

SEQ ID NO: 126202 - DNA, 479 bp, Glycine max
  Clone ID: PAT_MRT3847_84969C.1
cgtgaaattgaaggagtctccgttcactggacaacaagaaaagccatctgcactaatcacttatttgtacattggccacttcttagcaagatggggtgccagaatgtgggaattctctgttggcttatacatgatcaatatttggccagaatcgttgctgtacgcagcaatatatggtgcagttgaatctgccgctattgctgtgtttggtcccataattggaagatgggttgataagttgtcttgtgtgagggttttgaaattgtggttggtgacacaaaatctctcttttgttattgctgggggctccgtagttgccttacttgtccactcttctttgaagtctacaaatttctccattttcatcttgctggtgatcataatcaatgtctgtggcggcattggtgtgctttcaactcttgctggtgcaatattgattgaaagagaatgggaatatcctttaagctttggtgagaaaa

SEQ ID NO: 126203 - DNA, 751 bp, Glycine max
  Clone ID: PAT_MRT3847_8496C.1
cgcataatctcatgaaagggctattattcccacaaaactgatgtataacattcttttataaataaaacaccacatgaaatctgatactctaaaccaaatgctccaagttcctagagaaaatagggtacacaggtactaaaagaaagcgaaaaagatccggactacatatatctcccatcataaaatcccacagtaccataatgaaaaacatttataattataagaacaaaatgaaagagcacggacaacgctggaaggcttagaatttcctttttcgcccaatctttagtttctagaattttcaaattgtgaaaaatcatatgtttctgctcatgaatgcctaccaagccaagtgcaacttttatcatcacctgtcagaatgcatcaaatatatccactccagtcatgcgtataactatggcttctgtccagtcgtttggttatagcatttaagtgatgcaaattgtccagtactagcagtaagtcacacaatattaatgtacaacacagatggttttgccaatgaaatgcgtcctgatctcatggataataatagactaaaatgtatctgatacatttcatccacttggcataaaatagcaagacaggtgtgctcatgtatgtcgataagatggtcctagtctgcatcaccaagcccatcacttccatcaccccttttggatatgggagtaaaatttgaatttggtttcttcttctgagaagcaatttcagcattctttcgcaaaaccga

SEQ ID NO: 126204 - DNA, 349 bp, Glycine max
  Clone ID: PAT_MRT3847_84970C.1
aggtgatgaaatctacagagatgcatcattatcacttataccaaatgttccagcacaaatattgatgggagatatgctccatccacctccacctgcacatatctcttatgactgatttgttacgcagagcaccggaagacctatgtcactgacaacaacagcgaagatcctgactgatggaaacttcagttgcacaaacgagatctctagttgtactgaaaggacaatgaagtcattcccgcacatactcatgccgccaagaacatgagaagatggtaacaaggcggctaagggaccagaaggtttccactggcactagatgttgggagacaccggcatatccactgtt

SEQ ID NO: 126205 - DNA, 301 bp, Glycine max
  Clone ID: PAT_MRT3847_84971C.1
ctcaccattctattaatcagacttatactgaagatggccaatgtggaaactatgacaccgacctgcaggctaagctggatggcgaaggaaaaccaaatacaatatcttctagctgatcactgctggttcacaatgcaggactaatacttctagtgaagccttaactttctatgccgggaggaacctagaggactcacatgaattcattaccagatattatagcgccagcatctagtgcgacaacgcctaaccctatggcaacgtctgccagtacccacctaccctgagcatacttgaatgt

SEQ ID NO: 126206 - DNA, 574 bp, Glycine max
  Clone ID: PAT_MRT3847_84972C.1
aagaaatagtggtatacacctcactctagaaatttaagcttccacatcaggatgtggacaccatttttgacctttgtagctaatgggtggaacaatggtcttcaatcttgtctgttttccaagaaactatcattctttattagcaattacaatctgagcagcagattttgttagtgaactcaactagcaacatgtcagcagtgaatcatacaattcttaactatattatgtgcttcagctattctaattctagtcctgcgcatgtggtcagtaatatgatcacaaaaagcaaatttcattctagtgttagtttgagaaaaattatcttttatgaataactttactaaagtcgagtttaacatgtttttaagctattttataacttattttgattagtttataaagttgtttggccaaaataaaagtgtttaataaatgaatttagtttattaccttataaaaaaaaattataccatttgaaataatatttgaccttataacttataggttttttaccctcaatttaataaagatctttacttactctattaataaaaattgtcctatataatgc

SEQ ID NO: 126207 - DNA, 354 bp, Glycine max
  unsure (1)..(354): unsure at all n locations
  Clone ID: PAT_MRT3847_84973C.1
gttgtctttatactctgagcagatgctcgagtgttacaaaaatggaattgaataactagattgtagggggagacaacatgaatttctagctagctagtcgttcttttggtttctaaacttaatctattatttgtggggtcctatatattttgacatgaaataataggatcttggccaagtcaaagaggaagagaaagctaatgatgtgagttcatttcttgaacataatggttgacctgatttgtgctactcttggagaaagaaaatggcaatggtggttggagaaaaatgaagcttcctgcctcnnnattctttgaggacaaacttttgaagtagcttgttaagcattctttc

SEQ ID NO: 126208 - DNA, 534 bp, Glycine max
  Clone ID: PAT_MRT3847_84974C.1
ggaaaacaaacaggagtaacattaaggggacaaaagagtttaacccaaaccaaacttattttcaaagggtattacaaacccattaaacataacatttttttttaaaatgttggggaaaatccaacattgaacttcaaacaaaaatcagttccagcttaaaaccccccacgaaaacccaaccccaagggcaggggtgactccttcgggatgttggaaaaagggggggcccttccattctttaggtggtggccagaaaaaataaacctttgtgggcccggggggaatccttccttggccgggatcttcgccttaaaattgaaaagggtgccggagtcttccacctcgggggtaataattttacccggaagggtcttaacaaaaatttgcttacccccacaaaaaccccaccccagggggagaggtgccctccttctggatgttggaaccagcaagggtacccccgtcctcgaacttgattgcccggcaaaaaaaacccctttgttggtttgggggaaaacccctccttggcctggg

SEQ ID NO: 126209 - DNA, 715 bp, Glycine max
  Clone ID: PAT_MRT3847_84975C.1
acgagatgaattccactccattgcttccaaaaccccaactttattccttccaatttgttttttttgggtaggagggtgggatgtgattgaaccaaaataagtttccattccatcataatatatccaaacaatggagttgtaagtttttttccattcccttctattcctttccacttcgcttactatttgtcatccaaacatagggaaaactacttgctacttttatttgttaaccagatcaatatgcctcatttttgtgtgtaatataatctttcttaatttagagatcatgtgattgtctctatttttcttcacaggcaaccctatctcttgctatggacattcttttatctgatgagaatggtttagtagacattcagcagggagttggccgccttataaatgctatagttactgttcttggtcctgagcttgccccacgaagcatctttttctcacgctccaaggtgaatttttctagtatttttaaaataaaaatagaaacttattaagaagaaagagaaaataattataatatataaagaatttccaggataaatgatcctccttaatgtaaaaggaaaacacaaatgagaaatattagaaaagaaaatcaatggctggatcttgtattgcttcctgttggggaggtttttgtaggctttattctttagcctaagcctatggctttcttttgtatctttgtagtacctct

SEQ ID NO: 126210 - DNA, 125 bp, Glycine max
  Clone ID: PAT_MRT3847_84976C.1
tatagagaccaagccattctccatcttttctgcttgatatattcatatcatatgtctcgccgtattatgtgactatcatgtgagaaagcttcatgttcgaacgcgactgatttcaaacgacatca

SEQ ID NO: 126211 - DNA, 182 bp, Glycine max
  Clone ID: PAT_MRT3847_84977C.1
gtagaaaaagtaaaagcaaaacatgattgaattaatataccttatgttattacatagggatgtttccttataagaaagcgccaaaaagctttctccttacaactgccaggtcatattatagcattacatcacaggaagctagagactttcacacaaacaggaaccaattatgcacatggact

SEQ ID NO: 126212 - DNA, 1094 bp, Glycine max
  Clone ID: PAT_MRT3847_84978C.1
ctctattcggctcgaacatgcacacaaagtaatggacaaaaaaccatgcaactcatcatctcatgatcctgaagtgagaaagggaccatggaccatggaagaagacttgatcttgataaactatattgcaaatcacggtgaaggtgtttggaactccttagccaaagcttctggtctcaaacgaacgggaaagagttgtcgactccgttggctaaactaccttcgtcctgatgttagaagaggaaacattacacccgaggaacagcttttgatcatagaacttcatgcaaagtggggcaataggtggtccaaaattgcaaagcatcttccaggaagaactgacaatgagattaagaacttctggagaacaaggatccaaaagcacattaagcaagctgagacttcacaacaacatggtaattcagagaataatgatcatcaagcaagcactagtactagcaaagtgtccaccatggcacatccaaatgagactttctctccaccctcataccaaggaacttttgagccattccaacctcaattccctacaatcactgatcaatcaagttgttgtaccaccaccaacgacaacaacaactattggagcatcgaggatatctggtcgtctatgcaattactcaatggagattaaacctagctatatgcatgcctatataaatcatatatatgatgatatataaacctaagctcttgtagagtgtgttcaggcttaataacatcattaggtctgtttatatgagtagtctaagtttggtgtttgtaatgcatgatgtgagttaagaattaatttagttatggattgaaatatatagtaacttatatactacatgtgcattctcctattatcgtaaataatatggttgttgtaccatatattatcagtgacgggcatgctcgtattttagtaaatcggtataaataattgctttgtctcaaaaaatatttgagaactgcaaaatttgaagcataagatatatatattatcagtgacgggcatgctcgtagttttagtaaaaaaaaaaaaaaaaaaaaaaaaaaaaaaaaaaaaaaaaaaaaaaaaaaaaaaaaaaaaa

SEQ ID NO: 126213 - DNA, 281 bp, Glycine max
  Clone ID: PAT_MRT3847_84979C.1
gggttggtagatggaggcactagtggaagtgtgttaactcgcagatgttcggattgaggtcgcactgaagtgcaaatgtctaggcacgggtcggattcggacgctaacccagaccacaccagttggcttcaagatctgaacctcatcagcgaacgaattcctagtcaactcgcccagtggactcatgctacctctatcctccgccagcttccaagtcattctaaagccacagtccgacctgcctcactgctaccctcgctccccctcggatcgtttcctag

SEQ ID NO: 126214 - DNA, 473 bp, Glycine max
  Clone ID: PAT_MRT3847_8497C.1
atatttttttttttttttttttttttttttgtgtttttttttattttttttggttttttttttttttttttttggaaaaggggaaaactttttgcttgccaaaaaaaattttttggggggggggaaaatttttacctttaaaaaaaaaaagtggtttttgttcccccttttggcacccctacttaaaataaaccttttaaccgggcaaaaatgggggggctttaaaaaaaaggggaaaagggaacccacttttccccggtttcccctcctaaaccaaaaattttttggtccggtcccttttaaggggggagaacaaaggccctaaattgggaaacccctttttaaaaaccggggttaaaaaaagcctaagggggtttgggtgggcaaacccaagatgtggggggcattgttccttctttgccaaaagaatttccttccccaaacttactttaaagggttgacacaccccccgg

SEQ ID NO: 126215 - DNA, 505 bp, Glycine max
  Clone ID: PAT_MRT3847_84980C.1
gtgtccacaatggcacatccaaatgagactttctctccgccctcataccaagcaacttttgagccatttcaacctcaattccctcgaatcaatgatcaatcaagttgttgtaccagcaacagcaactattggagcatcgaggatatctggtcgtctatgcaattactcaatggagattaattaaatctagctatatgcatgcttatataaatcatatatgtgatgatatataaacctaagctcttatagagtgtgttcaggcttaataacatcattaggtctgtttatatgagtagtttaagtttggtgttgtcatgcataatgtgagttatatgcattatgtgagttaagaattaacttagttatggattgcctataaaaaaaagttagttatgaattgaaatatatagtaacttatatactacatgggcattttcttattgtcgtaaataaaatggttggtggcccaaataagatatatttgagaactgcaaaatttgtcgcc

SEQ ID NO: 126216 - DNA, 105 bp, Glycine max
  Clone ID: PAT_MRT3847_84981C.1
ggcttattcacgcaactaaataagaaatgaagagtactaacttccttgctccccttcgaagttggggcttcaacaatctaaaactggctttaagcaacggccaat

SEQ ID NO: 126217 - DNA, 446 bp, Glycine max
  Clone ID: PAT_MRT3847_84982C.1
tccgttccaggaaggtttcccgtcatcactgtatgacgtcctccttctttggggggggggggggggtatattaaaccagtgcaggtaggaaaactaagacaggtggtataattatatattatgtatggcatagagagcccaatatagatagaagttagagcctaggatggacccgcccctagggtggatggggagggaacgtataaatagaataaccctaccaaccaaaattataaaaggaaaatcaacagtagagacctgccgaagaagaataataatatacgtaatagaaaaattatagcgtacggcgccgacgccgtagtggtggtacaggccaaattttgtaacgagccaacccaaaatcggcagtggcacgagcgcggaatctctgaaattcggggttggcaatagttatggttacggtgtggtccgttgtgtggggttat

SEQ ID NO: 126218 - DNA, 336 bp, Glycine max
  Clone ID: PAT_MRT3847_84983C.1
cccacacgtccggttggagggcactcaacttaacagcactggggagcgggacagccccggcgtgcatcagctgcgggagtgccagcacctatgcaaaccacaacaatatataacgtgcgacacaagctataacggcaggctgaagaacatacagcatgtgactacataacattcaaatgggcgagtacactgatgaaaaagacaattcatacgaccatgggagaccgcacgctgaaaatcatgacaaaactaaaactgtgactcataaatgcacaaacaaatagggcatgtttaatgaaaaacatgttgatgaaagactaatgaagaacaaacatc

SEQ ID NO: 126219 - DNA, 267 bp, Glycine max
  Clone ID: PAT_MRT3847_84984C.1
gccccgagtaagaaaagaaagaaaaagtcacctttgctttacttgttgaacaaaagggtcctcgaaaaccgatacaaaaaggggttttttttcccaaatgggggtcagcaaaaaagggggaggagaaagcaaaagcccattatcattatcggggatttgcgatactgggaaaactgattaacttaaaaaaccggcctataaccaaccccaaaagagggcccctctccttttcaccacccttggaccttaaataaatttaacccaccc

SEQ ID NO: 126220 - DNA, 214 bp, Glycine max
  unsure (1)..(214): unsure at all n locations
  Clone ID: PAT_MRT3847_84985C.1
attgatcatctactangaangaatctcatttaaaatcttacagttttaaaggtttcaaatttatttttttagccactatgaaatcctacttacatagataatgtacacgtcattttatcggaagacttgactgtgcatccaagaaaatatttcatctgctacggaattatccctaatattgttcactgtcatttgctccaaacaatctcatttc

SEQ ID NO: 126221 - DNA, 163 bp, Glycine max
  Clone ID: PAT_MRT3847_84986C.1
tattggaatacctgctgtcatgcttccacaagatgctggtgaagacttgaaaaatcacatactaaacaattcaccactgtcggtgcagatgtattctccactgcgtccattggctgatgctgcacaagtgcttttatggcttatggctgcctctaccattctc

SEQ ID NO: 126222 - DNA, 375 bp, Glycine max
  unsure (1)..(375): unsure at all n locations
  Clone ID: PAT_MRT3847_84987C.1
ttaaaaaaatttttaaaaaaacaaacctgcaaacccaccgtcctttttatacacttttgtccccccccaacnacaccaaaagagcattctttcctattttatttaacctaacatataatacattaagaaaaaagcaaacctttttatcatgtaattcataatcagacagcggtatcttgcaattatatgacattaaaggttccataactttactgcacgcagactatcaataacttaaggcttattccctaaacgtaatccaaattctcactcaaaattgcctatagctactatatgtctgctccatacaatgctcataaaaattctcctataatccctgatacatactcacaaccattttctacctacaattca

SEQ ID NO: 126223 - DNA, 269 bp, Glycine max
  Clone ID: PAT_MRT3847_84988C.1
atttgattctgcagtcagaataatggctacttatttcttcttcagtaatgactaaatggttctttcattgtatgctgcatgatggattacttatttacttgacactaatttcataaaaaggaacttggcttctgagtatgccatagttgccatcctactcctacctgcatttttatgaaaacttggagctttgctgcttctgtgtaatgaaaagctaggatgctttgaactctgttggagtggttatactgaaatttttcatactatgc

SEQ ID NO: 126224 - DNA, 267 bp, Glycine max
  Clone ID: PAT_MRT3847_84989C.1
catacactctcatagctgtagcggcgacactaagatcggagaaagaatggcgaaaacgacgtctctgctgctctttaaaatgctcctcttcggatccctagctctgatccatgcggcgaaatcgtcataggatttgacggacgtgaaccacaaggtttactatgacgttgagattaatggaaaagatgcaggtcgtattgtaattggtgcctatgggaaggctgttccataaactgcagataactatccagcactttgcaccagggg

SEQ ID NO: 126225 - DNA, 278 bp, Glycine max
  unsure (1)..(278): unsure at all n locations
  Clone ID: PAT_MRT3847_8498C.1
nccgtcgcatgcncgcgtacgtncagctcgganttcggctcgagnagtnncacancnnnnnnntactttncnttaanttnaagccacagccntnnttanctttgtntgataattcttgccnttagcntggannannttctcngaattgnanatcgcgcanacgcacaggatctgaagtcgnagcgtnncgtgcggcatattgtggtggtnacggttgtacgccgaacttanatgcccgngaggtccccgtcaganggggcgntgnacgcnntgcannc

SEQ ID NO: 126226 - DNA, 718 bp, Glycine max
  unsure (1)..(718): unsure at all n locations
  Clone ID: PAT_MRT3847_84990C.1
ccgagcttatgattcaaattttnnttnaatcgctgatctcaaaatttgaaagaaagcgttatttggcaaaacctgaaaacagtgcataggagaaaaaacaaaagttacctcctaaacttatagcacgcaaatccaacggaaaatttaaacattatgggaagaaaacgaaatcatgctagcacttttgcattttgccaaaagattctatgacccccctttgatcaggttcagagcaacctcctctttgggaagggccggaattgctaccttttgggtagtagtaatagctccacatgcatttgcaaactttagtacttctcttaaccttgggtcatcttcaagtatggactgatcatcgacaatcttggccaataaagcaccaacaaaggaatcaccggcaccagttgtatcaactgtattgacatggaaagcatctaccgatcctttgaaactcttggtgtagtatctggaaccatgttccccaagnngaactcaagctccgcatcactgaccttgatcaaatcagccttctcccaaatgctcagtatttgcttacgagcttcctcagccgnnnnccacaaaggtagacgnnnnntggggtcatannnnngcaagcacccagattccttggctacnnncattgccttcaagtgtgctgatctgcatgnntccacgatcaaactgattgatccgtaatggaaaacnttngcagatctga

SEQ ID NO: 126227 - DNA, 221 bp, Glycine max
  Clone ID: PAT_MRT3847_84991C.1
gagagaggctgaaagttttataaattaaattaaaacagaaggcatatgaataataaataatcagggactcgagggttgggcaccacgaaaaacttagcttggatttaatttcatcgctcctttttaatttcacttattaagtaaaacaaaaaggaattccgaccctaatatttggcggttcctccaaggggatagaatcacacaaaattttttttaaaggg

SEQ ID NO: 126228 - DNA, 243 bp, Glycine max
  Clone ID: PAT_MRT3847_84992C.1
aggatatgggccatcaaccaaaaaaattcgaactccagtagcggatatttaagttgttgaggtgaaactgcgcttcaaagcacggcggcttggacataaatggccggccaggacttatacacatcatctttaccgtctttggtgccatgctctgaggctacacactagcataactcatggtgcgggacagtgacatcatacaaacccacaggctaaatgccagtccaccctattattacatga

SEQ ID NO: 126229 - DNA, 2036 bp, Glycine max
  Clone ID: PAT_MRT3847_84993C.1
agatcccttctatataatctccaccaaacccctcttttactctcctctctcctctctcgaaaacagtgttccaaaatccaaacacactctctctccccatggcgttgaacaatggcgtccccgccaccggcaccggcctcatcgtcagcttcggtgagatgctcatcgacttcgtccccaccgtctctggcgtgtccctggccgaggcccctggcttcctcaaggcccccggcggcgcccccgctaacgtcgccatcgccgtgtcgcgcctcggcggcaaagccgccttcgtcggcaagctcggcgacgacgagttcggccacatgctcgccggaatcctcaaggaaaacggcgttcgcgccgacggcatcaactttgaccagggcgcacgcaccgccctggccttcgtgaccctacgcgccgacggggagcgtgagttcatgttctacagaaaccccagcgccgacatgctcctcaagcccgaagaactcaatctcgaactcatcagatctgcaaaagttttccattacggatcaatcagtttgatcgtggagccatgcagatcagcacacttgaaggcaatggaagtagccaaggaatctgggtgcttgctctcctatgaccccaaccttcgtctacctttgtggccttcggctgaggaagctcgtaagcaaatactgagcatttgggagaaggctgatttgatcaaggtcagtgatgcggagcttgagttcctcacaggaagtgacaagattgatgatgaatctgctttgtcattgtggcaccccaatttgaagttgctccttgtcactcttggggaacatggttccagatactacaccaagagtttcaaaggatcggtagatgctttccatgtcaatacagttgatacaactggtgccggtgattcctttgttggtgctttattggccaagattgtcgatgatcagtccatacttgaagatgaaccaaggttaagagaagtactaaagtttgcaaatgcatgtggagctattacaactacccaaaagggagcaattccggcccttcccaaagaggaggctgcactgaaactgatcaaaggggggtcatagaatcttttggcaaaatgcaaaagtgctagcatgatttcgttttcttcccctaatgtttaaattttccgttggatttgcttgctataagtttaggagggaacttttgttttttctcctatgcactgttttcaggttttgccaaataacgctttctttcaaattttgagattagcgattgaatgaaaatttgaatcataaaaaaaaaaaaaaaaaaaaaaactcgagactagtctctctctcattgaacattacactgtttcaattaaaaacatcactcatactaactatcacaaaaataccactcgcaaataacctttcatggtataaagaaaatcatctaggttaacacataaagcctattgggtaaacatagcagctcgtccagtcaaagcctcaaaaggagcaattgccacgactcaagaagcccatcatatcgattatgaatttatcataccgattatgaatttttcagattaaaagcttctcaatagcatcctttagttgctgaatttgagatttcaattgactcccttcatcagttgtcacagaacaagcaatcactggcctggtgaccccacatgcacgtccaagtgcttgttttgaagggacaaacacgtagggcacattcttatcctcagcaagtagaggaagatgtagaagaatctcaaggggctcagtatcagcagccatcacaacaaattcagagatacccctgttcagggttttagtggcttcattagcaccttttttgagctgcttgtagttggcagcttgttgaacaaggtctagtatggttattgagagttgggcatccgccaaagggtaagctttggggttcactgcttctcctgtcattgttgatcgaacggaggaagggggagtggactagctagggtttttccttcgtgcagaacgtccccttctgtcgtcttctcgcagccg

SEQ ID NO: 126230 - DNA, 852 bp, Glycine max
  Clone ID: PAT_MRT3847_84994C.1
gttttttttttttttttttttttgttttttttttttttttttttttttttttttgtagcaatcagtgcagccaccactgtattgtgacgtttttaattttgtatgttgagtagataaagtattcaggtactctattacacttctcagataacaaccaacataaaattgcattgaacaatacactgtttcaatttaagacatcactcatactcatcacaaaaataccactcgcaaataacctttaatggtataaaagaaaatcaacttaggtttacataaaccctattgggtaaccaaaacagctcgtccagtcaaagcctcagaaggagcaattggcacagctcaagaagcccatcataccgattttaattttttcagatcaaaagcttctcaatagcatcctttagttgctggatttgagatttcaattgactcccttcattagttgtcacagaacaagcaatcactggcctggtgaccccacatgcacgcccaagtgcttgttttgaagggacaaacacgtagggcacattcttatcctcggcgagtagaggaagatggagaagaatttcaaggggttcagtatcagcagccatgacaacaaattcagagatacctctgttcagggttttagtggcttcattagcaccttttttgagctgcttgtagttggcagcttgttgaacaagatctagtatggttattgagagttgggcatcggccaaagggtaagctttggggttcactgtctctcctgtcattgttgatcgaacggaagctagggtttttccttcgtgcagaacgagaatacacaactgagccgtcccctgctgtcgtcttctcgcagccgta

SEQ ID NO: 126231 - DNA, 1269 bp, Glycine max
  Clone ID: PAT_MRT3847_84995C.1
acgagccaaaatccaaacacacactctctcccccatggcgttgaacaatggcgtccccgccactggcaccggcctcatcgttagcttcggcgagatgctcatcgacttcgtccccaccgtctccggcgtgtccctggccgaggcccctggcttcctcaaggcccccggcggcgccccagccaacgtcgccatcgccgtgtcgcgactcggcggcaaagccgccttcgtcggcaaactcggggacgacgagttcggccacatgctcgccggaatcctcaaggagaacggtgtccgcgccgacggcatcaccttcgaccagggtgcacgcaccgcgctggccttcgtgaccctacgcgccgacggggagcgtgagttcatgttctaccggaaccccagcgccgacatgctcctcaagcccgaagaactcaaccttgaactcatcagatctgcaaaagttttccattacggatcaataagtttgatcgtggagccatgcagatcagcacacttgaaggcaatggaagttgccaaggaagctgggtgcctgctctcctatgaccccaaccttcggctaccattgtggccttcgcctgaggaagctcgtaagcaaatactcagcatttgggagaaggctgatttgatcaaggtcagtgatgtggagcttgagttcctcaccggaagtgacaagattgatgatgaatctgctttgtcattgtggcaccccaatttgaagttgctccttgtcactcttggagaacatggttccagatactacaccgagaatttcaaaggatcagtagatgcttttcatgttaatacagttgatacaactggtgccggtgattcctttgttggtgctctattgtccaagattgtcgatgatcagtccattcttgaagatgaaccaaggttaagagaagtactcaagtatgcaaatgcatgtggagcaattacaactacccaaaagggagcaattcccgcccttcccaaagaggaggatgcactgaaactgatcaaaggcgcatagaatcttttgacaaaaatgctagcatgatttcgttttcttcctctaatgtttcaattttccgttggatttgcttgctatcaatttaggagggaatgcctcttgattttctttggtattttttgtttttttttctcctatgcactgttttcaggttttaccaaaataacgctttctttcaaattttgagattgacgattgaatgaaaatttgaattataagctcggcccatagttgcaacttag

SEQ ID NO: 126232 - DNA, 1569 bp, Glycine max
  Clone ID: PAT_MRT3847_84996C.1
atggcgaacgtggatgaacttttatcttccttaatctcagacgtccacgcctacaccggcaaagaccctcttcttccatggcttcgcgcgatccgaaaggtgaaggacactcttcctcccaaaaccctaaaggaaaagttacccgcgttcctgcagaaatgcgcacacaccttcgagctcgatcggcgttacagaaacgacatgcgctatcttcgggtttggctccacctgatggattttgtggatgatccaaaaacacttttgagaacgatggagactaatcacattgggacaaaacgttgtgaattctaccaagcgtatgctctttactacgagaaaagcaagaagagcgatgaggcagagaaaatgtaccatctgggagtgaagaaccttgcagagcctctagataaattgcagaaatcatatgaacaatttcttcaacggatggagcgaaaaaataataagagaatccagcatcaggaagcaaaagcttccaggaggcctctgtctttaaagagcttcccttctcttgacaacaaaactgagggaagcaaaagcaatggagtagactgtgttgagggtgtgcaaaagggaccccgaattgataattatgcagctaaaggtgtggctgatgataaaaacataaagactaagaaggatgagcgcaagagattttgtggtgatgatacagttgtagtcaagtttgttgacactgccatggttggaaagtctgaagcagaagatgcatgccatcatggattagtggatcctacaataaatatgaaggaggccatgaatgccattaacagcatgttccgggagccattggagactgttccattaggcaagaaatcacataaaaaccattcaaaagaagatcgtagtacaaagaacgagtttgaggttttggttgatgaaaacttggacaatggaatcaaaccatccggttccttgtcacttcggaacaggactgaagctagccaacctcaccaagaaccgctccagatatacattgatgatgaagagacttctgagaccagtgatgtgaatttgtttgaaggtggttgtacttcatcggcttcacaaccaaatggctttgtttttctacgctccaaggatattccttctaaaaaatctagtgatatggatgctgatagcgatcgtaattcaaagttcagagaggatacagtcgtttgcagatttgttggttccgccattttggatgaaccagaggtggaaaatgtttgccaccacggtttagtagaccccaccatcaacttgaaagaagctatggatgacataaataacatgtttgggaagccaatagattttgttaggagaagaaccaccaccaagcaggagaaggcccaccagagcattaggggaaatgacattggtgggttttcaatccttgctgatgatgagctccaggaacaagaagttccacctccaccaccaccaaaattgctaggaaagtccaaggaatctgatttgtttgagccaactatcctcacaaaggaagccatagatgatataaacaagatgtttaacatgcctctggatttttag

SEQ ID NO: 126233 - DNA, 1844 bp, Glycine max
  unsure (1)..(1844): unsure at all n locations
  Clone ID: PAT_MRT3847_84997C.1
ctaaaattcaaatcaggaccaccgcgacgacaaccgtttccgccaccgcagattcagaaatggcgaacgtggatgaacttttatcttccttaatctcagacgtccacgcctacaccggcaaagaccctcttcttccatggcttcggtaccctttaattcccactctctctccattcctctgttttccacttcacttttcggtttcctcactcattcccaactttacttgcagcgcgatccgaaaggtgaaggacactcttcctcccaaaaccctaaaggaaaagttacccgcgttcctgcagaaatgcgcacacaccttcgagctcgatcggcgttacagaaacgacatgcgctatcttcgggtttggctccacctgatggattttgtggatgatccaaaaacacttttgagaacgatggagactaatcacattgggacaaaacgttgtgaattctaccaagcgtatgctctttactacgagaaaagcaagaagagcgatgaggcagagaaaatgtaccatctgggagtgaagaaccttgcagagcctctagataaattgcagaaatcatatgaacaatttcttcaacggatggagcgaaaaaataataagagaatccagcatcaggaagcaaaagcttccaggaggcctctgtctttaaagagcttcccttctcttgacaacaaaactgagggaagcaaaagcaatggagtagactgtgttgagggtgtgcaaaagggaccccgaattgataattatgcagctaaaggtgtggctgatgataaaaacataaagactaagaaggatgagcgcaagagattttgtggtgatgatacagttgtagtcaagtttgttgacactgccatggttggaaagtctgaagcagaagatgcatgccatcatggattagtggatcctacaataaatatgaaggaggccatgaatgccattaacagcatgttccgggagccattggagactgttccattaggcaagaaatcacataaaaaccattcaaaagaagatcgtagtacaaagaacgagtttgaggttttggttgatgaaaacttggacaatggaatcaaaccatccggttccttgtcacttcggaacaggactgaagctagccaacctcaccaagaaccgctccagatatacattgatgatgaagagacttctgagaccagtgatgtgaatttgtttgaaggtggttgtacttcatcggcttcacaaccaaatggctttgtttttctacgctccaaggatattccttctaaaaaatctagtgatatggatgctgatagcgatcgtaattcaaagttcagagaggatacagtcgtttgcagatttgttggttccgccattttggatgaaccagaggtggaaaatgtttgccaccacggtttagtagaccccaccatcaaaattcggctcgagctggatgcgctcgagccgatgtttgggaagccaatagattttgttaggagaagaaccaccaccaagcaggagaaggcccaccagagcattaggggaaatgacattggtgggttttcaatccttgctgatgatgagctccaggaacaagaagttccacctccaccaccaccaaaattgctaggaaagtccaaggaatctgatttgtttgagccaactatcctcacaaaggaagccatagacgatataaacaagatgtttaacatgcctctggatttttaggaataaggtgattgctgagtgcctattctgatttctgatatgtaagcagaatttgattttatgtgaggtattcgaatgaaaggtttcggttgtcctttttctactgnnnaaaaaaaaaanaanaatttt

SEQ ID NO: 126234 - DNA, 290 bp, Glycine max
  Clone ID: PAT_MRT3847_84998C.1
cctaggaaaacggccgggggccttttggtttttccagtttaccgttaaaaaaaaaatttttccctttttccaaaaaataaaaaaaaaaggtccggggcccccccctttaaagttcaagggcccccccaagggaaactttccttccttaaaaaaaaattttaattgttgatttggggctttaaggttttcctttaaccctttgattgagggatcccagccctttcttaaaaaaaatctttttaattaaaatccggggaaaaaccctgaacctttttaagaatttttttggc

SEQ ID NO: 126235 - DNA, 352 bp, Glycine max
  unsure (1)..(352): unsure at all n locations
  Clone ID: PAT_MRT3847_84999C.1
agaaaaagcaatgatggtatggataaatcatggacatagaggcgtcagatttcggtaggcgcgacaaggaatcagctgcttggttatgactgtcggagcggtattaaatctcgtagtcgtatcccaataacctggccaagtacatatgttgctcaggtgtctggattacctgagtcaacagttcctttaagctcttatgatcagtgatgatgacaaaatggtggccaagcaagtattgcctccacttcttaacggtggtagtgatggcacataagtcacgaacatacgcntaggcacccaagagtttggggggaaacgtcttgctgaagaaggcgatcggatgccccttttg

SEQ ID NO: 126236 - DNA, 235 bp, Glycine max
  Clone ID: PAT_MRT3847_8499C.1
gcctccttcagccacacagagttattagtcgctatctaaaccggcttcaaagccaaatctatagttctcgaggtcttgacgctcaagaaacacaaagtactcttcctcgcattctgaaccaagtacatgatatcgccatgggtcctttaccccaaaatttttacctgtttcgccttttttgtagtgcaaatcatatacccttccctcttattaacagtggcaagattaccctgct

SEQ ID NO: 126237 - DNA, 131 bp, Glycine max
  Clone ID: PAT_MRT3847_849C.1
gttatatagaagtactcagcttcagtttaatcggcacatcacactcacatctatcgaagttgataattccacgtcttgtgcccccaccacggctttgccaacagcaattcttaggcttagagctatggagc

SEQ ID NO: 126238 - DNA, 1196 bp, Glycine max
  Clone ID: PAT_MRT3847_84C.1
tgaggcagctcaagacgcattccaagattctgaaggaaggcacaatagtagtaccgcaagtgtgtctcatgatgtacatcaataccatcttttcatgatgtagagtgtctatcaatttcgtccctagacatgaagacaggcttatcatcttcaaaaatagagcaatcacgcttgcagctagctcatgtagaggcatcaccatcagatcttgtagtaggaccttggaaattatagaatgaagggatattgtcatggaccatgggtggaacatagtattgctggctttcttgccaagcaggcactgaatattttctccttttcaaagatgatggaacagcatcatatctaacataattagcatgatcagctgtgtaaaaattaaagttgcaaccatggtccccaaattttgtccggttgtcattgtaaatgttacctcgagccttataataattgttccagcttcttttcctatcgctgttgccaaagttgtttccatctaaggtggaccagtagccacaatgtggtggtacaattttctgcttgttagttccgcgctaatggcatatcccctgagcccgcagtattagcgctattaacctatacagtatatacgaaacagcaacgagcgagcagatacagaattctcgtttcattgcatctaagccgcctgcattatttccttgaaataaaaaagccagcaagctcacttccaaaaacagcattccggaagtagtgaacaaggataacaggttccatgtcaactttctcccagacgtgcactcccatgcctggagaaagcaccaagcgagattgagcagagtaatgagccagaggcaaaggttatatgaaatgattatataggagcgcgcaagggagagtttgagtaagctgtgcctggcttgaagtgccaagtagaagacgaagaggaacgaggggatgttgagagtggcattgtgccagaacccgtgacattcgaacaaccaatcgtagaatccgtggccagaagaaacgtttgatatcgcattcacgccacttgaatcggagacttgcgttatcactgactgtggaaccatcttccaaaagggggaattgcagttgcaggggagaaggaaaaccctaatgccctgatttcgacatgtgagtggagcttcgccttgaattacgcgccggcccactagttctaacttctatatccc

SEQ ID NO: 126239 - DNA, 305 bp, Glycine max
  Clone ID: PAT_MRT3847_85000C.1
gagagaactagtctcgagtttttttttttttttttttttttttttttttttttctgaactctggtctgtgtttatccttgattttttcccttcataagtagggtgcatttaatttactgaccaaaaatcttggttaaattgattttcagtgttcattattcttatctttctctgcctgcctccctggggagaattttttgtgtgtgaaattgtcaaaacgtttggggggttgaattccctggaatttttttttttttttgcatgatatgatgattttgatggctaattgtggcttcttaatctct

SEQ ID NO: 126240 - DNA, 508 bp, Glycine max
  Clone ID: PAT_MRT3847_85001C.1
gaaaggacaaactaatgaaaccctgccaataaaaaaaaccctaatccttaaactccagcaccagcagcggtttggtcatttaaatacacaactccaaaattttttaatggcaccacggggaaagcccgctgatgggggcccaagggttgggctaacccgtgggtttcccctcattattccacccagagactgaaccataatatgataataatgttttaatagtaagggaacctcaagaagtaaaagaagatgggtttttaaacttgacttgcaaaggggtaaacctaatgacccccacaactgggaccattttaaaacttgtttttttaactcccactgaccataagcctaaggttcatttttctaaaggggaacctttcctggggcttccaatgtctgagacggttggttcttttcctctggggtagctgatggggctgattctgtttctgattcaaaagtttatttaggctattctgcttattctttgacttcttaagtttttccc

SEQ ID NO: 126241 - DNA, 328 bp, Glycine max
  Clone ID: PAT_MRT3847_85002C.1
cggaatacccggtcgaccacgcgtccgctctttttacttgggtcccgatactctctcggccgtgatcgcccccttaactcgatgcttttgctggtgacttctgctttctgctgcatgatatccaattcatagctgcctctctttgccgtcactctcttccttgcttatcttcttacgtttctttcttcgtgcgtcctcattgctctcggagggtgagcctcgctttatgcttccccacctattctaaattctgttgattatgggggcttttttagcagttcatatattgcgccatcgttctctctactctatgccttctttgaaacct

SEQ ID NO: 126242 - DNA, 387 bp, Glycine max
  Clone ID: PAT_MRT3847_85003C.1
cccacgcgtccgcccacgcgtccgctttgatttctgttatgtgaattcaagtgatgctgactcgatcaattttttttatggttgcgtttgcagcaaaacctattgccctttctgcgtcgatgtgaagaagctcttcggtgacctcggtgccaattacaaggccatcgaactcgacactgaatgtgcgtcccttttcaattcttttctctttttctttcgctaaacccttttatttaaaaaaatcgtgaagctgttcgccaccgaattgttgtctgataagacatgtgagtcagcctgttttcgaatcgtttcgcggcatgcttttttttattattattattgaaaaatggctgtagttctatgttaaaacatctttagtgaaagaac

SEQ ID NO: 126243 - DNA, 832 bp, Glycine max
  unsure (1)..(832): unsure at all n locations
  Clone ID: PAT_MRT3847_85004C.1
ccacgcgtccgaaacccgctcgcccccacacagaagaacagagcagaagaagtagaagctaaagaaatagaaagaggagaaagcacataacagttccacagaacctgaacgttaaacaccaccaacacgatctcagtctcacttccatcttcacctccccaaccaaacaagccttcttcttcttcttcttcttcttccctacaactttctctctctaccatttttctctgcacaaatggaaatgatagctctctacaagcttgagtctcgcgggatagtgtagtcccctcgagacttttcaacttcgttgttactctctcgttctttcttcttctcactctctctctctctctcttccttttcttcttctttctctctctaaaacttcctctgccggaagatggactgccagtgccggaatctgacggtggtgaacttggatccggagagaaagcgaagtggagggttgaggactaaacaggcggggagaggatcgtgccgtggtagttagtttttcgggaatgtgccttttttgctatctctctctgtttcttcgtgagtgaatgctagtgtgagactccatttgcgttgtttcggaaacaaaacaaaaaaaagataacttttcaccggtttcggaaccccttttgcgaggaaaccaaatggggtttttgctcaaagaggctttgaggactctgtgctcaagggatcgctggtcttatgccattttttggaagattcggttgcataatccaagctgttaatctgggaagattactactatggacccttgccatctnccttccccacacnagatggggaaggatgctggttt

SEQ ID NO: 126244 - DNA, 372 bp, Glycine max
  Clone ID: PAT_MRT3847_85005C.1
ctccgcaatctagccaacacaacccgcaatttctgaggcttactccctctccgctgggcttccttgccttctcaaggatctaagacccaacatcatataccaacacctctcaaccacaccactaaccaacctaccttcattcccatacatctcacaatctcactcctgctcacatcacctctactgccctcgtccctattacttctcttatctctcttgctcatgacaacataccagcgtccagatacgttcaatgtcgctaacgccggttgtcaaaatttcttccggctattccgtgcaagtaagcctatttgtgcccactgaagacttcaacctcgcactgataactcttgatttggaatttgttaaaaa

SEQ ID NO: 126245 - DNA, 281 bp, Glycine max
  unsure (1)..(281): unsure at all n locations
  Clone ID: PAT_MRT3847_85006C.1
aacttaatataaaattgatcacatcttaataacattatgctacacgaaacaaatatatatattaaagttagtnttgtatacttaacgataagaaatttttnatgcaatttttatacttgtgaaattattttaaaaaaatatttttcaaaagttaattatgattgcacatttaattcatgtagaataaatatagaactatcaaaatagaccaacttgattcattgggcctgatccaccttgacttgcctacttggtggcgggnnttgctaggggcacccagc

SEQ ID NO: 126246 - DNA, 305 bp, Glycine max
  Clone ID: PAT_MRT3847_85007C.1
gggtcaaacactttttttaaaacctacacctaaaaggattgcgaacttataatttcctaaaggagcgttttccctttggatacggttaggatggcaacttacaaaatgaccctggggcatttagctcaatgaagggtgccacggacattccaataacaggatcatgggaacactaaagcccctccaaggttggcacattgggatttccaaccggatttcgcttttacgtccgcttccatggcttgccagagccatattgtcctgggatctcaatgaaatacaagggccctttgagttcaacggcc

SEQ ID NO: 126247 - DNA, 530 bp, Glycine max
  Clone ID: PAT_MRT3847_85008C.1
ggggcccttgaaggattcacggccttttcttttttaacccccttcccccgggaaaaccgaaacccctcccaaaattttatcttaaaagggaaaaaaaaaaaaattaaggggggggttgacaaataaaattgaaagggccgctgccaaatgggtcaactcaacaggggggccaccaaagctttcacaagcgacatcaacgggggtcccccaagggtaaccccactcactggcccagatttattctgaggccggttgggttcttcttggccggcctcagaaaagttttccctacccgctttgggaaactttgccagagttgggggggctgaagctggagcccttttggttttaaagaaatcttgaggaagaagccccttggccacggggaaaatcccaaggttggtttttggggtttcccccccgaaaacgggggcctttgaccaccccgggtgaaagggggaccctggttactaatggcctccctttccaggggagcctggggggatctttacccgcccctgtttgcacag

SEQ ID NO: 126248 - DNA, 263 bp, Glycine max
  Clone ID: PAT_MRT3847_85009C.1
ggtgggggtcattttttgcagggctgatgtaggtctacaatccaggattgtattgggtaattgcacctaacaattgggctatgctaatctggatttagtctgttttgggcccattctatcattacacaacgttggataaatggcacaggaaacaccatgattttgatttacaagcaactttgtagttttatgactttcgtggagaatttatggcaaactggatggatacattatcaaatttcattgtactgtgagagtgtgtt

SEQ ID NO: 126249 - DNA, 158 bp, Glycine max
  Clone ID: PAT_MRT3847_8500C.1
ctctgattctgtctctgtgtttgccgctgaagatgtccgaacgagcgaccttcttcgtttctcgcatagtcaaagtcatcatggcgtgacgaaaagactcacatcaacattgtcctcatgggacatatcgactctaggaagtcaactaccactggtca

SEQ ID NO: 126250 - DNA, 327 bp, Glycine max
  Clone ID: PAT_MRT3847_85010C.1
ggccaaaaaatgctttgcctttgatttaaattccaaaccttacttttgaccatttttcatggaaattaaaatttgggaaaacttaattaccattgggtggcaccattaattccccagccccttaaaatcccaaaggagtgattaaagaattttttaaaccaaaaaaaaacctgtggaaaccacccttggcacctggggtttgggcctcccaaccccatggaaaaacctgttttttttctttggccctaaaccccttccccgaaccccagaaacccttggaaaattccccccttccggttcacccccccccggccttttttaaacttt

SEQ ID NO: 126251 - DNA, 193 bp, Glycine max
  Clone ID: PAT_MRT3847_85011C.1
ctgacaactgtgcggaattcctggaaaagatacttctgtaagccatctatctcagtctctatgcgtccatggagtgcagggacgtgaaggagaatagcggagaatctctcaaggctgatccgagcgatgacgagatatccagctagaagatgcatgcctgggggatgtcactatagatagagaaggactacca

SEQ ID NO: 126252 - DNA, 474 bp, Glycine max
  Clone ID: PAT_MRT3847_85012C.1
tgccagtatcgtgcttgacctaccggaatacaaaccgtttcatgtagactattaaactccatccaccctctcctagcaaaggctaaaaactgatgtggtcagtgatggtggtttgtatatcttttgtttagatctgagattggacccaaaggtactctcacaactagaaaccataggactaatctcctgaaaaagtaaagtattgattaaggaacaatttctttacctacaggtgctgctctatgcacatcgtcagggatcaaacccctattatatagtcaaagaacccaagctctttgtcacttgtgccacaccttatagttgtttgtattttatttttttttgttttatgagtaatgctttcaatgctacaatcttcaagcattgaattgaaaatattcacttatccccccatctccttcctttcatttcagttttaaaaagtctataaagcaaaaagttcgagtcatttac

SEQ ID NO: 126253 - DNA, 359 bp, Glycine max
  Clone ID: PAT_MRT3847_85013C.1
cttccggacaatttttagttctgtttatataaaacaagcactaggtagaatcagaagatatctacgaccacattcgtgaaaatatacaataggtgcaaaacaacacacaaagtacaccatatctatcacataaatattgacaattctgatcatagtcatatccattgatctacacaccaacactagccacattcttccattctaaatggacgaaaataattgatcacttcaacatgatccctattataacatcttcaaaaacaaatatcacaaaaactcctccctattaatatatccaaacttacgaacacgatcatacaaactcatagctcttctataacataacctaactacaattc

SEQ ID NO: 126254 - DNA, 444 bp, Glycine max
  Clone ID: PAT_MRT3847_85014C.1
ttatttttttttgaaataatgattttttcttaaaattatattaatggctatatgtgctcttaaagacaaatactgcctgttatgggcaactttataaactcctatacatggacgagtggcaatctaatattgcctactaatactatgatcgcactgatcagcatgtacattctgcgtgtgtaacacgatactgctatatacggacatctaaaaagacatgtggtcgtctaatatctcctaacaatgctattgcaaactgttgagcacatactgaatgcatgattaacggcctatggtactatttactatgtagtccaccaggtaccggagtctttgcacgttcctatttggtcatgcttggcgtcgatgatgcggaattccatcagattactatcctgtcaccagccatgtccactacgtgtggtcattataaaggtccatgtt

SEQ ID NO: 126255 - DNA, 233 bp, Glycine max
  Clone ID: PAT_MRT3847_85015C.1
cataggccaagattccttctctagtttgagttttcttgacaagctaaacctgttgggagaggtgaaactttcaccacagccattcacgttctatacatacatatctactgtactagtgcgtataataatcaaccttatattgattctgctcttaataagcctttctatgatatttatttcaatctttaatacttatatatcactaacaaactctatttttcatatcttacacc

SEQ ID NO: 126256 - DNA, 351 bp, Glycine max
  Clone ID: PAT_MRT3847_85016C.1
gcgcccacgcgtccgaaataattggtcctgtactttatgtttcttttcccccaggaaaaatgccgtaatatgtacaactctctggggggtaagggtccaaatactattggtcaacaaattaatgtgacttgtgaattacagcaattattatgaaataatcgaattagagctgtatctattattgcgacagaaagtctaatgagaggaatgtaagtgattgacacatttgcttccctaattgtttcatgtagttggagcttactctattgacgaattttttatcgttctttggatagccctcattgtattatttaatgtaccttgtaatatactttcctactatcaatcttc

SEQ ID NO: 126257 - DNA, 608 bp, Glycine max
  Clone ID: PAT_MRT3847_85017C.1
ttttttttttttttttttttttttttttttttttttttttttttttttttttttttttttttttttttttttttttttggaaaaaggcccaggggccctgttttttttttttaaaaaaaacacccttgttttaggaggagaaaaataaaaagcttgggcacgggcataaaaaaagggctcacccgcttacttaaaataattaaccccgtgaacttgcccttttacccaactttaaggtactgggaaagaacaaaaaaaataaaacccttatggaaaaaaaaaaaaacaacgggaccctgggaaaattaaaaaacatagccttttaatcctcccatccccaaaaacctggagggggctgggttcattgaacccccccttttaaaggaaaaaaccttaattatttttgggaaaaaaaaaaaaaaatttttttccccgacataagcaggggggggaaaattcaagggccccgaccagggggcttgggggaaaaattggcctgttttttgacccaaccctttgggccaaagaaaggggtgttctttgaaaaaaagggaagggctttaaaaaaccccttgaaaaaaaaagctggggtttggggcatttttttc

SEQ ID NO: 126258 - DNA, 496 bp, Glycine max
  unsure (1)..(496): unsure at all n locations
  Clone ID: PAT_MRT3847_85018C.1
tcggtcccgcgtcgggaacagatgttttggattgatgcctaccaaaagaaggtgttccgttcggcattgccaaagggcaatcagtcgcacgaaggccaggaactgcaaattcattttgatgacaatgtgacgccgctgagtatggcggtggattatttgactggcaacatttacgtcaccggtgttgtgggcgcggaaaacattgcgaacgcggaggcggctggccgacgcaaaaggcgttggagccaaccgcttgacgaaacaggcgtagtttttgttgcaacatctgacggtcgctatcggaaaaaaatcgtgtttggacaacttcaaattccgactgcaattgtcacattgccaaaacttggccgaatttgttacagcgatgccgggctggaagcaaaaattgagtgtgccgacatggacggaaatcggcgacagacaattatcagcgaactcatctattcnccgacaaatatggctgtggatgaaggacgtg

SEQ ID NO: 126259 - DNA, 552 bp, Glycine max
  Clone ID: PAT_MRT3847_85019C.1
gtgtcccaatccaagtgcagcattttgttcttgttcttctgaaaaggaatactattagatcctcttgaaccatttactgcctcaaatttatcaaattccagaatgggaagggaatcaatgaaaagcttcccagtttactaagctgctctaaggaaattaagtatcaatattaaccttaacttgctggcttttggttctccgcatcgattaaaggaatacactgactaaatcagcagctgttaatttgacaatatcttctgggcagctagagtaaagtgtattcaggaaaatacccaacgatgaatcataagccatgtttctgaaaacaggaagccccccttgtccaaattcaagatagtagctaatggcatcatagtttgtgaccatcccaatgatatgtacaaagtcaaagcacgccatatgcaggtcagcattcccatagcataaaagagaacacgcagcagaaataaaggacgcacggatcaatccctcaacatagagtgttccttcagttagacttttacagacaagcttcaaaatccaagttgcaaa

SEQ ID NO: 126260 - DNA, 285 bp, Glycine max
  Clone ID: PAT_MRT3847_8501C.1
attccgttccaggaaggtttcccgtcatcactgtatgacgtcctccttctttgggggggggggggggcgagctaatgacaagtcagcagtggagggtccccgaacagtacgaaataagagaggagatggaaagcaattgggtaaaatagttagaacaccttagaatctaatctaggaggtggacaggaaaggagtgataagacgctagtaggggggcacacccagcaaacgctaccgcataagttgacctgaatgaggtggtagtatgaccaaacgcaatagcac

SEQ ID NO: 126261 - DNA, 1885 bp, Glycine max
  unsure (1)..(1885): unsure at all n locations
  Clone ID: PAT_MRT3847_85020C.1
agagccatgctaggccttacagnacnncncttnnnnnnntnnngnnnannnncnnnnnnnnnnnnnnnnnnnnccaaggtgtactacgcgcgtaacatcaaaaccggcgaaggcgtggccatcaaggtaatcgacaaggagaagatcctcaaaggaggtttggtggcgcacatcaagcgtgagatctctatcctgcgccgtgttcgccaccctaacatcgttcagctcttcgaagtcatggccaccaagagcaagatctatttcgtaatggaatacgttcgcggcggcgagcttttcaacaaggtcgccaagggaaggctcaaagaagaggtcgcgagaaagtactttcagcaattaatctctgctgtgggattctgccacgccagaggggtgtaccacagagatctcaagcctgaaaatttgttgcttgatgagaatggcaatctcaaagtctctgattttggattgagtgcggtgtctgatcaaatccgacaggatggtcttttccacactttttgtgggacacctgcgtatgttgctcctgaggttttggcgaggaaagggtacgatggtgctaaggtggatctttggtcttgtggggtggtgttgtttgtgttgatggcggggtatttgccctttcatgaccagaatgtgatggcaatgtataagaagatttatagaggggagtttcggtgtccgaggtggttttctcctgatttgtccaggcttctcacaaggcttcttgataccaagcctgaaacccggattgcgattcctgaaattatggagaataagtggttcaagaaagggtttaagcagatcaagttttatgtggaggatgataggctttgcaatgtggtggatgatgatggccttatggacaatgatgatgacactgcttcgattgtttctgttgcttcgttttcggattactcggtttccgagtctgattctgagattgagactaggaggaggatcaatgctcccttgcctagacctcctagtttgaatgcctttgacattatatcgttctcgccgggctttaatctttcggggttgtttgaggagaaagaggatgagacaaggtttgtgactgctgcaccggttaacaggatcatttccaagctggaggagattgctcagttggttaggttttcggtgaggaagaaggattgcagggtgagtttggagggtaccagagagggggttagagggcctttgactattgctgctgagatatttgagttgacaccttctttggttgtggtggaggtgaagaaaaaaggaggggatagagccgagtatgagaggttttgtaacgatgagttaaagcctggattgcagaatttgatggtggaggagtctgctacttcttcagagttgtctacacctattcaaccttccctactacgtggcctttctgaacctgtgccggatatttcttctgatattgaaaccccgctctgtataccttctgatgattgaagactcagatatagagaagaagagaaaaatggttaaggactttctctctaatctctgtatcacacacactctttctttctctctctctctttttttttttatgttatagattgtgtatggaaattggtaaaaaaatttccacacaggattgattgtcctgcttttaggtttgcttcttgactggagcgttaggtgcctactgtttgtctaattgccatacgagaaaaaaggctaattgaaatatagtgaatgagtatgtatttattttctacttttcttggctctgtatagcaagtgataataaaaataacaaaacggtttagtgctaatccatgcggcattgcactggctttgtgtttggctctatattcaagttaaataagatcatttgaaattggag

SEQ ID NO: 126262 - DNA, 817 bp, Glycine max
  Clone ID: PAT_MRT3847_85021C.1
gcttggatcccttcttcgtctaatatctatacctctacacgacgccgttccgcatggcgtcatcaagcaacccgtctcaaactatttttttatgtggcttcaggcgagagtgcagcgcctctacagctagcgtccggtgggtcgtgagctgcacctctcagaggcaacatatttgctttggaattgatggaggccaaattttttcgctttctcaagattgtgggtgttggatacaaagccagagctgaagctgcagggcgtctgttgtatctcaaattggggtacagtcatgatgtggaactagctgtccctcctgctgtccgtgttttctgcttcaaaaacaatgtaatttgctgtactggaatagacaagcaaagggtgcaccagtttgctgctactgttcggacttgtaagccacccgaagtttacaaaggcaagggcataatgtatgttgatgaagttatcaagaaaaaacaaggaaagaagtcaaaataactcatataatttttggtgatttcatgaagtctaggactcagatgtacattggctacatcttgtccgctcaatgattcactctaggtctctctagccttcaaacggtttcagttttggaatccttgaacatagcattatggtaatcatgtatgctttgaaataacaatagttttttgcttctgtatgattgatatgtacctttcagcgtttatcttacttttttgagatattttgtctaaggatataatattattttgaaagtctcattttctttttgttcccttctaacggttgaaacaaatattataggatgattagtttt

SEQ ID NO: 126263 - DNA, 1334 bp, Glycine max
  Clone ID: PAT_MRT3847_85022C.1
aaactttcttcctttggagtgttagccgccaccacaccaccgcccaactacagatccactcttgttcttggtcgcggtcgcaaatccaggctcatgtggccaaccacgccaaagatccgcactacagaacaccccccaattgactcgtgaaaccctaaccttctcacacacacttgccacacctttgcttgttgcttaattggagttttagttgtcaatggttggaaatggcttgaagactgcaatattattgtgaagttctccttctttatattctctctccactgttaccatttccattggttgtttgttctcagctcaagaaggattcttgcctaagtcctcgtttttttatcggaatggtagatttgaggtgaaaaggttccatatttgttaggccttggatcttcttcatcaatggagtattttgcatcttgaagatcatggaagcggaatggagaaggaagaaagattattggagatgtcacttcaagaagaagatgagtcaaaaagaagttcactaccataggaagccatggataagagcttgaagtttgtatcaatggagattcttgagaaccgaaggtggatgtatcagaggttggatgctaataaacgttggacaaatgagtttagagaaggagtgtttgagttcgtatagtttgttactagtcaggacatgtttcaaatgcaaggagaacaaacaaggtgtccatgcaagaaatgcaaatataatgttttcaagtttgtggatgatgtgatgagggatctttatgaggaagggttcatgccaaatgattattggtggaaaaaccacggtgaggagttaccacaatttcctctaatagtgttgcaaggttcatactacggaagtggtggacaaagggaagaattgaatccttatgagcaaatgatcatggatcatgctggaccatcaattgggaaatacaaagaacaagagggtgcaattgagacagaatgcatggagaaaaatcctaatcttgaagctcaaaagttctttgatatgcttgcaattgcgcaagcaacgttgtgggaaggatgcgagcatcattcaaaattgccagcttctttagcctgccttagcttgaaatctgattataatatgtcaaaagggtgttttaattgtacggttcaatttatgggtgacaccatgccaaaaaacaatactatggtgggtaatttttttatcaagctaagaggtcggtgcaaaaatttggtcttggttgtttgaaaattgattgttgcctaaacggatgcatgttgtattacaaagaaaattcagataagaatataaataattgtttttattttgt

SEQ ID NO: 126264 - DNA, 311 bp, Glycine max
  Clone ID: PAT_MRT3847_85023C.1
caactcggctattctactcaaaaacattctccaagcaaaaaggagtaattggtaacaaaaaaaacgcgaaaaggaatgactggatccatccatgacattcctataatcaaacgccacaccaccacaccgtgtacttcattgaacacacagcatgacctactaactttccattacagtacacgagaggagtaccaaccttatttggaacaacaatggagctgtgctaatccaggcgttcaaaaaagcaaccgcccactaagtgatgagagatacaccctcatactgtcatggcgctggaaccggcttgcgaa

SEQ ID NO: 126265 - DNA, 270 bp, Glycine max
  Clone ID: PAT_MRT3847_85024C.1
cagctctttccaggattcagttctaagctcagtgcctatgataaatatggagtgtaattcaaattcctcttagatatctatatcaggtgccctattgaagaccaacatcttgaggtcccatgtagtcatttcttgcccatgtgggaacacattactgtttggttgagtaccaggtgaagtgattggcctgcagttagggctgtgttgtgcaaaaatcacttgttttggggtgttatgaacacatttaggcgagaagatcacttttgggga

SEQ ID NO: 126266 - DNA, 431 bp, Glycine max
  Clone ID: PAT_MRT3847_85025C.1
acccacgcgtttgcccacgctttcggttccaaaggactaccaatctcggcgccctttgggtaactgtgtgggggatccggacccaacactacttctaatttcctcacacttccctagaccagttaccgagaaagagtgcgagattgcgctaacacatgcttccgtagcgtacatacaatccatacctactcccctgaatcaacttttggttaggccttagaactctcacctagaaaagcgaacgaatcattagacgctactctgtcgctcgaactattaagcatctctatactcacatgagttacattgggtccagcatccgctgtccacacatgacaaaagccgcaataattttattcacaagtggaggactatcacatatcagaatcatataactttaccgtccgacaaacaactgccatcctacgacc

SEQ ID NO: 126267 - DNA, 396 bp, Glycine max
  unsure (1)..(396): unsure at all n locations
  Clone ID: PAT_MRT3847_85026C.1
ggctgcctataaaacaccgaagggggggcggaggcancacttcgcncccggacaccaacgggccaaaccctaatttcttcctcgaatcttctcctcccttccccgcatacatctccactgctttttccttcgcttggccgaaggcgcttaaaacgaagaattccgacacattcttcgcgcatatggggggggcggataaaggtgaccgccacgccagtgaaagggaattagcgggaaaaaacggtaactgctctgtggaagacgcataggcttttggaatatgaagtggccgggaagggaactacagagttaactacgcaaacgccccgccgccccaggaacaagctagttgatgcacttgctatctacgatcgcgtggtgtaaagtgatggtgca

SEQ ID NO: 126268 - DNA, 220 bp, Glycine max
  Clone ID: PAT_MRT3847_85027C.1
ggtttattttggaacaaggcggagggggaaactgactgcccatttgaagacttacccacgggttaacatactgccgataaacataaggggaggagcacaggcaaataatgctctgaaaacaactctgccaaatgcacgttctctcagcgaggagaaatgtcgttggagaactcggccaataaattgaaaagatgacgcccacctacacacaagggacagc

SEQ ID NO: 126269 - DNA, 819 bp, Glycine max
  unsure (1)..(819): unsure at all n locations
  Clone ID: PAT_MRT3847_85028C.1
cggtccggaattcccggngtcgacccacgcgtccgttagtctttaggtattattcatattcatctacttattgtgattactcgcctttcttatttctgctttatctatttccctgtctcatggtatggggtgaaaatatcagttcccccttaaagttgtctctttgaacataagacccctttgcattctgacttagtaagaaatgaagagtcatttgtatctattgcttgagaatatttatgttgctttccctctcctttgtatttctttttccacctttgtttatgattctctgttttcttgactgatctattgaattagccctcatccaggctaattttttaaaaattcataaagggattagttttagaatgcaggagtttgaagcaatatcttgttatgtagctgaggaaattattttctagcaaaaaaagtgtgcattaagttgaagataggtaaatttaagatgaaaggaatgaaattataagtgctcacatgtttggtagttgagagatttgggcagaaaaattcacttcaaactaatgttttttgacaatcactgtttcttctgtatttacaaactcaacataaatctggagtttgtgttcctattgtgatatatgcttctgcattctgattgcagctcatgcattataaaacactaggttcgtttttaagatagtgttacttttttattgagcttctttgctattatcctattggaaatttggtgtttttcttaaattgactattngagcatttcacttgttccctcactccatcccaagcacaaatttactgtctgaacttatgtagcaa

SEQ ID NO: 126270 - DNA, 436 bp, Glycine max
  Clone ID: PAT_MRT3847_85029C.1
aaggaaacattaccccaaagtctatgattacgttcacaatgtaaaagggtcacaaatagaaattttaggtgcatactatacaattcaatattacacaatattcgacatattcaaagcctcaaacctgggccagtggtcactggatctttaacacagatttcttgtgacttattcctaagccctattaccacaaggatgtttaacagttctcagggcatcaacatttgaggctcttgcacaagaggctgagtaacttgcgcaaaatgcttaaattccctttccacgttttgccaacatttgggtggactgattccttggttcatatttttaacaaaccccacaaacttcctacacagattctgttcaaacaaatgcggattcattctcacgtataccaaagcccacatatctttatcaccggacttaccatcaacat

SEQ ID NO: 126271 - DNA, 439 bp, Glycine max
  unsure (1)..(439): unsure at all n locations
  Clone ID: PAT_MRT3847_8502C.1
gtgcattngtcggatttcttcttttggtattgcccgnggattcattcaattaaaagctatagacatctacgcccattaactaaactatgtcaacggcattatatgatcaaaacagcaaaaccccctcttcctcaagttgcagatgagattcaacggtgttgctgagcatcaatgtagccagcaataaacaaaaacttttcttttttttagccatctcaatgtccgcggaaacaataattttcacaagctgctaaaaccacactataggtttaaaaccaaacaccttcttggcctgggacgcgtcctctgagaggttatcgtcttcagaggggagaaagtatctcttgtcaatggacgagaggaaccgatnctggactcggttgcaactcgttggcagctgttatttctgctatgctgttgagaagcttatcgcacctat

SEQ ID NO: 126272 - DNA, 300 bp, Glycine max
  unsure (1)..(300): unsure at all n locations
  Clone ID: PAT_MRT3847_85030C.1
ggagacttttnggggagagtgngtgagagtaaaaagatgtntctgcgtgcgntggcgcggccgttgtnntcgaangtgaagagcttccgacggggatcgnggggctngacgtggtgccgancgcgngggaggtgctcgattgggctgtacagcaagacgctnaaagagatccagaangttcccgaanatnaagggtaccgcaaggccntngagagcttcaccaancanaggctcngngtntgcnangaacnannatgactgngcgaanatcnagaaacgcnttccgctgcggcnaggtcg

SEQ ID NO: 126273 - DNA, 238 bp, Glycine max
  Clone ID: PAT_MRT3847_85031C.1
gggtgggagtggtatcgccaatccgatggaaaccctagtcggtgactgcgaggcgcactggaatcatgcactctatgaatcaatgtgcactgaagaagaggaataactgaccaacatcagacgaaaacattgcctgctgctctccgaaaactgaaaagatagtgaagtacgcgaggctaatcagccataaattcctgatccatatccaaattatggacaccgtgatagcctaggaaca

SEQ ID NO: 126274 - DNA, 540 bp, Glycine max
  Clone ID: PAT_MRT3847_85032C.1
aaaatttaaaaatttaaaaaaaaaaaaaaaaaaaaaaaaaaaaaaaaaaaaaaaaaaaaaaaaaaaaaaaaaaaaaaagattaaaaattaaaaaatttaaaaattatagtttttagaaaattaaaaaaaaaaaaatatgtgtatttgttttgggggggtcttttttattggttccaattttttaaaccgttggttttgataaaattttttttttttttggttttttggctttttttcctttgcccttttttttaaaaagctttgttggaaaaaactttgttcctttccctttttctcctttgttacaatccctctttttacacggtggggacccccgcattgggctttacagatggggtgttttctaaatttggcacaggtaaagtggttagtgccctccctttttagcggggcttttttggggttggttgtgttgtttccttcccaggtttttaaggttttttttttttccaagtttctttatagctcccttttttttttttttttgtttttttccctgttttttttttgtgggggctt

SEQ ID NO: 126275 - DNA, 1256 bp, Glycine max
  Clone ID: PAT_MRT3847_85033C.1
cccacgcgtccgcccacgccagagctgagaaaggaaaatctatttgcatctcataacagagagctgagaaaggaagaaaaaagcgtgtgtcagagatacttaacaatggttgtagaagatacccaaaagtcagtcatcacggaggaccaataccctagcagggtcgtcagcgacaacaacaacgacgacgacgacgatgatctcgaagagggtgagatccccgtcgacggcgaagatagcggcgccaccgccacaacgaagcctccggccgccctcgcccgaaacccccaccctctggagaattcctggaccttctggttcgacaacccttcctccaagtccaaacaagccgcatggggcagctccatccgacccatctacactttcgccaccgttgaagagttttggagcatttacaataacattcaccacccgagcaagttgggtttgggggcggactttcactgcttcaagcacaagattgagccaaagtgggaggaccctatctgcgccaatgggggaaagtggactatgaccttcccaaggggaaaatctgataccagttggttgtatacgttgttggcgatgattggagaacagtttgatcacggagatgaaatatgtggagctgttgtgaatgtcagaagtaggcaggataaaattgctatttggactaagaacgcttcaaatgaagctgctcaggtgagcattggaaagcagtggaaggagtttcttgattacaatgacacaattggctttatatttcatgaggatgcaaagaagctggacagaggtgctaaaaataaatacgttgtatgaagtgtatagcgtttttaactgggtagcaaatgaaggaaggcagtacattccttgcatgaagtcgcattttgatgcctggtctttcctctcttacatgtagcttagctgaattcgtagcccttttggccccatctttgtagtacttgcatatttgttgtggatggaggatatttgactggattggatataaagggagaatccttgatcacaagtttgtttgttataaggcaaatgaaatcgaaaagatgttttcttaatgaaaaattgtttgccgtttgaaggcgtttgtgtcaatcataataatatcttgtaaagattggcctgtaaacaaacgtttctccttctcctacgactttattagctattaatatttgtcaaatgttctaaatgttctgtaaccaatggaatttagtttaattagatgaataatgtgttat

SEQ ID NO: 126276 - DNA, 297 bp, Glycine max
  Clone ID: PAT_MRT3847_85034C.1
aataattttttttttttttttgcgaccaacaattggtttttttaaacataaaaactgggtctcattaattctagatgagggcttaagcttgtaagtagaaagaacactctaaaaatccattcaggttaacaaaaagtttccaaggggaacgtacggggctgctcagaatacgacatcacatattttgcaaaagagtgggcttcattggaaatagaaaactcaaaaccttaaacgcatctcttactgttgcaaacataccttttacatgcgtcgaattttgacgcgcaacgcccacat

SEQ ID NO: 126277 - DNA, 535 bp, Glycine max
  Clone ID: PAT_MRT3847_85035C.1
caatatgttatggtatgagtatatgttgtgaaaaatcttaagagaacttaatacttatgggataaaaatctcaaggaatttaaaaattaaaatatttgtatattatttgtgaatcatgtattatgttgtgcatatgtgttttaaagttaatgacgtttatgaacctaaccgaagaggttatgaataagttgacgtataactctgatcttaggggatgtaatggtttaaaatctcctttaagttcatgttaatcatatgggttgaagtatccttgcaaggttaaaacatcctaacgttccaccggtgatatcatctcggtgagagtgatagtgttgagttgttcattgtgtgacaattcgtcaattacatggactttcaaattatattcacaaagtgttttcaaaatgataccacatttatgtgaatcatcttgaatctttatctatgtgtgtgagacattcactactacaaaaaggattttttaagtcggttctttgggacatttaatgacggttttgaaccgtcgtacaatgtg

SEQ ID NO: 126278 - DNA, 344 bp, Glycine max
  Clone ID: PAT_MRT3847_85036C.1
gtgttcccaggacctattgtgttttaaacccacaaaatccttgtgggatcaatacgtggctgggaagactgactttaccccaccgcacttgccgaagcggtaagacaatgcctgtttgtatatgtgcgggagctggcgcacagaacgctacttctaatgaatatgcgctatgccgcgcttatcaatggcgaaaggttttgcgggaaacctcttcactacaagggcttaggactaccacctccctaccctaaatgttctgtgtcttgcttgataccttaccgccatatacctgacgataccatcaattatgaagcttttcccgaccagctgctacaacttggaga

SEQ ID NO: 126279 - DNA, 455 bp, Glycine max
  Clone ID: PAT_MRT3847_85037C.1
acgaggaactagtctcgagttttttttttttttttttattaagaattctcacaacaaatactatcattaattcattcacataatctatgaaaaaatatgctaagtcgcaaggataaaccatccacatagcttacaaggtgtagctaaaaatagagacatgtacattctcacatgactgactatccataatccaataacacttacagggcctgatcgacttctccacaaacacttctaaaagaaaaaatatcgaaaaaaaattaaataagtttctttcataagctaaaagtaacttatgcacaagataaaaataagttttgggcagcctaataagagagaactttctagaaatagtttatgcacaagcaaattttaactcttggagaagacatatttcattttattattattttcttctcttataagtttacagagaagtttatctaaatacgacc

SEQ ID NO: 126280 - DNA, 244 bp, Glycine max
  Clone ID: PAT_MRT3847_85038C.1
cgtatgcctacacaggctctcggtcttagatgctcattcttccgaaaagtcgctgcctagtcgatgttagatggaatctagatgacttacgctgctggccttatcacgctacaaaagtcctgggcttgccctgcactacccagagaaactaccaagcatatctttccttgtacgattgcaaaacccagacctgctcagagatcactgatccttgaacttgatccatttgtcatgtgaaaggagc

SEQ ID NO: 126281 - DNA, 294 bp, Glycine max
  Clone ID: PAT_MRT3847_85039C.1
ggaaacaaaagggaggtttatccattgctaaaaacccctaccggaggaaacaaaagttttttggggcccacaaacaggacccccaaatttccctgggaaaaaacaaggggggcgaaaccggagagaccaacaaaggccaggtaaaaataaatcccaggaaggggtggcaaaaccggaggaccatcattaagtgggggggcccccgcccaaaatccattttttttttaacaaaaacatttgtggacaccccaccaacagaatgcggttttgcattccaaaccggggccgaattcc

SEQ ID NO: 126282 - DNA, 633 bp, Glycine max
  Clone ID: PAT_MRT3847_8503C.1
gctctttccacttcttcttcttcttagaaattgattcttcattcctcttttcaatctcttcttagttataatagctttcttcttttgctagcttgaaagggttttgtgatacatataatatttttgaattcttcaaacttatatatatatatatatatatttgatttcatggaagagcctattgtggtgaacaaaggtgaggagcctctagatttgcctccaggtttcaggttccaccctacagatgaagagataatcacttattatctcactgagaaggtgaggaatagcagtttcagtgcaattgcttggagaggctgatttgaacaagtgtgaaccttgggatttaccaaagaaagccaagataggggagaaagagtggtacttcttctgccaaaaggataggaagtacccaactgggatgaggaccaatagagcaacagaatctgggtactggaaggccacagaaaagattaggagatttacaaagggaaagggaaccttgtggggatgaagaggacccctcggttctatgaaaggagagctcccaagggtgagaagggctattgggtcattgatgagatacgatcggaagggcaatgggatgcgaccaacctgcctagggcgcgaagg

SEQ ID NO: 126283 - DNA, 227 bp, Glycine max
  Clone ID: PAT_MRT3847_85040C.1
ggccgcgccttgtctcttttcttctctcccaatctatatacgaaaacccattatcttcttccagacccttcacatttgctgtacccgaacagcgcattcgtaacatttctttcttcgatctctcacattgtacccatgcttcaaccttgacgcactatccagagtccgacactactggaatggctgactctcgctcagatcaaaccatcttgggcaagtaggctagc

SEQ ID NO: 126284 - DNA, 329 bp, Glycine max
  Clone ID: PAT_MRT3847_85041C.1
ataattcccatttccatctctttctgagtatcaacatatggcaaccactgcgatgaccactcggccacaattcaggggtcttagaccacaaccatcagctgcccatgtgacgaacttgattgctgggcaacccatgagtcccaaggctaaaggagcatcgggagctcgatgtgactacatagggtcatgcactaatccgatcatgagcggcttgtacaaccactacgctggctgctgcatggaccggatgagctccatctgcatacaggaaagccactgcttgcctaaagctacaggagcgggactcaggcttgctaactggtgaccct

SEQ ID NO: 126285 - DNA, 920 bp, Glycine max
  Clone ID: PAT_MRT3847_85042C.1
ggtccggaattacgcgtccgacaaccagatggtcttttgcataggaatgcaattggtgaagctgaagaaaatcccaaatcgactgctattgacacttcccagaaaaaaacatcagaacaagaagaagatgatattaatgaaataggagaagaagagaaagaaaaattaaatgacgtagattacttgacagggaatccacttcctaatgacattctcttatatgctgttcctgtttgtggtccttatagtgcagttcagtcttacaaatatcgggtgaagataattcctggaccggcgaagaaagggaaagctgcaaaaactgctatgaacctattcagccacatgtcagaagcaacaacccgggagaaggagttgatgaaagcctgtacagatccagagctagttgctgcaattgttggtaatgtgaaaatatcagcagctggccttactcaattgaagcaaaaacaaaagaaaggcaagaagagcagcaaacaagagagttagccaacacatggatccatcttaagactaactgcacctcacacagttttaatcctatgtcctctgcaactctagttctatttttttcctctctattaataagcccttggattaaaactgcatgttcctgcagtttttttttccaatcctggaacctggatcctaaatccccaaccccgtgtaggatttactcaggagaagttttgttttattttttcctttcttttctttagctagagttaagaaattcgtatgttgtatatcctattatccttctgagttctaacactgtagagaagttttcctccgttcagtaatgctgaaaaggatatttttggttttctgctatttactgtcaaagaccaagtcactggatattttttaatcagaggatatatcataaacaatttgtttaaaaa

SEQ ID NO: 126286 - DNA, 250 bp, Glycine max
  Clone ID: PAT_MRT3847_85043C.1
ctctttttaaaacactcactaagagtgagaatgaacagaatcaatttaaaaatagtgtaattaattcattaaacttatttcgtaaatcaaataagttgaatttgagttttaaaaaaaacaagttcgataaataagagttgaacttgactagttaagaaattgagttcaatatgtactaaatggtatacttattatgaatttttataattggtcttttaattaattttatattaactttattttgctaaga

SEQ ID NO: 126287 - DNA, 322 bp, Glycine max
  unsure (1)..(322): unsure at all n locations
  Clone ID: PAT_MRT3847_85044C.1
ctctattttttttntaanaagacttctccctacatggggtatacagaatctttctggggagcatatggaaatttggctgattacaccatcaattttgaggcttttccccacaagctgatgcattttggagagataaactccaaatatgtttttacaatttctcaaaaaaaattttttttagcttggtcaactcatgtgcttccctaatcgaatctattgactgatggatgcccacatttgaatgctatggagcatgataatttattgtctacaatactcattcgatttttttattggtgtgacaaaactagtgcaacttttc

SEQ ID NO: 126288 - DNA, 214 bp, Glycine max
  Clone ID: PAT_MRT3847_85045C.1
ggaaaatcaagttccatttcgcctactatgatattttggaattgtaaaatcaaagagaacaccattatgaagtttgtaaaccattgtttattattggtacaaatttgcatttcaagaaaaaaaaaaaaaaaaaaaaaaaaaaaaaaaaaaaaaaaaaacttattaataaaagaatagatttattggtttgaaattcaaataggaagacgggttt

SEQ ID NO: 126289 - DNA, 312 bp, Glycine max
  unsure (1)..(312): unsure at all n locations
  Clone ID: PAT_MRT3847_85046C.1
aanatatagcccnancggnatgtnanctcangantgngntcagacngnggcnnnnccantgnncnangtncnnnnnatganatctccaacngactnntagananntcaagnatnntnnnatagnnannngncgcnaggnnagaactngcaaaccntnccnnnctnncaggntcggnantgntnnacgngtnatgangntgnggcngattctngnnnngtgcnnangtagntnanancgnntngnttgntggngngcntnggntgtgnntgcncatnnatnncngnnngnnncntnnnagtnngntgntnagc

SEQ ID NO: 126290 - DNA, 292 bp, Glycine max
  Clone ID: PAT_MRT3847_85047C.1
cgcactttgagggaatagacaaaatcatcgtctgtgatcaaaatgtggccgtttgggttactatagtatggctcccagccagtatgtttatctatgatgggttgcgtttccttcgactgacatggatggatatgcggtagtcctacctggatcgcttgatctggagcgaggcgagaaatactaccaaccgctttgcttgataatggggaacacacacatagagcaacgaaactgaggactaacaggcgaaacccctatcaattgttgcccgatgggggataggaggaggaga

SEQ ID NO: 126291 - DNA, 1167 bp, Glycine max
  Clone ID: PAT_MRT3847_85048C.1
ctgcttttgtctcctgcctcccacatttcaccaccccctttatccttatctcctctcttcattgttctgctcttccccttaacaaacaataactctatttaaagcacacacaaagggatcatatatcttggttgcaccttggtaaggtgagaaaatatggcatttgcaggaacaactcagaagtgcatggcttgtgacaaaacagtttatctggttgataagttgaccgcagataaccgagtgtaccataaggcttgcttcagatgccaccactgcaaaggaacactcaagctcagcaactataactcttttgaaggagttctttactgcaggccacactttgaccaactgttcaaaagaactggtagtcttgacaaaagcttcgaagggacaccaaaaattgctaaaccagaaaaaaccggggaagagaaacctgcagcaaccaaagtctcaagtatgtttggtggaactagagataaatgtgcgggttgtcagaaaacagtgtatcccactgaaaaggttaccgtgaatggaactccttatcacaagagttgtttcaaatgcactcatggagggtgtgttattagtccctccaactacattgcacacgaaggcaaactctactgcaagcaccaccacatccaactgatcaaggagaagggcaatttaagccaacttgaaggtgaccatgagaagagtacagaggaagagaaaatcaacggtgaagtggttgcagctgagacatgaaatgaaggctcgagcttgagttatgacaaatgaatattctcttcctcaagttccatatttctgtatcatgtgtttgtgctatatctcctgctttatcattatggagtccataatgctcttgaaaaatatggtaatcccttttttttttgtggtcggggacttggggtgtgtgaaaatccgtcattttgttttctgttgctgtgaggttgtggatactaaaaatgagacttaatggcatgcgattctgaatgtgattcagaagccagtgctactgaatttgtatgaactctcttttgtattcatattgatacatatacatacatcttaatccccgaaaaaaaaaaaaaaaaaaaaaaaaaaaaaaaaaaaaaaaaaaagctaaaaacaataaaaaaaaggggctgcccttcaccatttggc

SEQ ID NO: 126292 - DNA, 1117 bp, Glycine max
  Clone ID: PAT_MRT3847_85049C.1
ctgcccacgcgtccggcctccaataatttaggacaaatattggacaaaatgattgtcaacgacagtatatttgttggggtgtctgctttttgtctcctgcctcctacatttcaccaccccctttatccttatctcctctcttcttcatttgttctgctcttcccctctatttaaagctcacacaaagggatcatataccttggttgcactttggtaaggtgagagaataggaaaaagggaaatatggcatttgcaggaacaactcagaagtgcatggcttgtgacaaaacagtttatctggttgataagttgacagcagataaccgagtgtaccataaggcttgcttcagatgccaccactgcaaaggaacactcaagcttagcaactataactcttttgagggggttctttactgcaggccacacttcgaccaactgttcaaaagaactggtagtcttgacaaaagcttcgaagggacaccaaaaattgctaaaccagaaaaaaccggggaagagaaacctgcagcaaccaaagtctcaagtatgtttggtggaactagagataaatgtgccggttgtcaaaaaacagtgtatcccactgaaaaggttactgtgaatggaactccttatcacaagagttgtttcaaatgcactcatggagggtgtgttattagtccctccaactacattgcacacgagggcaaactctactgcaagcaccaccacgtccaactgatcaaggagaagggtaatttaagccaacttgaaggtgaccatgagaagagtgcagagcaagagaaaatcaacggtgaagtagttgcagctgagacatgaaatgaaatgaaatgaaatgcttgagttatcacagatgaatattcccttcctcaagttccatatttctgtatcatgtgtttatgctatctctcctgctttgccaatatggagtccataatgctcttgaaaaatatggtactccctttttttgtggttggggtgtgtgcaaatccatcgttttgttttctgttgttgtgaagttgtggattctaaaaatgagacttaatggcatgcaattctgaatatgtgattcaaaaaaaaaaaaaaaaaaaaatctttaaaa

SEQ ID NO: 126293 - DNA, 350 bp, Glycine max
  Clone ID: PAT_MRT3847_8504C.1
cttcgggccaaagctaaaaaacttttatttcatttttcccgaaatgcaaaaaatattaactttaaacattcaaatccactcgggaaaaaaacattacattggtcacaaaaaaacagggctcccaccacgagctataaaagggcccccaaaaaacagggctaacaaaggggaaaaaggtaaataatttcgttaaaattaaaaaggccataaacattaaatcccccatgccaaagggctggaatgttgaaatctcaaataacctataagcctttaaaagttttcacttgggaccccccccaagatggggcattattttcgcaattacaggacccacccttggatttgattgg

SEQ ID NO: 126294 - DNA, 1422 bp, Glycine max
  Clone ID: PAT_MRT3847_85050C.1
ggggggaggttaccttaagtttaattttttattcacgtttgtttcttctgattctccattatccattttatgggttgctgctataacccttgtggaaccttccttcttctaacccaagtcgcgcgcacgcagcacctcttgcttcttcttgaaccctagcctcttcgttgttgttccattgaatctcttccacattgaagcaaccgtagcctcttcgtcgagttccttccgacgagttcgaccttcccggctggaacttccgaatcaaggactgccagcagggctttcgctccaacgtcggcaacaaagacattggtctcacttcgaagaaaccagggaagacgcaggtcatcaatcagttcttggtgaacaacagctggtaccttgtttgacttggctgcaaacggaaacggcatttggcgttcagggatgatttttaaaaccctaaaactccactactttggaggcagtctcaaattgaaggttttgcttctgcactgcatcttactgaatcaaggcgtgaagcttcaaaacatagagtaccaacctggttccactcttacaagttactagtttatgcaaatataactcaacaaacacaatgctggtctttcaagcaaagtgcattaaacacatggaagcttttactcaaaggtttatatctagatggtccgttacactttacgctcgttactctgatactcctcagaagaagtctaagcttgctcctttgcaggagagaagaatgatggaccagtgtaagatatttgcaaaagcaggtgatggaggtaatggttgttctagcttgcgcaagggaagacctgatggtggcaatggggggagaggtggtgatgtgattctggaatgctctcacagagtttgggacttcagtggtttgcagcgtcacctgatagctgagaaaggaggacctggatcataaaaaaagttgataggtagcagggatgctgataagggcaatgcaaggggagcttgtggggtgaaacaggacagaaaggtgagcgaattcagagtttgaaggagaataatttcaattatggtatctaagtggatggaaaatgtgacctttttgtcaatgaacaaagctgaagttgtagatagaggcccatgaatggctggcttttaatctctaacatgcccaattcaactttgtttagatcaatggggtggaaaaagatgaagctcttgagcagttttgaaccatgtcaaagaactctcctaaaagctcaagttgtttcctgacttggtggacttggaaaatgcttcattctcctaagtcctaatcagtgttctaagaatgttgcatagattttaaaaataaaatttgttgtctcgttaatttttaactaattctctttgcagatgttaattctgatctcaaggtattgatactcatttcgtttc

SEQ ID NO: 126295 - DNA, 585 bp, Glycine max
  unsure (1)..(585): unsure at all n locations
  Clone ID: PAT_MRT3847_85051C.1
tcggattcggctcgagctccattatccattttattggttcctgctataattttttttgggtttcaaacgggattcttggcaaagaagcgacatttggtgttcagggacgatttttaaaaccctgaaactccactactttggaggcagtctcaaatcgaaggttttgcttctgcactgcatcttgctgaaccaaggcgtgaagcttcaaaacattgagtaccaacctggttccactcttacaagttactagtttatgcaaatataactcaacaaacacaatgctggtctttcaagcaaagtgcattaaacacatggaagcttttactcaaaggttgatcctcaactcttttctgccactcgcttaatgcacaaaaaaggacaaattgtgatttatttaaagtttcttagctgagcactgcattggggttttgggtatttgtttataggagagaagaatgatggaccagtgtaagatatttgcaaaagcaggtgatggaggtaatggttgttctagcttgcgcaagggaagaccttatggtggcaatggggggagaggtggtgatattatntcttgaatgctctcac

SEQ ID NO: 126296 - DNA, 567 bp, Glycine max
  Clone ID: PAT_MRT3847_85052C.1
ggacgcgtggggacgtacacctctgtcctctggctttgcaaattgttcggtattgaactctgctactctggggctttcaggtactaggttcagtggaggatcgacttcacaagtgtttaacaaccaagcgcctcaatttgcaagcttttaagtttcaggattggtacataatatatcagtatgcgggatagtgagaagaagttaaacaacaaaggatctaaaaaatccaggcctttgaatgtgcataagaaaggacaagggaagaaggaagaagtcgaggtgggatcaaaatctcacacaaaaactgcttgcactgatatatcaaggaagagagttatctcttctctcaaggtcaaagggccacgtaaggaagagagttaactgtggagaaggttggaaaggtcatatgtatgggatacttcttaattgatttttcctattgttattataagaaagaaaggtatgctctatgtcacttgaaatttatcacatgaaaaatttaggggaccatatcatttaaaggaattataagtatataaatggttggtttatttagtattgggggag

SEQ ID NO: 126297 - DNA, 764 bp, Glycine max
  Clone ID: PAT_MRT3847_85053C.1
ttcgccgataaactcgcctttgccctaccctgccgctcattcctcgcccctcctgtccgtgttcgctctctccctccctccgccccttttctcttccccgccctatcttcctcccccaccctctcccctccccgcccactctctccctctgtccctctctttttccccgctcccccccttccccccccccgggtcatccaaattcacaacattactttgctaatcaacccaaccctaattctctgtttttaatcccaattttcatccctttggttttcctgatcagaatcttccacccatgtcgcgagtcttcggtagatggaagaatgcgaaggaaatggcgttgctttcggggtccctgccacgtgggcaccatcgaaccgggttcaatttttgcccaatttcgacccacctgaacatgatcgccggccaccggtggcgggaggctccggtgggggttcaggagcggtacaagtgggaccgcggcgggtcggacgatacctcgtcccggaagatccgggccgaggcgaattgcccacgttgcaccaaagacatgaaccttgttttctacaatcgccactttcccaccccacaaattgaatctgaattgggtggtggagaaagagaaaagggttaccaatcggtgaacctttgcccaagttgcaaaactgcttattactttcgcccttatgacactacacctttgcaaggtacctttgtggagattgtagggtcactagtactaacaataaatggtgtaataa

SEQ ID NO: 126298 - DNA, 1361 bp, Glycine max
  Clone ID: PAT_MRT3847_85054C.1
ggtaatattcttctgtggttgctttattttctggccactttccacaagcatagattctcatagagagtccagagagagccctctctcctagctgtgcagcagaggaatggatgattgtgctctgctggctcgagctctctcctagctgtgcagcttaggaatggatgattaattgtgctctgctctgctttgctttgattctctctgctcataaaggtttcctgcttttgtctttgtctttacctctctccttttcatggatacccttctaagcggttgcagctgcactctatagtcactaactaaacataacatggcaatgcatattcacacgttttattccaagtccaccatacccttcttcttctgggtataaaggggcatcactatcctgcattttcttcattgcagaacctcttcatactcattgcagttgcagtacgtgcggggtgggagtgctttcaacactttctcttcaaccagcaaaatgagtcatgcacattctcatatgggctcaggtagtagaaccactcgaagagctttcgagtttgggaaaacacatgtagtgaggccaaaaggaaaacatcaagccactatagtttggctgcatggtcttggtgataatggtttgaggtatggatgtcatcatctcttcaataatggcataggtcattctaacattgccacaactatcacttattcattcttgtactggttgttctatattctcttttcctttgtggaacctttcacttctcttttccattctacctcacttaatcttttaatgtttttctaatatttacctttttctttcctcaatctttctttttgcttttctttttcattcggctctttcttacttttggatagacacagtatatagttgaggcatatgtaaacatgggaatggatcctcttgtgtgaaattttcacatgatctagtaacatgaaaattttgtctctctttataaacatgcgagtcataaatcctaaacgatattggtgaatattatgaagccagagatggacacaaattttcccatgacatgaccatatcaaatgaaaattcaacatgagaagattcattcccgtgtagacttttttgttgaatcttcaccctcatccttcacctgcccaaaagtactcttccacaatttttagcaaactcaatgtttggttagggaactcaaggagtttacaagctggatctagttttcacttctttcaaatccaaaagtttgtcctattcttgttctgtgtctaacctcattctcttgcttcaagtacacaatccgtatatgaaggatgaaacttttatgagaaagaatatcaagtattcggtgggatccaaaattggt

SEQ ID NO: 126299 - DNA, 333 bp, Glycine max
  unsure (1)..(333): unsure at all n locations
  Clone ID: PAT_MRT3847_85055C.1
cgcgagcggccgcgcgggaggacccaagcggacgcacgcgagcacgcgacgggagagcccnncganagaggcaccnaaaggcaagacacgggccgncgnnnnacaacgccgcgaccgggaaaacccnggcggaacccaaccgaaccgccgagcagcacagccccctttcggcaggtagcagaagaacgaatttttttttttccgaacgcccnacccaacagnggcgcagccagaagggggagggggacgcgccccgcagcggcgcangaagcgcggcgggggaggnggagacgcgcagcgggaccgccacacaggccagcgcccaagcgcccg

SEQ ID NO: 126300 - DNA, 542 bp, Glycine max
  unsure (1)..(542): unsure at all n locations
  Clone ID: PAT_MRT3847_85056C.1
cttacgcattaggaaccaagtacagtttttgacctttcgttttccggatctagggtttcccctttgtgatcatcatcatcttccacgcgcacacccatcatcaaaccctagctacaaccgaaacttcgcattttttcacacgcaaaaacaccttccgccggccaccgtgtcggagattcacgatcccacacaaaccctacgatttctcggaacattatttttttacccgccaccaccttcaatcacggatctaaaactttcctctgaaacaaaacgccctaattttttcatttttattttattttatatatacattccctcgctggtaatgcaaaaatcagatgaatcttaaagcgttgttgttgttgttgacacggccatgatgacggtgatgatcatgatgaatactttttcccttacttccacgaaatcttgacgaaattccaaagacttttttgtgtggtgttgtgatttgatttgaaggaacaaaaaaaaatgagaatgtataaatcggtggtgtaccanggggaggtggtggtggg

SEQ ID NO: 126301 - DNA, 455 bp, Glycine max
  Clone ID: PAT_MRT3847_85057C.1
aagggtaagcgtctttcatccaaagctggttccttttttgcttattttgaaagaaagaaaaattggtgtttttgttgatggaacccattggactaggttgtggaatgttctctgggttggtaggagtggaaagccctttacaacagcaacaacaggaacaaaaccctcaccatttgcaacaccatccccaaatggttccctatgccacacaccatgacactgaaaaccctcatcatccacaccttcaccattcaatcaaacaagggtaccctccttttttatccaagactaaacaacaacagcaacagcaacagcaacaaagctctttcagtgatgatgatgagccagggtctgctgatgatgaccccaagaagaaggtctcaccatggcagagaatgaagtggactgataccatggtgaggctcttgataatggcggtttattacattggtgat

SEQ ID NO: 126302 - DNA, 461 bp, Glycine max
  Clone ID: PAT_MRT3847_85058C.1
cacgcgtccggccgaggtcgaggtgcgtctcaagatgacgccggcgaggcgtgacttgaaatgagtttgaccacgtcgtctgttgctggagtagatgcgggcgtctggtgcacgatttgtaactcaggcacaagaaccagacgctcattccgccattccctgcgcggttgcatacacagtggtatgagcagtgaactaaacgcgaacgtaagttcgatatgcatttcctaacgtcgacgtaaatgtgatggtagtgatacttcagactacgcgtagaactgtaaaggggcgcgtgttttctctatgaaacgatgagtgccgccactatatcttactgtcttaagattgcgatgcatacaaaactgatgccctttgtaagcgtgctgcggaatactttcattctcaatggcgactgcgatttgaacgacggaggaggagaggatcgagagcttaaggctttc

SEQ ID NO: 126303 - DNA, 375 bp, Glycine max
  Clone ID: PAT_MRT3847_85059C.1
gcttgaagagagtcagagccaacgacaaattgaagactgaagccaacaaatctaacaagagaatctccaccaagagacaacccgttgcccccagagaagcccacaccgtcaagggtgatgttagattccaacaccctcaagctttcagagaattctggtaaggaatttgctcaagagttattggtgcggacaaaaggagatctataacgtacatagaagcttttatgtttgtatagtgatcattgcattgcttatatatcatccccaaaccaaaaaacttaataccctagtcaaagaagcttaaaaaaaaaaaaaaaaaaaaaaaaaaaaaaaaaaaaaaaaaaaaaaaaaaaaaaaaaaaaaaaaaaaaaaaaa

SEQ ID NO: 126304 - DNA, 381 bp, Glycine max
  unsure (1)..(381): unsure at all n locations
  Clone ID: PAT_MRT3847_8505C.1
gaattcggcaccaggcagaccgaacatcaaacaacccgtcaccatgtacaagacactcctcctcgtcttcgccgtcctggctgtggcctccgcccagtacctcgcctccccgtacgtcaggaccgtgggcgcctaccccgctgcctactctgcctactctgcctaccctgcctactctggagtcagcacctatggcgcttacccctacgcctactccggccttggctatggttctgcctacctttaccgttaagacaaattgacgctgcagacgccaatgttctcaccggtgtgcccactgtcccagcgagatctacgaccacagcgagctcgacagtgtgccttcttacaacattttttttcggcgccannnatgtccaa

SEQ ID NO: 126305 - DNA, 765 bp, Glycine max
  unsure (1)..(765): unsure at all n locations
  Clone ID: PAT_MRT3847_85060C.1
tttctcgcgtccggtaaaaatgtagatgtaatgattttgggaagatagcgtatcatccatggcgtgaaaccctagttaatagttagtaccaaatgtcaaggctattctattacgatgtgatgtcccaccccacactaaagtagagtcagtgaggcttgttgagttcatgtaaagaaaagttcggagtgtcttggtggtgttatcggtgttggggggagtggagggacgtcactcttgtcgtctcccttcgcctctctcccaattggggttggtggcagggcgatggagaatttggttagagaggggtttatacagcttccaattgattgggcatgtttcatatacatcaagaggacagaggtagcagattacatagttggaggtgtaatggcttgtgaaagttctcgttttgatgccgtcatagagaataaagtccccttagtcttgagtgtgggagcattagacatggtgagctttggagcgaaagataccataccactaaagtttcagcagagaaatatatatgaacacaataaacaggtttcacttatgcgaacaacagtagatgagaacagaaaatttgcagatttcatagcaaataaattgaagaattcatcatctatgatttgtgtttgccttacagaaaagtgtgtctctgctttagatgcacccgggaaagccttttatgatccagaagcatcgggaactcttcttcgtgaatacanaacctattcaactaatgatgattgacaagtacaatgattg

SEQ ID NO: 126306 - DNA, 409 bp, Glycine max
  Clone ID: PAT_MRT3847_85061C.1
cccacgcgtactattgatttctctactttaggatcaagggagctaatgaaggagactaagactatagctgataatattcttgcagttgacatcacagaggcttacgatgctaccaaggctggaaaaaagaaatgagcttttttacatcctgggttgatttgaaagtgctatagcttttgggatatactactggccattccactttctatgagcgacctataatgagatattctgctgtaagtgttacattaacccgatgctcagttggtatctaactcgggatctatcactggcacgaccaattttgagagctcagttgaatgctatgttctcaacgtttcactattgtgatgaacagtgaaatgaacgtgttagattctgtggtgggaactgaactctccaagcccct

SEQ ID NO: 126307 - DNA, 304 bp, Glycine max
  Clone ID: PAT_MRT3847_85062C.1
cggcttctagaagaccacagaaggggactctccactcagaacaatgaactccatatgcttgagggactacgtcggacttcgtcagcactctccgtacgccccacatttcgctggccagtcccgccccggcactccccaccggaaattccgcgtcgtggccggaaaattcaatcccaggctgaacggccggaacctccgcgtggcggtggtgggcggcggtcccgccacaggagcgcgcacggagaccctctcgaatggcggcgtgaagacgttcctgatcgagcgaaaaatgaacaactgcaag

SEQ ID NO: 126308 - DNA, 379 bp, Glycine max
  Clone ID: PAT_MRT3847_85063C.1
ggttaattacggggttattattaatggtaattgaacatttcatttaggaatcttagctaacttgctttggctaatttataccaagattgaatcactgtcaatgggatcatatgaacgtacaagaggaaacatcacaaatggatacacagaactgaaagactataatcacacttataaggtcactgtgatgtgcatgcaatacaccaaaacaaatgtgatacaacttgacaaaaatactttgactgaagctgattaaaattggctttctgtgtgaaactcgacactggtcttaggccacgcctgagtgctgctttccacacaagatcgattctgttaacataaatggccaccacttcgcgatgagaccaaccttcaaggc

SEQ ID NO: 126309 - DNA, 782 bp, Glycine max
  unsure (1)..(782): unsure at all n locations
  Clone ID: PAT_MRT3847_85064C.1
agcacatcgcngcctccaccgggggcgcctccccgggncggatcgtccgcgcgatcggcgagcttgcgcggtcgatcggctcgagggactttgtcgccggccaggtcgtcgacatcaactccgagggcctggccgacgtggacctcgagcgcctcgagttcatccacgtccacaagactgccgcgctcctcgagggtgcggtggtgctcggcgccatcctcggcggcggcaccgacgacgaggtcgagaaattgagaaaattcgctcgctacattggtctgctctttcaggttgttgatgacattctcgatgttaccaagtcatctcaggaattggggaaaaccgcaggaaaagaccttgtggcagataaggttacttaccccaaacttttgggtattgagaaatctaaggtgtttgctgcgaagttgaacaaagatgctcaggatcagcttgttgggtttgaccctgttaaggctgctcctttgattgctttagccaattacattgcttataggcagaactagattgtttgtttaggaaagtttagatttatgaaatcatattggattaacatttacttattggctattgcaatgcaactagggattataaaataataatacccccttgcccttcttctatgtgccttagtcgtcaattttgtatgatgaatgaatataaatatttttataataccttaaattgtaattatatattatatatttatattgtatacttctacctatattaagttgagtaaaatggcaggagtatttaagttc

SEQ ID NO: 126310 - DNA, 225 bp, Glycine max
  Clone ID: PAT_MRT3847_85065C.1
ggctcgaggtttctttcgttaatttctttttatccctttttttattttcttgattaccttttaacatctcgatttggtttatgtgaaaagaatgcaaatgaagtcgatactgcttttgtatttggttggatagcaaacggcggatgctctacctgaatcggggagtactctaatcaaagaacaaaacttgatattggtacctgaccttctacaggattccctgag

SEQ ID NO: 126311 - DNA, 380 bp, Glycine max
  Clone ID: PAT_MRT3847_85066C.1
agccgggaagggggaaaaaaaataaaaacctcaagggacccgcccttgggaaaaccctgaacgatgtgcacaaaaacccttacgtataccaaactcgataacctggttcctaattggcgggtgggtccccgttaaactggtcatcccttggagcaacgtctggggaataaaccccccgaacccgaagggctcgctgcttattgatttgggccacctaccactggggcttgggccccaaccccggggttggccccccccaaataacgggtccctttgggaaacagttttaacaggggacgtccctgctcttggccgaatttaccttcatgggaacagtttttaaagcggaattcacgggggcttttccgggaagggacaat

SEQ ID NO: 126312 - DNA, 704 bp, Glycine max
  Clone ID: PAT_MRT3847_85067C.1
tacggctgcgagaagacgacagaagggaataacatgataatttatgattacagataatttataacctttcttctcgctagttttgaaattctttcaaagtttatacatttgatttacttcatgagatttttaatgtaattattgaattagtaaaattaaatatctataataaaatataaaagatatattattttactaaatttgttatcttttatattttgaaaagacttaagtatgctattacatctattccattaaataatgagatgccataaccaggttatgcaacagaaaaaaatgatttatttgtgacattatttcttaccggaaaaatatattaatagaaattaaaaaaatgtaatgtttgagtaaaattaaggattaaatgaaaaaaaattatactgaaaaaagtatttttgtcaagacgaaaattaaaattatctaatattttatgaattaaaatttatttaatatttttaagtattttttaaaaaaaatattttgaattaaaataaatgtttggatctttcttatctttaaaatgtcctaattaagtttcatttttcttttgtccatttaattttatattcttaacgaaccgacgtaaggctgggttattttagaatcataaatagtccgtttaaaatgtcagccacaaatctggcccgttcaaatctggccacaaatttggcttgttgatttct

SEQ ID NO: 126313 - DNA, 247 bp, Glycine max
  Clone ID: PAT_MRT3847_85068C.1
cgccaacataccgggggtaattgtatatcaactccacacattggtaacaaacgagaagaacattaatgggacaatagagtttaacacaaaccaaacttattcgcaccggaactaccccacccatgagccataacatttcttcttaaaacgcttgggaaaatccgacatagactatcacacccaaatgccgctccagcttaaaacccctcacgaagacgctccaccacgtgccgagttgactcctttc

SEQ ID NO: 126314 - DNA, 194 bp, Glycine max
  Clone ID: PAT_MRT3847_85069C.1
atgaataccttaagacatactatactactacaggtgatatgagcatttcactgggcgaaaccataaatgtactatattataaaataatattatcttattcataaaccttgcatttaacactttactgcaactatataattaaactattatatcaattactattaatcaactaaatatccgttttaaccttatat

SEQ ID NO: 126315 - DNA, 736 bp, Glycine max
  unsure (1)..(736): unsure at all n locations
  Clone ID: PAT_MRT3847_8506C.1
gattttcagatagggtcaccaatatattcagcaaaatctgttcggtttaaaatgggtcatcctaaagcctctttagatgccaccgatgatgaaatgtttgtatggacctatacttcccctgagtttccaatgtctaaggtatttaacatatcaggtttgtctactggttttccattgcataatttctgccttattgatttcttgatgcctgatatgaaaaacgagatgtggtttgctattaaaggatgcctcatttgagaatataattatacttttacatgcaattgtttgtagatgtgtatttttctgttgttaagtagtgttagttgctcaattatgatggaatttaggccattttagtcatctgtaaccttccaaataaaataataaattctccacatatncatctagttgaatattcatcctctactaatcatttcttttagccatcatataataatcatagttatccatcctggactggcgtggagcagtcaatcctgaaacagctataatcggatagctgatagcagcatgatggctatgttgatggcccgtgccaacttttaatgctgagataaaaatccaatttttattggagaacaataccgaaagcacctatggtattgcacctaagctttgtcataataatattcattcagcctaatatggtcactaataacttttattaatattttctctacanaattaactgatatgtaccacttttaaacta

SEQ ID NO: 126316 - DNA, 432 bp, Glycine max
  Clone ID: PAT_MRT3847_85070C.1
aaagctttctctcgtagcagaatgactcatcggcccgccaaactcgtctccgaacgggccgtatttggctcgagccaaccaggcggtccgagcacgtgtatatacacggcgaacggcgaccaccgcgtcctcggcctcgaagcaatccggcggttctcgagtggctgcgagcaaggtggacgaaggcgacaacgacgagctgaccgaagtcgacacagagacagaggaggaagaggaggagcggattgaggacaaggcacacctgaagaagctaggtagcgccggcgggtcggaggagactctggcgagcacgccgtcgcaaacaggagcgagggcagcaaagaagcgcaagctggacacgaagaccccttccgcagatgacgtgaatccgaccctcagtcgaacgcgaactgggaccgttttcaaagccat

SEQ ID NO: 126317 - DNA, 263 bp, Glycine max
  Clone ID: PAT_MRT3847_85071C.1
attattcgtccattagtatcttgtctagagttggtgcttgtgactgatgctgccatctggtcaggagcgtgatgcctcgggactgcagcagtcaggagggatgattgagcctgatgtgtacaagtgtttataacaagcattaactacacatagcattactctgcatggtactggaccaactctgatccactttccgtggaattgatcttatccatagaggcatgtaggcctaatgtctactataacatgtgaagttctgattg

SEQ ID NO: 126318 - DNA, 457 bp, Glycine max
  Clone ID: PAT_MRT3847_85072C.1
tagacggacaacagtcctttgacgatttaaccccaaatttttgctctgcaattgcaatatgcagatgatttcggggtttcttttcaacggaagcgccgtggtggctatggccgacatgaactgcttcgccaatgccagtgaccgaaagctcggtgttcagctccaaactatagccacggattttcaacgcatttccaagattcacgatcagctcttcgttgctctctctggtctcgtcacccgactgctaaacattgtatcaatcgccttagattccggcacaaactgctccagcctgcgtgaagagagggatatgaaaccagagacctttgcctgttcagtctttgttctgctctatgagaaatagtttgagtcatatttttgccagcccgtaattgctggattaggggatgaagaccaaccattcatttgcccaatggattgtattggcccaaag

SEQ ID NO: 126319 - DNA, 972 bp, Glycine max
  Clone ID: PAT_MRT3847_85073C.1
atttctcacatccgaatgtttcgctcctcgtatcctcctcatccttttatgcgtgtcttcccccaacgaaaccagcgagaccaaacgtgggcactatggctgccacggtgaaacaaatgtctttgatcgtgtcactgttcggcgtggtgtccttcattttgggtgttgttgctgaaaacaagaagcctgcggcaggaacacccgtgcccggtttggatggtgtctctgtcacctgcaagtacccagctgatccaactgttgcattggggtatctttctacagcatttcttgttgcatccactgtgactggatatctgtctttgttttacccttacaaaggaaagtctattccacaaggggttctgtttaagcacaccactttcacagtgttcttcaacatttctttgttcaccactggattagctgcagctatgctgttatggccaacaatcaccgaacacattcacctgacacgcaatgtgcaccgcaatatcaactatgaatgtcctacagctaaaactggtctacttggaggtggtgcctttctatcacttgattcatctctcctttggttgattgcccttatgctagctgacaatgctcgcgaggatttctttgaagaagaaggaagatggtggcaagggtgaatttggtgcagcctcctctgatgcttattatgatgccgattcaggactgaagggtagtgcctgaagtgtgctgcagagtagaaataagtgttgcatctggtatttctgtagttcccttttaatcatgcccaacaattccgtgaaatattgaatgtatatatatatttttaacggttgttctcggtgaacatttgttgtgtgcttaagcactagtactgcaggaaaaaaaaagcagaaaaaaaacatagttgtttagaaaatggattccttgtcagtaagtctcttattttattctttgaattttacacaaatttatttcagggct

SEQ ID NO: 126320 - DNA, 494 bp, Glycine max
  Clone ID: PAT_MRT3847_85074C.1
tgaaactctattaaactgtttcctcctagggttacctgcgaaaatcctccgtgagattgccatccatagaccattttcagttcatcaagccatggtcttgcacgttttattgaggccaaaatccgtgacaaccaagggtcgtcttctccagctcttgtgagggtttctacttcttaggcaattggtctcttacttaggccattcttaaggctgtttgtttaagttatatttgatgacattctaagttattacaacccttattagtgtctctaccaaaggtgtttggtgggagatttttcaacaaagtggttccttttccttcattgggcacaatcaaagaaaatatgggtcgcgtgtgagaacaagcaaacaaacgtagaagagacctcaccttcgtcgttttcaaaactatcgccaaacaactctgaaaaggccaccggagctacgccggagatactatggccctgttaagatccttcttagttctgtcttgg

SEQ ID NO: 126321 - DNA, 487 bp, Glycine max
  Clone ID: PAT_MRT3847_85075C.1
acgaatatcttgttgtttggagcgatccgagaaaaactctgtaaacatgttggtttaccaggacctccttacaggtgatgagcttctctctgactccttccgttacaaggaaattgagaatggaatgctgtgggaagttgaggggaagtgggttgttaaaggagcagttgatgtagacattggtgcaaacccttctgctgagggtggaggagaagatgagggagttgatgatgcagctgttaaagttgatgacattggtgacacattcatacttaaggagcaacccgcattctataatatgcggattgtgaccttcttgaatagggtgatgaagaatgcgactcctaagctcgatgcatacaactatgaggttagtaagaagcacatctgaggtacagctgaaggcgtggtcgctcgaattatagattaacgatgttatgctggagatatcgtaggctgggatgctagtagtgtggtagtatttacg

SEQ ID NO: 126322 - DNA, 1426 bp, Glycine max
  Clone ID: PAT_MRT3847_85076C.1
ccctcgcgtccgattaccactaaaatatcgcatccgaatgtttcgctcctcgtatcctcctcatccttttatgcgtgtcttcccccaacgaaaccagcgagaccaaacgtggtaacgctttgaatctttgaattcattcaaagatcccccttctgtctccctctctacgcatatcagggcactatggctgccacggtgaaacaaatgtctttgatcgtgtcactgttcggcgtggtgtccttcattttgggtgttgttgctgaaaacaagaagcctgcggcaggaacacccgtgcctggtttggatggtgtctctgtcacctgcaagtacccagctgatccaactgttgcattggggtatctttctacagcatttcttgttgcatccactgtgactggatatctgtctttgttttacccttacaaaggaaagtctattccacaaggggttctgtttaagcacaccactttcacagtgttcttcaacatttctttgttcaccactggattagctgcagctatgctgttatggccaacaatcaccgaacacattcacctgacacgcaatgtgcaccgcaatatcaactatgaatgtcctacagctaaaactggtctacttggaggtggtgcctttctatcacttgattcatctctcctttggttgattgcccttatgctagctgacaatgctcgcgaggacttctttgaagaagaaggagaagatggtgacaagggtgaatttggcacagcctcctctgatgcttattatgatgctgattcaggaccgaaggctagttcctgaagtatgctacaagtagaaataagtgttgcacctggtatttctgtagtttccttttaatcacgctgaacaattccgtgaaataatgaatgtacatatatttaaaatggttgttctcggtgaacatttattgtgcttaagcactactgcagaaaaaaacatagttgtttgtaaaatggattccttgtcagtaaatctctcattttattccttgaattttacacatttatttaagggggataccttaaaatgacgtggatctcttcttgaaatgttcatagtatttatttttatagcgtactacggtttctatgtttggaattaactttaatccagtagattccatacgactttgtgtgggatagtagcattataaattatgggtaaaataaagtaaattaaatactccaaacccacaacaattgagaaagaaggatgacatttggcgtttcttttgttgattatcatgtactcaaccctgctattgtttattgtcaaagataggtttgcaattcctactgacttgaaagtggctcccaatattgtttaaagaaatatttatctttataaatctttataataataaaaataaagaagtttgagcgtgaaattcttatacaattgagtg

SEQ ID NO: 126323 - DNA, 466 bp, Glycine max
  Clone ID: PAT_MRT3847_85077C.1
aattcggcaccagcgcaccagtttcaccgcacgaatatcttgttgtttggagcgatccgagaaaaactctgtaaacatgttggtttaccaggacctccttacaggtgatgagcttctctctgactccttccgttacaaggaaattgagaatggaatgctgtgggaagttgaggggaagtgggttgttaaaggagcagttgatgtagacattggtgcaaacccttctgctgagggtggaggagaagatgagggagttgatgatgcatctgttaaggttgttgacattgctgacacattcagacttcatgagcaacccgcattcgataagaagcagcttgctaccttcatgaagaaggttataaggaatctgactccaaggctcgatgcccagcaggaggagtggttaaggatgcacagtgagggaccaactaaataccctggtctctacataaagatttcccatttt

SEQ ID NO: 126324 - DNA, 623 bp, Glycine max
  Clone ID: PAT_MRT3847_85078C.1
cttccgcccaccagtttcaccgcccgaatatctggttgttggaaccatcccagaaaaactctttggagatggttgtttaccaaggaactcttacaagtgatgagcttctcttttactcctttccgtacaaggaaattgacaatggaatgctttgggaagttgaagggaagtgggtttgtaaaggagcagttgatgtagacattggtgcaaacccttctgctgagggtggaagagaagatgagggagttgatgatgcagctgttaaggttgttgacattgttgacacattcagacttcaggagcaacccgcattcgataagaagcagtttgttaccttcatgaagaggtttatcaagaatttgactcccaagctcgatgcatagcaacaggagttgtttaagaagcacatcgagggagcaactaaatacctgctctctaagattaaagatttccaattttttgttggtgagagcatgggtgatgatgcttgcttggtctttgcctactacaaggacggtgctgatgatccaacattactgtactttgcatatgccttaaaggaggtcaagtgctaagtgacttaatgtaccgagctatctaccaattttatctagtcttttttt

SEQ ID NO: 126325 - DNA, 586 bp, Glycine max
  Clone ID: PAT_MRT3847_85079C.1
gcacgagatccgagaaaaactctgtaaacatgttggtttaccaggacctccttacaggtgatgagcttctctctgactccttccgttacaaggaaattgagaatggaatgctgtgggaagttgaggggaagtgggttgttaaaggagcagttgatgtaaacattggtgcaaacccttctgctgagggtggaggagaagatgagggagttgatgatgcagctgttaaggttgttgacattgttgacacattcagacttcaggagcaacccgcattcgataagaagcagtttgttaccttcatgaagaggtttatcaagaatttgactcccaagctcgatgcagagcaacaggagttgtttaagaagcacatcgagggagcaactaaatacctgctctctaagattaaagatgtccaattttatggtggtgagagcatgggtgatgatgcttggctagtgctagcctactacaaggacggcgctgctgatccaacattcctgtactttgcatatgccttaaagggagggcaaggctaaatgacttaatggacccagctatctactcattttatctagtttttttttac

SEQ ID NO: 126326 - DNA, 234 bp, Glycine max
  unsure (1)..(234): unsure at all n locations
  Clone ID: PAT_MRT3847_8507C.1
acatttgctaacgtgtttcatgtctgattcccgttccttcaaagccgttgtgcttcacgatgttttcttatttgaatgtttggnttgcgcactgttgccacaaagcgcaaacatgctgctttcaaaccatgttacttgacaactcttttctctaccggctggaccgaagttaatattcattccttaaacaattgtacccatcagtctcgtacaccggactttacgcttccgata

SEQ ID NO: 126327 - DNA, 419 bp, Glycine max
  Clone ID: PAT_MRT3847_85080C.1
tgctacacgcacgcggataagcaagatgatgaggcttattaatgagaggcgaattgagcaacgaaaagagcctcggaatttcacggaacattaacaggaacattaacgcggaatgggcagaagcctgaccagaggcgcgacctttgctgcacaatgagattgtgacaaaaaaggagtggcatgacgtgtgcacaaccaagaatacaatcgactattgggtggtcaatgggggggagaaagtacgggagaaattgctactggaactgggagaccacctgacggaccccgtcactgacatccataatcacaatgacgaccactatgatgaaaggcgctcatgtaggaatgcaagaatgactggcagctttgctggcacctttgcctgcccttcaatttgatctagaaaaatatcgagaaaa

SEQ ID NO: 126328 - DNA, 187 bp, Glycine max
  Clone ID: PAT_MRT3847_85081C.1
atatcatctttttatcatcaccatgaatcactctagcatcattcagcatgattccccttttatctttctaccagaaggccaaaacattattaagtggggggctctgcccccctcttaaatttcctggtaggagaggaaaaaaaaaaaatttggttccagatgacaccaaagggatgagtgccccccc

SEQ ID NO: 126329 - DNA, 968 bp, Glycine max
  Clone ID: PAT_MRT3847_85082C.1
attcccgggtggacgcacgcgtacgcgggcgcgtgggcggacgcgtgggcggactcttggggctccgtaccagtttcactgcatgaattttatagaaaactctgcaaacatgttggtttatcaggacctccttacaggtgatgagcttctctcggactccttccgttacaatgaaattgagaatggaatgctgtgggaagttgaggggaagtgggttgttaagggagcagttgatgttgacattggtgcaaacccttctgctgagggtggagaagatgagggagtcgatgacgcagctgttaaggttgttgacattgttgatacattcagacttcaggagcaacccgcttttgataagaaacagtttgttaccttcatgaagaggtttatcaagaatttgactcccaagctcgatgcagagaaacaagagttgtttaagaagcacattgagggagcaactaaatacctgctctctaagattaaggatttccagttttttgttggggagagcatgaatgatgatgcttgcttggtctttgcatactacaaggatggtgctgctgatccaacattcttatactttgcatatgccttaaaggaggttaagtgctaagtgacataatgtaccaagttatctactctcattttacctagttttttttttttaagttctgtcctaagttacttaaaacttcgacctggtattttgattttaatggtgagacgtgttctactgctacatcataattcccatcaaatttaattatcgatgggttagaatttcattaatttatgattttggtcgtgctagattcccggaagtttcttttgaagaatttttgggtgtgtactagaaatattttaatttggcttcatggttttattgataaggatttgaatacgacttgggaatttaatatgcgatcagaatttttaattcaataaaaaaaaaaaaaaaaaaaaaaaaa

SEQ ID NO: 126330 - DNA, 1331 bp, Glycine max
  Clone ID: PAT_MRT3847_85083C.1
cgcggggccggacgcccgcgtcgacccatccgtcctcgcgtcgctccgcaccagtttcaccgcacgaatatcttgttgtttggagcgatccgagaaaaactctgtaaacatgttggtttaccaggacctccttacaggtgatgagcttctctctgactccttccgttacaaggaaattgagaatggaatgctgtgggaagttgaggggaagtgggttgttaaaggagcagttgatgtagacattggtgcaaacccttctgctgagggtggaggagaagatgagggagttgatgatgcagctgttaaggttgttgacattgttgacacattcagacttcaggagcaacccgcattcgataagaagcagtttgttaccttcatgaagaggtttatcaagaatttgactcccaagctcgatgcagagcaacaggagttgtttaagaagcacatcgagggagcaactaaatacctgctctctaagattaaagatttccaattttttgttggtgagagcatgggtgatgatgcttgcttggtctttgcctactacaaggacggcgctgctgatccaacattcctgtactttgcatatgccttaaaggaggtcaagtgctaagtgacttaatgtaccgagctatctactcattttatctagtttttttttacgttctgtcctaagttacttgaaactttgacctggtattttgattttaatggtgagacgtgtgctactgctacatcataattcccatcaaatttaattatcgatgggttagaatttcattaatttatgattttggtcgtgctagattcccggaagtttcttttgaagaatttttgggtgtgtactagaaatattttaatttggcttcatggttttattgataaggatttgaatacgacttgggaatttaatataattcccatcaaatttaattatcgatgggttagaatttcattaatttatgattttggtcgtgctagattcccggaagtttcttttgaagaatttttgggtgtgtactagaaatattttaatttggcttcatggttttattgataaggatttgaatacgacttgggaatttaatatgcgatcagaatttttaattcaaaaaaaaaaaaaaaaaaaaaaaaaaaaaaaaaaaaactcaagaaaccaaaaaaacaaagaattaatccaggccgaatccttccggggcacgggccgtcgttttacaacgtcgtgactggtagaaaaccctgggccatataaagaacaagcttgcataagaatttgatctccgtatcccgcgattaagaattacaccgataaataatttttattagat

SEQ ID NO: 126331 - DNA, 400 bp, Glycine max
  Clone ID: PAT_MRT3847_85084C.1
ttatttttctgtttaaatcacatacatattacttctaatcttagaccttatataaatgggggagggtccctcccataatgtttctttatatttaacatacaaagttctctttctttatttctaatatttgattgtataaatatctttattgttaacctccctgtatttttcttctctcaattactttcccttttttataccatacttattttttaatttatcgaaatcttactttctttttttttatatttctcttttctttatcttttacttttctttatttaattttatatttatatcctattctttcttatatttctcttttttacataaattatttatgtcttcttttattttttaattcctttactatccctttatattttttttatccttttcc

SEQ ID NO: 126332 - DNA, 267 bp, Glycine max
  Clone ID: PAT_MRT3847_85085C.1
ccctctttttttttttggggggcactgaaacacaactccccttttcctcccccaagccagacacattaatttccatcgtagtccggccacataaccctagtacccaagttgattacctctaacccagcattttctacatggtaagacctaaatgacaaacaatcaatgcggagaggcggcttccactgctatgcaaatcaatcacacttacaatccagagggcttgtaagccacttacccgttacactgcacttgtcagacacaggc

SEQ ID NO: 126333 - DNA, 154 bp, Glycine max
  Clone ID: PAT_MRT3847_85086C.1
cttacgaacctagtctatactttgtattcaagagaacgctctgagaactttgctgataaaaaggatctaatatgagattgggtgatgtcaattgtgttagagggtatcccacatacaattttccttagcacagggccagatatcactgtttaca

SEQ ID NO: 126334 - DNA, 377 bp, Glycine max
  Clone ID: PAT_MRT3847_85087C.1
agcttgttgatttttatctcaagagaaaaattcagcagaagtctcttcctattgaactcattaagcaagtggatatttacaaatatgatccatgggaccttccaaagctggcaggtactggggagaaagagtggtatttctactgtccaagggacagaaaatacaggaacagtgcacgtccaaatagagtcacaagagctgggttttggaaggccactggaactgacaggcctatatattcctctgaaggaaagtgcattggtttgaagaagtctcttgtgttctacagaggaagagctgctaaaggaatgaaaactgactggatgatgcatgagtttaggcttccttgcatatcagactcatgccctgccaaaaaa

SEQ ID NO: 126335 - DNA, 371 bp, Glycine max
  Clone ID: PAT_MRT3847_85088C.1
taggcaagccgacgcgtcactcaaggctggtaaatggcagcgcaacaagtatgttggtgtatctcttgtgggaaaaactctcgctattctcggatttggaaaggtcggatctgaagttgctcgtcgtgctaaaggcttaggaatgcatgtgattgcacatgatccatatgcttctgctgaccggtctcgtgcaatcggggttgaactagttagcatggaggaggccatgacaactgctgactctatctcgttacacatgcctcttacgcctgcaacggacaagatgctcaatgatgaggccttcgctaagatgaagaagggtgttcacattataaatgttgcacgtggtggcgttattgaccatcaatttt

SEQ ID NO: 126336 - DNA, 845 bp, Glycine max
  Clone ID: PAT_MRT3847_85089C.1
cacgcgtccgcgacaagcaagatggaacaagagtctagattgtaaattttgaaatttggctgagcaattttatttttatttatagccagaggaaaatcaggagcatgagttacttgcttcataatgttgaaaggcaattaattaatttggagtttggtgacagtaaaaagaaggaactcaggaatgcattaaactaaagagaactttattttttctcattctcattactctctctttgcagagaagcgaagaaatgtcggtgagttcgagttccaggggaagaataacgacggagcttcaagtcccgaagaaatggacagacagagaaacaagtcctgagagaaccaaggtttgggccgagcccaagcccaagcccaaaacgcccagaaaagtttccgtcgtttactacctctcccgaaacggccaactcgagcaccctcacttcatggaggttcctctctcttcgcctcacggactctacctcaaagacgttatcaaccgcttgaacgctctccgagggaagggcatggccaccttgtactcctggtccgctaaacggagctacaaaaacggcttcgtttggcatgacttgtcggagaacgatttcatctacccgacgacgcaagggcaagactacattctcaaaggatcggaaattgtggagcacaatgttaccggcgccggcgcgagggttaacaaatcggaggaagaatccgattcgccggtggtgatcacgaggcggcggaaccagtcgtggagctcaatcgatatgaacgagtaccgagtttacaagtccgaatcgttcggtgactcggctgggagaatcggcgccgacgcggcgactc

SEQ ID NO: 126337 - DNA, 869 bp, Glycine max
  unsure (1)..(869): unsure at all n locations
  Clone ID: PAT_MRT3847_8508C.1
gacttttgttattttgtctcatgcaatttctattataaatttgaataaatctgtcaaatttttctaacccaagttccaaacttctctcgtttccatcacaattctctccgaatcctggtgggtctgcacccgtttgagtgtttgaccgatcgttcgttcattgcagcgtaatctgctgcaaagcgagcgatgaagggtgttggaggatatcacgattggccttattacgcgtcgccgacttcaaatttatcagctttcgcggcgccttttagtgtgaatccctacacttcaagcgaggcttcgtctcagttcatggatacagctgaatccgcagaaaccctgcccccaattcagtttcaaccctaccggtacgatttcttttcgggccccgttagagaattggattccgctgcgcaattctctcatctgggtttgccttcttattccgcaagatcgaaccttgtcgaagcccaaccctacactgcgtcttctgcaattcacgatcactcttctaattcggcggcgccatatcattggtcttctggggctccctcttccgattggccttctctcagggaagctaataggtctcctgaattagggttttctggtcagagtgcggnttcctgggaccagtttccggagttcaatagcccgtggtaaanggaaacangtcggagttgggagcaatctcttccgtaaaggaaacaaatgccgnttggntccggttggtgaacaaaggaggaaccaagggaatcaagatgtgaaggactcttctaaatgngangttcccaaattattggatggggaaacttcaatgggccttcaagtgcaaatcatttccttaatncatttactggtggggaact

SEQ ID NO: 126338 - DNA, 320 bp, Glycine max
  Clone ID: PAT_MRT3847_85090C.1
accggtcacggcgtccgcgtacacgtccgacgacgcatacggtcacagttgttgatgcagatgctgatgctgacatggatggctaacagatgcaactacatgtgctccaactggctcaggctgcagaagacgctaaggctcttgactaacccgatgaggcatcgggaaaaggatgaggacagatgatgaactatgatagctcttagttcgatggctttcaatgtatcctagaggatcccgatctatttgtacccgacgagaaaggccataagccatatgtacgcaattgatcaggaccatacgcagtctatcaggggcaa

SEQ ID NO: 126339 - DNA, 1295 bp, Glycine max
  Clone ID: PAT_MRT3847_85091C.1
gtaagcttgcaacctagctaccgtactataacattgattgagtcgtgacgagctagctgcttctggttttcttcgtgtcctcccgtggccccgaatgttagcaatcaattacaaattcaaatatatctctggaaacatggtatttttgggtgttctcttggtggggtttctcttaggtgcttatggggacagtgatggttggatggatgctcatgctaccttctatggagggggcgatgcctctggcacaatgggtggagcttgtggatatggaaacctgtatagccagggctacggaactaacacggctgctttgagcacggccttgttcaacaatggtttgagctgtggggcttgctttgagatcaagtgtgtcaatgaccaaaggtggtgccttccagacacagttgtggtcactgccaccaatttctgtccaccaaacaatgccctcccaaatgatgcaggtggctggtgcaaccctccccttcaacattttgatctctctcagcctgtcttccaacaaatagctcaatacagagctggcatagtacctgtggcttacaaaagggtcccatgtcaaaagagaggaggcatcaggttcaccatcaatggccattcttacttcaatctagtcctaatcaccaatgttcgtggtgctggtgatgttcaagcagtttccatcaaagggtcacggactaattggcaaccaatgtccagaaactggggtcagaactggcaaagcaacacttacctcaatggacaaagcctctcctttaaggttaccactagcgagggccgcaccttggtctctaacaatgttgcccctgatagctggtcctttggccagaccttcacagggaaacaattcaattaagagacatagaagggccgtgcctccccttcccgggcgtgtctggaagccgtggctcttgatgtcagtggatcggttgttgatcatgggggagtgggttttagtatatataccaaaagtgtggtataacaattagaaaaaagtaacataatatagaagtgagagtcattgggagcaaatgagagaggcatattttaagatggccctggtcatttggattgtctcaacactcctttatttattgaaagagacagagttagttaaggtggcagtggtggtatagtttatcaacccgccattttttcaactcttaattttgctatggaagtatcaagtatggtaatttcgggcttagctataaaggtatagaatagaaaataaaagcagcagtattttagcttctatatgtcattgtattcggctt

SEQ ID NO: 126340 - DNA, 519 bp, Glycine max
  Clone ID: PAT_MRT3847_85092C.1
ttattttttttaaaaacaggagctcatactatatattttttgagggacaaatataaagacaaataatacacgaactctatccattagctaatgtccatgcatcatccgagggctccccttgtcgagcatcatcttaatatgcatcgcattaactcagctttgtgctttggaatagcttgatccttttctttcctggtttagacaaactagagaattaatgcgtacagattaactagtgtttaaagaagtcgttgtagagacaaatttcacttgagaaatgacaccctaatgattggaatttttttacccaattaacaagggcgcgaatattgctatttgagatattaaatataattgggacccattaatcgagtgtttatgcaattaaaaacacggagaagtgaatgactgatgtttaagatcccactttaaacaacgctacatcacaattggcacaatacattacattacattacaaaaaccgatatcgttcaggaaccttaacaccaaccacccatt

SEQ ID NO: 126341 - DNA, 394 bp, Glycine max
  Clone ID: PAT_MRT3847_85093C.1
cggccgggtaatactatattgggcgcaacggaagatctgagccgattatatgcaaacccgacaaccttctggaccctcgcagtatgactccaacaacacctgaagccattggatcgcattattgtaaaccgagacccaccttactggtagattgacacgaacggcgaatacgtgaggtaatgagttccgtgaatacaaccacaactccgcttccagccctgccaaagagcttacttataggatcataaacgctgcatcttactccgtaaagggaaccctgtcgtcccgctacgctcgaagagaatgacaccccatagtttatggcacgtgttcatgggtaaaagctaccaaataggggagttgctcttcagcgtatagcgacccactaaaggat

SEQ ID NO: 126342 - DNA, 255 bp, Glycine max
  unsure (1)..(255): unsure at all n locations
  Clone ID: PAT_MRT3847_85094C.1
tacggctgccataagactccnnaagggggccccgctcacctaaaaagtctttcattacccccccaaaaatgaagagcacccatcctctttggctctctttctcttttggggcctcacccccctatacctacctttagacatccctgaattcgtgctccataatgaagggaaccctcctgaaaatggggggcatattatattttgtcagacctaacaacatttggtggaataaaagccaccccccccgcaaatgaa

SEQ ID NO: 126343 - DNA, 205 bp, Glycine max
  Clone ID: PAT_MRT3847_85095C.1
cacctctccgctgtcgtccggcgtcgccggcaccatggccgcgaacggctcgggcctgcagatggcgaccatccgcaacctgctgatggcctgggtgctgacgctgccctgcgcgatcatgctgtcggccacgctctacgtgatcttctcgcgaatcttctgaagacctctcctctccctctccccgttcttacggggagagggt

SEQ ID NO: 126344 - DNA, 454 bp, Glycine max
  Clone ID: PAT_MRT3847_85096C.1
cctcgtgccgaatttgccaaacaatgtactagccaggcatttactcagccaaagtgatagtaaggcatctacctatacttccctttttagactggcttagttcagctagggtggtcagcatgtggtaatcgtagaagttgaaaacaggtctggcagttataggttcctgttttagtttatggtgaatgttccattcttatgccattctacttggcatcccaacagccaccaatgtgaccctttagacccatttattgcttccagttcacctagttttacccataattcactcgagcaaaccctgaacccaacccattgattgctgttctcactttctctccttacagcatgctggtatagtgtccgactaccatgttaagtacccctgataatcttttgttctggtcatgcagggccacttttgactatgaaaaaaaattatacaatgatcacc

SEQ ID NO: 126345 - DNA, 401 bp, Glycine max
  Clone ID: PAT_MRT3847_85097C.1
aatagcaaataatttatttttaagaataataataatgcacactgaaaaactatgtcactacatgcgcataaaccaccgacggaaaggagacctacactatttctgtcacttacgcacacgtgctgaggaaaatggccatagacaaggacaacctaaacaggggatgaacgctgagactgaatcagcgtcagcaatgcagctaagtacgcgtgcaaatactccagatctacattcgcctctacaaggtacttatacctgacctagagccataccaggtcacttctagcaaccacgatatgatggagacaatcaccaaaacagtgcagatgtcgcatggtaacatatgggctgtcaagagtccaaacaccaagggcgcgacagctaaaagggctaccactgcg

SEQ ID NO: 126346 - DNA, 343 bp, Glycine max
  Clone ID: PAT_MRT3847_85098C.1
agcagagaaagctcaacttcaaggcaatataactgctaatgatgataatagtgtttggaagaaggcaattataatcagtacaggcttttacaatactatgaataacaaaactttaggcagagctgcaacttttagtggaacacatcgtcagaattcctcaaggtgggagagtataagcacctctgatgatgtggctaatctacagcgttctatgtcagctgtcaaagatatgctgtagactctggcatgttgcacaaatcacacaaataaatttacatgtattgattaattaattgaaattagtatataatatcatctttgctgaaaaaaaaaaaaaaaaaaa

SEQ ID NO: 126347 - DNA, 709 bp, Glycine max
  unsure (1)..(709): unsure at all n locations
  Clone ID: PAT_MRT3847_85099C.1
gtcgcatggcaccgccgtaccgtaagcctcggnaattcgggctcgagtaccgtntgcagagaaagacgacacgaagggggtagagagctttgaggcactactacgggagagagcactgacgattcttacacaaaccgacactggccctcctgaccatatgcatccacaggtaactctcaggctgtaagactctcaccaagtcctggcctatctatcaattcccaatacgtgtgcctccataacttcgctatctcttgccgtactcgttctaccttaagagaagggctaaactgtgtatctgcctattgtcactagcttgcaaggacgcatgggccaatccaccaaccaccaagcgaaatcattcctcacctagaacgctgtggatgtagacccttcaattactgcataaactagctagaagcctattagaggaagatgagctgacgagggatacgctatgtcgggtgagcatgcgggaattagagctgagaggagaggagctacagataccctatagccaagcacgagctccaatatcaaagcatacatccctggctgcgaacgaactccagttgaacactttgtagaagcacataatccccagtaccgagtgcgttaaccagaaccctctatgaataatatatcatcacacccacgccagcatggagctatcactatggacttcccattacagacgccacctgaggca

SEQ ID NO: 126348 - DNA, 2147 bp, Glycine max
  unsure (1)..(2147): unsure at all n locations
  Clone ID: PAT_MRT3847_8509C.1
cggaattcctgtttcgtcttacgcgtccgactcngcttggggctgtgcctactgtggtgacctacaatacgattatgtatggcctttgcaagtgggggagagtgagtgatgctaggaagttgcttgatgttatggtgaataagaatctgatgccggatttggtttcgtataacactctgatttatggttacaccagattgggaaacataggggaggcttttctcttgtttgccgagttaagatacagaagtcttgctcccagtgttgtgacctataatacacttatcgacggtctttgcagattgggggacttggatgttgccatgcggctaaaagatgaaatgatcaaacatgggcctgatcctgatgtatttacttttacgacttttgttagaggattttgcaagatggggaacttgccaatggctaaggaattatttgatgagatgcttaatagaggattgcagccagatcgttttgcgtacataacccgaatagtaggtgagctgaagcttggcgacccatctaaggcttttggtatgcaagaagaaatgctagccagaggctttcctcctgatttgatcacttataatgtcttcattgatggtctccacaagttgggcaatttgaaagaagcaagtgaacttgtgaagaaaatgctctacgatggacttgttccagatcatgtaacatatactagcatcatccatgctcacttgatggctgggcatcttaggaaggctagagcattgttccttgagatgttgagcaaagggatatttccttcagttgtcacttacactgttcttattcattcatatgcagttaggggaaggctgaaacttgctattttgcacttttttgagatgcatgagaagggtgtacatccaaatgtgatcacctacaatgctttaatcaatggactttgcaaggtgagaaagatggatcaggcatacaatttttttgcagaaatgcaagcaaagggcatttctccaaataagtatacttacactattttaataaatgagaactgcaacctgggccattggcaggaagctttgaggttgtataaggatatgctagatagagaaattcagcctgattcatgcacacatcgttctctattgaagcatctaaacaaagactataaattgcatgtagttcggcatcttgagaatgttattgcagctggtgaataaatttatgatgtaaggatgaagaatggttatttattattatcattttggctttctcacatggctgatgagtaaaagaaaaccctatatttgaatgggttttgccttttgaggtgtaaattcccccagacagaatcttgtatatttttctgactgtcacggttgaagatgcctgtggtgttcttgatgattaagatggacagacttcaactattaacaagttttcactcgttatatccctagactagtcaggggaaccaatttgctttgtggctatttaagcagtgtgtaactgctaatttttcttcagctgttatttgacttctgacatagatactggacctgcatagttggtggtcaattcaaatacagaagccaaacaatcagaaaagatttaatcataattgattcctgatgcattgaagtatatagattctgatgatatgaaaaagatcaaaaatcagttcccaccattcgttaaattcaaaatggtcctttaataatgttatggacaggtcaaagtaggcagatttgatgttccatgatcatgaggtcaattatgggaacctcatgtatggactgatgaaggagtatatccaacataactgaaaggtcctgtctgagtcctatgaatttttccatgagcatcatcttcatcaagagataaaaaataaataacagattgtccttcaggcatcaccaacagggtagatggcaagcaagaattggccaagttgcaggaaacaaggatctatactttgatatgcatcatttcaaccagtggtcttctaacttgaaggagcagctgtcttaggggggttatgtctctgttgtttttgcttttgtgtctatctttatgttgggttaggcaacttgccttgtatatttgtatcctatttccagtacacctagtactgagttatatataataatatctgatttttgctgtgc

SEQ ID NO: 126349 - DNA, 254 bp, Glycine max
  unsure (1)..(254): unsure at all n locations
  Clone ID: PAT_MRT3847_850C.1
gaacaaggcaagncaggctgtggaaagagctactaganaagcacgtgaaanagcagctgttgaagctcgccgaagagctgagagggctgctgttgagaaagctaacacagaagctagaaagcgtgctgaaagggccgcagttcagagagcacaggctgaagcccgtgaaagggctgctactgaggcaaaggaaagggccgaaaaggcttccgcggaggcaaaggaaagggaatgcgggaaagagctgcagctgc

SEQ ID NO: 126350 - DNA, 2135 bp, Glycine max
  Clone ID: PAT_MRT3847_85100C.1
gtgctgaagctgatagaattgctgagacctcaaattcacatacagaagacgtttttgctcatagagagtttggaaaaatccacttcaaagtcattttcacttccaaattcggattttctatccgaaatcaaaatctcttagttctgtctctctcttctttctctctcttccattctatctatccattcctgtccatcgccgacaaccgccaattccctccatttcaaagcaaacccctttctcttctcggctgttgctttgaacttgaaaggtgctgaactattttccattgtattttccaaatttacatttgttcatcaaataatttcttcacggaccttgcatttgagaaaggatgatggagttgcttgatcctgatattatgttgccctttggaattgaaatttgaatgtggaaatcaggaattgcttgcatcatatacaaacaagcaatatcactgtatttacatctaaaatttgttgttagatgtcagaaattgacttggcagtttttaaacctgagatgatgaagccgtatgtctggcttcagacttcagatgattcaatccaacaagtggaacaagaaattgcaatgttttgcccactgatatgtcaagaaataatacaaaaaggcatgggatcttccaagagttgtgcaatatgtcttcctcaacaagtcagtcctgccatgttgagcttaattcttgactattgtcggtttcgtcaagtacccggccgttcaaacaaggatcgtaaattttatggtgagaaatacaataaaagaaacacttatgggctgtgtgtctttacgtcggccgcagaccgccttcgtgtgttgcctttggttgatcttaccagttacgtgcacttgctcgaataattgaagggaaaacaccggaggagatacgtgatataattcctttgcctgatgatcttacagaggttcaaaagttggagcccttgagaaatataacggctgacccaaggatcagacttttgaaccgtttgtatgccaaaaagagaaaagaactaaaagagcgcggaaggttaaagaatgttgaagttgaggaagagcatgttgaggggcgttcggttgttgaccttgtggctgtgcttgttggtgagcgtgcagttcctgaccgtgtgtctcttcttagtggaaatggtggagccccaggggaagtgagcacctctagggctcttctgtgaaggaggaggaaaaacgggcaaaaaaagaagaaaattgctctgatggcagacactaaagtgcagaagcaaatagaatttgcgagacctagtaattaccctatgcagaagaagacattttttctccaaaggtgaacttagatgatagtgatatttttgatgagattgatcctgctttaaaggaaaaattttacagggaagtggaagattttgcccgcagattaaattctgactggccagaaagaatgcaagaacttttatcttcagggcaagaacggaagacaatactttttactacagatggttttctaaggcgacaagcttgactggacttagaatggaattatggaaatgaatccttaccagaggcttcaacaattttgactgatgctggcaggagcaagaaaagttttgcatgtcagttgtttttctttttttgcacttccgatgttttactctattctttgcagttcatttttggtgcgcaattttattctggggactcttgtactcttaggtaaaaaaaaaaaagctcctagtttgtatgcaatagtatacctttatttttgtgcctttgtaattttgcatatttatttgtattacattgattttttttataggacatttgatgtgttgtaaggctgttttgagtgtactttttactcccaacggaaatagttttctgaggcgaaacgcttgacttgacttggatggattggaaatgaatgcgtaaaagattgcaagcctacccagatgaccagtggcttgaacaattttgagagatactgacacatgctagaaaattgttgcatgtcagttttttttttaatttttttccccttactgtttaaatttattcttttttggttcattgttggtgtttagctccggtgctatttgctgctgggggctttctcttgtacttatagg

SEQ ID NO: 126351 - DNA, 468 bp, Glycine max
  Clone ID: PAT_MRT3847_85101C.1
tttttttttttttttttttttttttttttttttttttttttttttttttttttttttttttttttttttttttttttttttttttttttttttaaaagggggaaacaaaaacaaggggggcccaaaaccttggtttaaaattttggccttttggggcggccctaaaaaccttattccagggggcaggaacccctggaaaaccccagggggtgaaatttattggcataaccccattttccccttgggggggggcattttttttggccggggagaggggggtcacatccaaaaaatacccgggtttagtttttttgtaaaaaactttgttcacccccctcaaagcctttgggggccctgcggggttctttagcccaaaaaaggggtgggtttcccccatacattattttggggggggatataaatttttcccccaaaaacccccaaaaaaataaccccccatttttaatt

SEQ ID NO: 126352 - DNA, 381 bp, Glycine max
  Clone ID: PAT_MRT3847_85102C.1
gaaaacacaattcttacaccatgtaccctgcctgcagagactatttatctttaagctgcacgctttgacaccatccagtacttacatgactggaaccatgaaatggaacgcataccccacttattttaaaaggtcatttcagacccattacacatcacatgagttcttaccctggtgggtacatcctacatagagaatcacacctaaatcttgtccttcttaatacccccgacaatgagctcctccaagagactattatactccttccgtatgcttaaatgagggagggtccttccatattgtcactgtttgcgcccaaatccaagactatgatggaacggcgggataccttacctggtctggatcttcggattagcattg

SEQ ID NO: 126353 - DNA, 145 bp, Glycine max
  Clone ID: PAT_MRT3847_85103C.1
gtggtagaaggacatatgcatacatgaaaggaggagaggatgaggggacaggctgacaaaccggcaaaccaggaaaaggcaatggagtgaatgggggtctctatggctatctatcgctcatctatgtatttatgcttgctgtaga

SEQ ID NO: 126354 - DNA, 243 bp, Glycine max
  Clone ID: PAT_MRT3847_85104C.1
ctcttgcttattatgaaaataaaaaaacaacactcgcgcattagggaatttctcaggacgcctgttctccgtatggctccccttcctagagcgtactccccaacccactttcgacggtgcgtcttggacctttacgacttaaatcgctggaaggtcgacgatcacaaacgaacgccaaacaacctaaacccaccttagaaaacgccaccaaaaaacaaaaaggggttggaaaaaaaccaaaaa

SEQ ID NO: 126355 - DNA, 352 bp, Glycine max
  Clone ID: PAT_MRT3847_85105C.1
gggcagaaaattcttcgtaggtggcaactggaaatgcaatgggaccactgaggaggtaaagaacattgctactactttgaatgatgctaaagtccctggagaagatgtcttagaagtcgttgtgagccctccttttgtgcgccttccagttggaaaaagtctgttgctcccttatctccatgatatggaacaaagctgttagtttcgtaatggtggtgcttatctcgtggtggctagtgctgctatgcttgtgaagctgccaatctcatgcgtagtatctggtattcatcatgaaggcaggattatcataaatgacgtgagctggaccggagaaatgggtgtgtatgaactc

SEQ ID NO: 126356 - DNA, 300 bp, Glycine max
  Clone ID: PAT_MRT3847_85106C.1
cctcaaaccctaaactacaaaaccgccttagtaattcaccaaacggtccgcggcctcctaaactctttctccatgctctctcctcactcttactacactaatctactcccttacaccgcattctgattcaattaaccccattatatataaatatgctctcctatcgccttaatcacgcaacataaaataccgatcctctcattacaattatcaacaacacctactaacatccgaaacccctaaaaacaatacgaatcacaccacacataccaacctatatacaaaactattttacctcta

SEQ ID NO: 126357 - DNA, 616 bp, Glycine max
  Clone ID: PAT_MRT3847_85107C.1
cccacgcgtccgcggacgcgtggggcggcacgaagctagagatgctggagaagatgattgggccgctttggtgcggcccatttggagaaccgtctgggagaccggaacggcttccttgagagaaggggtgttctgaaccccttgtgattaccaactgctcgctgaattgcccccgagagccacatggcgagggtcgcgttcctcgtgccgaaatgcgtggcccctcataggatggcatgcgtgcttcatcttgcaggattaagatataatctgctgctacttttcttgagttgcaaagagcaaacagagattggaggttcacagttctaatctcatccacatggtgactggggtagacaaaatgtgagaaagaaaaaaaaaacagagttgtttttcaaactgtacatggcttgtttcatgttgaccttaatatttgaaagaaatagcaaaggatggaagacgcatggaactggggatcacacatttgaaaggagattgcgtcttggtggaccattgttaaaggaaaatatcgcaaccatggtacttgagaggtcagggtcaaattcttcccttctatggacaaagacatccaatgctggagcgtggtgcaaaactt

SEQ ID NO: 126358 - DNA, 544 bp, Glycine max
  unsure (1)..(544): unsure at all n locations
  Clone ID: PAT_MRT3847_85108C.1
ggctcgagagaaaatctagagggttctcctgcggatcaggtttgattgcatttgacattaaggttgcagaacttgacagtacaatcataatgcaccagactgaataattttagtttaacttttgaatgcattaatctggtaattgtcaatgtgaggtgacactatatgtgtgtgagaaattttcctgatctttcattaaccctgtctcatccttaggttagttatcctatgataaaaagagtaataccctgtcatgtttcttgatgcagtgaaatgccctacctctaaataacatgtgaataatgaatatattattgcaagaaaaatcaattttttttgctattaatatgtttacctgtacttgcaagcactggtagaaaaacaactaataatgactatttttctcccatcccactgtgaagcagattgctttgtctttcctatacattattccttatttgtgtgtgtgtacacatgtgcacttgcatgatcttgcactacccncatcacgtggtagtggtttaattcttctattttagcattc

SEQ ID NO: 126359 - DNA, 130 bp, Glycine max
  unsure (1)..(130): unsure at all n locations
  Clone ID: PAT_MRT3847_85109C.1
ccccnatatcnttgtntggctgcactagctagtataggnanattaaaanttngaattnaaacanggaggcctatgtaantccgttgcnattgtaaaagttgtatgaangnttccnatctangtttgggta

SEQ ID NO: 126360 - DNA, 223 bp, Glycine max
  Clone ID: PAT_MRT3847_8510C.1
atagcagcaagcaattttttcgttatacatgatgtgaaaaatactagtagaactatattaaacaagatcgaaactgtaaaaagaaaatgattggcctacgacccttatttgatacataaaaaatttcctttgagaaaaaaagcccgtttgggcattattaagcctaatcaagcatgggttccttcaaaaatgttattgggcgaaaatctttatggggcagttt

SEQ ID NO: 126361 - DNA, 445 bp, Glycine max
  Clone ID: PAT_MRT3847_85110C.1
gaaacatgcaatacaaatgattgctcagagacaaatacatgtagtagtatttggtatgcagggtgttatattaaatcttctacatagtacttgttatttaggttaggtgccctataataggacataataaaacaaaaatcttaacaacaatctgaactaatgatttctaaatgaaacaattttgacaaacctattactaattttataaattactgaaacatttcagaattgattgaaagcagaagttttgatagatcacacatgcccaaaaattaaacatctaacactaactaaaggaagatgaaaatatgacctcagctggaaaatcttaagatatcttagatcatcaccttgacttcatattttgtatatacagtaaaaataaagcttatctcatgccgaataacttcctccacagcagcctttgcactagcggacgcgtggg

SEQ ID NO: 126362 - DNA, 747 bp, Glycine max
  unsure (1)..(747): unsure at all n locations
  Clone ID: PAT_MRT3847_85111C.1
gcctggtgggtcttatgggaaagatgaaaggttcacaccccttgaaaaacaatatacattttttggcaaacttcaatttcctgtcaaaacagatattgatgcttggacagagaaaataaaaaggcttcatttacttcttactgtcaaggagtcggctatggatgttccatccaacttggatgctaggaggcgtatttctttcttctctaattcattgtttatggatatgccacctgctcccaaagttcggaatatgatgtccttctctgtcttgacaccttactttaaggaacctgttcttttctccctaagtcatctgggagagccaaatgaagatggagtctctatcctcttttacttgcaaaagatatttccagatgaatggaaaaactttgttcaacgttttgataataaaagtgaagagaaactcagagtagagaatgaagaagaacttcgtttatgggcatcatacagaggccagacattgaccaaaactgtccgaggaatgatgtatatccgacaagcattggagctacaggcttttcttgatatggcaaaggatgaagaattaatgaaaggttacaaggctgcagaactagagagcaaggaaagtacaaccggtgagcgggtcgttgtggactcaatgtcaatcattagctgacatgaagttcacttatgtagtttcatgtcaacaatatagtattataagcgatcttggtgatccccaggcannagaaattttaaagc

SEQ ID NO: 126363 - DNA, 509 bp, Glycine max
  Clone ID: PAT_MRT3847_85112C.1
gtttggatgttccatccaacttggatgctaggaggcgtatttctttcttctctaattcattgtttatggatatgccacctgctcccaaagttcggaatatgatgtccttctctgtcttgacaccttactttaaggaacctgttcttttctccctaagtcatctgggagagccaaatgaagatggagtctctatcctcttttacttgcaaaagatatttccaggtttccccatttcctcaagatatttgtcaaagaactgtttgacctaaaaacatgaatggaaaaactttgttcaacgttttgataataaaagtgaagagaaactcagagtagagaatgaagaagaacttcgtttatgggcatcatacagaggccagacattgaccaaaactgtccgaggaatgatgtatatccgacaagcattggagctacaggcttttcttgatatggcaaaggatgcagaattaatgaaaggttacaaggctgcagaactagagagcaaggaaagt

SEQ ID NO: 126364 - DNA, 307 bp, Glycine max
  Clone ID: PAT_MRT3847_85113C.1
ggccgctttgctggcgtaattacataggctacgtatatcctgacgagcatcagagaaatcgacgctgcaatcagtaagctgcgatcctgacgggactataactgtaccaagcagggtcagatgtgagctacaatatgcgctactatagtcatactctgaagagcatcgaagctgtgatctgttacctaaagaagcatgacgctacatatacctcacgctatatgttattcaacatcattgtacgtcgttcgatcaaaactacgctgtgatcacgtacccttgggaaactcacatcgctctgcgttat

SEQ ID NO: 126365 - DNA, 667 bp, Glycine max
  Clone ID: PAT_MRT3847_85114C.1
ttccacagaggaacacagtgacacctatttgaaaaacattagcatgtctaacaaaatatagaagaactgccacatttcacatcattataatttctcagatatctaattaagagcctatttttcttcttttgattgttttgtgatgcatttgctaggttgaatcagtttatacttaatttaaatatgcagttgcttcacaatcttgaaatcagattcagttttgggattatgttagtcaaatctgcattttccatgagtcgcatctctagagttaatggaaagacatagttttggaaactagagagagagagagactaaacttatgctagatggctaccaattctgaactgtggttatctagaggttgtgaggaaagactgattaatttaaaattgattgttcaaacctcatggcaaagagatgaatgataatagagagccaactgaaatcctatcagtcattaacctggatgaacagctacttaccttttctgatgaaaaccactttaaaatattctgacaaagaaaatcagtactttaagcaacaaccaaatttcatttttttcggaaaggccaaaaatttcaacttatcaacatgtttatcattaggaattaattgttcccaaaaatccccttttaccatgttaacaattattatatattatgat

SEQ ID NO: 126366 - DNA, 450 bp, Glycine max
  Clone ID: PAT_MRT3847_85115C.1
ctgactggtgacgtgttccagacacctgcctaggatgagagccctacgggaaacttacagggcctggcgcttggcgacatatgcctgcagaagatctgccgtgctaggatacaatgacaacttctgactctaggtgcaagcacttacatctccgttaacatatctgcacaactggtgtgccctgttaaatcctacagctgtcgctctatataaagaatcatgatctgtatgctggatgcttaaaagggactgtgtgctttgacagctttaatgagcttgacgattgacttctattccatttatactactaaatcttgagagcctttcctcaccttttttgcctttgaacaaagaactctccgacttactcttcactgtgaaatctatacaccttggaattaccatgatggtctaattttctagactatttgctatgttcagagtgttttt

SEQ ID NO: 126367 - DNA, 354 bp, Glycine max
  Clone ID: PAT_MRT3847_85116C.1
aattcggctcgagcactgtctcttctctcttcggtcgtcgctctgcctcgcgggaaacgacactggcggagacaggagacgtgagcctaccaggctgagaacaaccaggtgcacagcctcatcatcagacacgcatctactacgacaaggagaacgaacaacgcgaacacatcatcgacggctgcgatgctctggacaaaatatgcaagccgagtgtgacagataggagcaagctatacgctcactcagaggtgtatattcatatgaatcgagacaagactgactaaacgctgaccatggttgacagaggaataggcatgaccaacagctgagtcggtggacaacttgtgtaca

SEQ ID NO: 126368 - DNA, 245 bp, Glycine max
  Clone ID: PAT_MRT3847_85117C.1
ctcaatcaacccaaccaatcgatcaaccagccaatatgtctggagacgaaggccccaccaccgcctacacatggcagatctccgcccaggaccaacagggcggccccggtctcgacaaggacatgaaggagcaggccaactggacacagctcgagtactggggtgacgacggcaagccatacctcaaggagtacgaaggccgaggactcctagagaacaaagccgtcctcatcaccggtggcgat

SEQ ID NO: 126369 - DNA, 836 bp, Glycine max
  Clone ID: PAT_MRT3847_85118C.1
cgggctgcgagaagacgacagaaggggagagacactctctatagtgtttaaaaattaaacatgattttccttcctttcattaagagaaatttagaactggtaaggtagaaggaaaatggataaagctctcactaaactgggtagcacttggatctccaagaaagccaaggcagagatttcccacataaccgacgacctatcatctctctcaaatactgtcgaagagaaggcaaagcttttcatcaacaagctcaaaggtaaaacccagaaagccttgccagatctccttcgagagtacaacattcctccgggtctgttcccccgcaacataacatgctacgaatttgatgcatcaaagggaaagttgatcgtgtacttatcctcaccctgtgaggtgtgcttcaaggactcatccattgtgaggtatgcaaatcgtgtcaaaggaacattatcaaaggggaagctcagtgttacagatggaatgaagaccaaggttcctgtgtgggtcaaggtgactagtgttgctgttgagagttacaagtctgacaaagtatggttcactacccccggagttaagaaatcaaggcccaaagatgcatatgaaatgcctcgtgatgctattaaggtagaagaattttgaggccctttataatatatggtattccagttcaattcgctcatgatatgcaatacatggttacactattagacaattgtttttttgttttttttttctgggtaagtttagaggagttatggtgttacagttgacaaacacatttgactttgtgacctgtgatgttaagaaaattgtatccagtgagtttgcaattccc

SEQ ID NO: 126370 - DNA, 354 bp, Glycine max
  Clone ID: PAT_MRT3847_85119C.1
aagatgagattgcttgtaaaaaaaaataaacaggggccatgggtaatgtttacaagtcgaccaaagggacacacattgccaataccagccatcaacaccctgtaccttacatttatctttctcatgaaccctatgtaatggggatcacacaatcctttcgttgcttacaaatcacactaatatggatttaatactccatacctataaagtgactaccgtgctgaatcaccctatttaaagtaccatccttgggaatgatcaacgcatgctcttgtttgccgtggccatccttagatagcttggatgacgaatctgttccgggttgaagagaggatctgggatcttggcaatctt

SEQ ID NO: 126371 - DNA, 645 bp, Glycine max
  Clone ID: PAT_MRT3847_8511C.1
caggcagctagtactaccctgcccctgctagctattttgtaacaagcagatcaaattaattgcttgatatcaagaaacatggcaatcaccggtgttcatggatggggagacatcaagagtctcagcgtccaagtgatcaccggtcgatggttcgtcgtattcgcctcttttctaatcatggcagccgccggagcaacctacatgttcggtctctattccagcgacatcaaaaccaccctcggttacgaccaatccactctcgacctcctcagtttcttcaaggacttgggtagcaatgttggcatcctctcaagtctaatcaacgagctcactccaccctgggtggttctagccattggtgccatccttaacttctttggctacttcatgatttggcttttcaacgctggaaaatccaccttaggttgtcctcgccattggtgccatcctcaacttctttggctacttcatgatttggctttccgcacaggttctcttgtcacgtgtgtcaagaactttccagaaagccgtggggctgtgttgggaatccttaaaggctacgtgggtcttagcggtgcaatcatcacgcaactctaccatgctatttactatgacgacaccaggtctttgattttgctcattggg

SEQ ID NO: 126372 - DNA, 499 bp, Glycine max
  Clone ID: PAT_MRT3847_85120C.1
actgtacccaggtacctgtacaccggagcggcgcactgagaactgacgggagtcgcaccacaagagcaacggcgggcggggtgggcggctgctacgacggggccgactagccttagcttagcctctacctgattaaaccggtttgtgttcaagcaaaatgcctgagccgcactcggtggtccaccgaaaagctctaacggggacctggctgcgccaactatataatagttcacttgggaaaattaggttgcaacacgctcggcaattaataaaccatgataggaagcctcaataagggacagtacatgtgaaaatacggaattaataactgggtggggagctgacgcaatctcaacgttagtataatcatagagggagaggtcctagacagaatattcgatgtgtgaagagtttagatgagcaaaaatagccagagccccgccaccaagggaagcaaattggagagcagcaagcccggaataaccctcatctattccta

SEQ ID NO: 126373 - DNA, 1452 bp, Glycine max
  unsure (1)..(1452): unsure at all n locations
  Clone ID: PAT_MRT3847_85121C.1
ccacgcgtccgctggtacagcttatgcaacctgatagtggtgataaaaaaatagatttggcagggcgaatgatgcttgtcgatgtaattgcacttacggaccggtatgagtgtctatgcgggtttgtacaacacaggggtttgcctgtgttggacgaatggctgcaggaggtccacaagggcaaaattggtgaaggaaatatgcctaaggaaagtgataagtcagttgatgagtttttgttagctttacttcgtgcattagataagcttcctgtgaaccttcatgcactgcaaacctgtaatgttggaaagtctgttaatcatttacgcacccacaaaaattatgaaattcagaggaaagctaggagtttagtggacacatggaagagacgtgtggaagctgaaatgaatatgaatgattcgaagtctggttcaaaccgtaccatgtcttggccagcaaagtcagcaaattctgagtctcctcaggttggaaataggaaaacaggaggatcctctgataatgttgcaaagagctcttcagttcaaccctcaatatctaaaaattcccaatctaagttaagttctggagaagcactgtccaagtcctcttcatctcctggctcaactaagctaatgactacctcagcggtcagtaactcaaaagatcaaaacagtaaagtcttggttggagctgcaacgtcagatctgcctctgacacctatcaaggaggagaggagcagcagttctagtcaatctcaaaataacagtatatcttgttctagtgaacatgctaaaactattggttccagcagggaagattcgaagagctccactgcagtgtcagcgagtgggggcaaaaggcccgagggtgcttctcgaacacgcaagtccagcaatgggctacatgttactggtgttgcagtaggtccgaagtagcacagctctgcaaaaaattcagctaggaattcaccttctgaaaaagtttctccaactcgagtcccccatgaaaaatcagctgaccagccccttactgatcaagggaataatcagcgattgattctccggttgccaaacactggtcacagtccttcaaggggagctagcggtggctcttatgaagaaccaggtatcacgtgcagcaaagcttcttctcctgctgacaggaatgagaatcaggacagaagaatgaaaactagacctgagtgtttgctgacccatgtgtcaaatatgatgaatgaggcatgtgatgctagtgaagctttgcttggtgttgacgaaggtaagggccctcaaacggttgatgagcgatgcagggctaatgaagatggtgataaggtagcagaatcatcaaaaccggctaagttgtcatctggatttgtttccagatcatggcagacttatganttaagccccatgaatgcattaattgaaagctgtgtgaaaattcctgaag

SEQ ID NO: 126374 - DNA, 429 bp, Glycine max
  Clone ID: PAT_MRT3847_85122C.1
agaaggggacatatctccattgagagaattaaaaggttagtgaggggatggggtacccaatactctagattttgctgactttaagacttgtgtggactgcattaagggtaagcaggccaacatgtctaagaaaggtgctaacaggagttcaagcatattagaaataattcatactgatatttgttgtccagatatggatgcacgtggtcagaaatattttatcacctttatagatgattattcacgatatatgaatatttatttgcttcataacaaatacgaagcattggatgccttcaaagttgttaaggctgaagttgagaaccaatgtggaaagcaaataaaaatagtgagattagatagaggtggagaatactatggcaggtatactgagaatggacaagcacctggtccctctgtgaagtttct

SEQ ID NO: 126375 - DNA, 480 bp, Glycine max
  Clone ID: PAT_MRT3847_85123C.1
gctctacctggatgcctcaaaaagaagaatttttggtaggaacttcatattcgagaactcctggcttcttgaacctggtttggaggaaatagtccattttggatggtcaaagcctttatcaaacaacctcatctccaaattgaattgttgaattgttgctctgatgaaatgaacaaatgagggtagaattctgaaaaggaaatttcatgatcaaattgaagcttgtaggaaggacattgaagcttcacgcttcttccatgatcctgttaatgatgcacgttattaggaagcacaagccaaactgaataatttcattgctcaagaagagtcatattggcaacaacgatccaagatattttggttaaagtatggtgacctaaactccaagttctttcactcttctgccaaagctaggaaatctggaaacaacatctcttcccttacttgtgacgatagtgcccttgttcataatcaaaaaga

SEQ ID NO: 126376 - DNA, 807 bp, Glycine max
  Clone ID: PAT_MRT3847_85124C.1
tatcttctcccctataattgctatacacttacaatttccattgttacttgttagacttaactaggcaaaaaaaggacatgcgaaattaatgattgcagtcagggttgggctcagtcacattaattagacttttgtgtttttcgaattaaatttgactaaaagatcacagatagtagcttttctctttatcatggcgagaagatctcctcctcgggttaaccaaacgtacgagacaggttgtacgtggcgaatgttaagaatcttcaattttcgtgaaggtcattctgacagaagattggtttccaataggaggctgaatgctcatgctaatggagatggaaactctagaactagatcagatgtgcttggcacagttgacgagaagcgccttcaaattggtgtaagttccagaagaagaagagattatagttgtaaaagtatcagaggcgtggagaatgaacaggtagcagattggagagaagaagtaacaaagatgattgttgatcagagatttgtcaataaaaattaccagggaaaagacgggacaggctgtgagcctaatcagttcttggatgctttacagattttacattcaaacaaggagcttttcgtaaaacttttgcaagatcctaactcttggttaggaaaacagattcatgacttacaaaggtctcaagtgaaagaaccatgtcagccggccaggccaaaaagggtgacttgattaaataagcctgaagataggaaagctacacaatgggtaaaaacccttttgggtccttttgatagaactgatttgagggccaggtt

SEQ ID NO: 126377 - DNA, 445 bp, Glycine max
  Clone ID: PAT_MRT3847_85125C.1
tggcaaccaagttaatatttgatattgcttttgcggatggcatggttggtggtcgggtagacagaggaaaaggacaagacatatggaatctttactttttccgtccatgcaattcaactctttgaaaggctgaattctagcaaaaacacaaaatagcggaaaaaggataatatagtccaccacgcccccctgtcctgtcgcctaacacattgcacatacccatttcctatttctatcttgctttactattttcaagggtccctccatcgaatctcttgtctccattaagaaattatcagataaaaaacactacaaaaatgtataatagttgatgtagacttgaaccaggaagcagtaaccttaaagtttcaattctcatcgcctttgatgaacatcatggatgagattaatgaattgggtgatactagtatctctgacccctaaa

SEQ ID NO: 126378 - DNA, 190 bp, Glycine max
  Clone ID: PAT_MRT3847_85126C.1
gtgcgggggaccgcaagtgattcttgtgtccggcgaacctgctaatgctcgtgagaccaactaggtcatggtgagccgtcaaacacatgggagcaaaaacggatacaaatggatcctatctgtatatggacaccttacgttaggaacaagataaaagaagggctatctgactgctctgctaggcatgaac

SEQ ID NO: 126379 - DNA, 375 bp, Glycine max
  Clone ID: PAT_MRT3847_85127C.1
aaaaaaaaaaaaaaaaaaaaaaaaaaaaataaaaaaaaaaaaataaaaaaaaaaaggggaacagaaaaaaaaaaaaagggcgtccgccatcttatttgctcgtgttcccgggatttaatttcgggccggtcctctgtggcgttcccatttttcttattcggggtcctcttgttccttgtctgttttattttcatggctgttccctttgtgaatctgttttccgttcccagttcccccttcttatgaccctgatccttaaatgttttttccctggggggcctaacgagtgagcttccttactttatttgtcgttgtcttctctgccctctttccatgttggtaaacctgtctttccacctgaattaaccaatttgc

SEQ ID NO: 126380 - DNA, 367 bp, Glycine max
  Clone ID: PAT_MRT3847_85128C.1
cttttctgtcttaacggatactgtgcgtgctgattatgactttggtcacgctctgaatgccaaacttatttcaagaggacagtcatcacatagtgggccccccattaggctggacaagccatactatgaactttttgttgacttccaagatctcaaagcggaagctgtagacaagatggctgaggaatatacaacccctgctgttactgcctataacaatgaaccgagcaatcaccctacacttgtgcaaatattcaacagtgccaacgcagaggcaatgttgctcatgaactttactgccaaaggtgctgccgctatgatatcaaactaccgggaagttgctgaacaatatatacaactgggtgcc

SEQ ID NO: 126381 - DNA, 352 bp, Glycine max
  Clone ID: PAT_MRT3847_85129C.1
aaatatcacaacattaaaaaacacgatgactgaaccacatcagagcgacacttctttcagggccggggtataatatctgacttgactagaaaccttctactctttaatacatactgctcagacctagatctgatggagcagcacatgatgttcaacatcggtttacacatctacacaggtcatctccaaataatggagcctaataacgagactgaatgccagaccactgaactccccattgatagcattaataattgtggcatctttcgaagagcatctaccattaacattttttacaaagtgaacaaggacatgctcttgaatcaagatcaggagaaatttttagtatcat

SEQ ID NO: 126382 - DNA, 170 bp, Glycine max
  Clone ID: PAT_MRT3847_8512C.1
tttaggattgccttgctatagttggagtggcatattaattttgacacaagacatatatcttggtctgtaattgtcacagtcagtagtttgatgaagtacaagtctataagtgcataagtgtaagtctgtgaaactgcacagtggtctattacatgatattataaattggg

SEQ ID NO: 126383 - DNA, 1066 bp, Glycine max
  Clone ID: PAT_MRT3847_85130C.1
ggctcgaggaagaccctgtccccgaggccgaaggcactatcaacgacagcgacgtctctcagctcaagaaggccatcctcaacttgggtgtcgacaacagcaagcttatcaggaccgctttcgccagcgcttccacattccgtggtggcgacaagcgtggtggtgccaacggcgctcgtattcgtctcgagccgcagaagaactgggaggtcaacaacccacgtgagctcagcgaggtgctctccgctctggagaaggtccagaaggacttcaacggctcgaacaagaaggtctctatggccgacttgatcgtccttgctggtgtcgctgctttggagaaggcgtccggcgcatccgtgccattcacacctggtcgcaccgacgctacccaggaacagactgacgccaagtcgttcgagcacctcgagcctttcgccgacggcttccgcaactacggccacggtactgaccgcgtccgcaccgagcacatgctcatcgacagggcggagctgcttactctgaacgtccccgagactgtcgtcctgctcggcggtctgcgcgctctcaacgccaactgggacggcagcaacaagggtgtcctcaccaagaaccccggcaagctgaccaacgagttcttcgtgaccctcctcgacccctccgtctcgtggcgcgcgaccgacagcaacaaggagacctttgagggcgagaaccgcaagactggccagaagtggaccgccggccgccccgacctcgtcctcggctcgcaccccgagctccgcgccaccgctgaggtgtacggcagctcggacgcccaggacaagttcgtcaaggactttgtcgctgtgtggaacaaggtcatgaacctcgaccgtttcgacctgcagggctctacccagccccagagcgctcgcttgtagactgggcgtgggttgagggcgtgaagcgtcattcgggttttttttttggcctggctagatttgcaagtatgggatggctggctgggttgtagctaggattctgtgtttttttccgagtaaatgtttgaaatgaagcatgattatacgag

SEQ ID NO: 126384 - DNA, 255 bp, Glycine max
  Clone ID: PAT_MRT3847_85131C.1
aagagcacagacgtgaacatcagctttcaactacaataaagataaacacgtaagaaattaaaacagaaagagagcctgggcaggcatacccgctcctacaatcaaagaggacgcaatgaacacgctagccaacccaattttacgggggaaggggtgtcacaaacactcaaacagactcgcactttgacgatatcttcacacgcatgcaaaagtttgagagagggcacccacggggacccacctgatgaagtagca

SEQ ID NO: 126385 - DNA, 278 bp, Glycine max
  Clone ID: PAT_MRT3847_85132C.1
cactggacgaaaattcagtttgctatatggcaacagaaatgttatttaatacatgttccatttacccatatgaaacgaatcaatggttgcaagaaactttgcctgtatgcatgtaaagataactctgcattgttttttgcactggaaaccaacacgctgctttctcttcttttgccctatagacaaaaaagccttcatttcacgctaaatataaattgggtacacgttcgcttcaacctttatagcttaacgggagctagaattctccaaacttgtat

SEQ ID NO: 126386 - DNA, 405 bp, Glycine max
  Clone ID: PAT_MRT3847_85133C.1
tttttttttttttttttggagaacccatcctctctttttatcctatgaaagaaagtgtaaaatggaagtacataaatggagtgtaacaagactaacaccacaaagcgagaagaaaacacacaaaagtcatactgtttctacttatctacttattacgcaacctagcatagcatagcatgtccttcttgaagtaagcactaattcatgaaaaaccatgatataagacagacaacgtttactctaacactttctttctaacattttttaattatcggctataattcactgaatatcacaaatatcgatagatttcacttctcaattaataagtcttattccaggtttagaagtgaaatgtactgaaatttgtgattgtcagtaaatttaagcaaacaataatatttt

SEQ ID NO: 126387 - DNA, 348 bp, Glycine max
  Clone ID: PAT_MRT3847_85134C.1
tcgaatttacgaaccgggatgtctttatatgatgatctctatctctctctatatgggtcacataaaccggctacatgcatgcgggacataaatcagggaagccttgaaaaggggctgtgagtgtgcgaagaagacaactgttgctttattatttattttgctcactgagcttcagttaaagtagatagctagctagagggaatagagcgtgtctccatgggtaaaggacgaaaggacttgttttgatctcaatcaagctactgttatatacgagagagagagagagatgctgtgttcccaagcgagagaaattcaatggtaggcctcatagagagcgatcaagaggga

SEQ ID NO: 126388 - DNA, 430 bp, Glycine max
  Clone ID: PAT_MRT3847_85135C.1
acggctgcgagaagacgacagaagggtacggctgcgagaagacgacagaagggtacggctgcgagaagacgacagaagggggcagtgcatacctcactactcatctatacaaacaatgaagaacaatggcttatgcttggcttgctcctatggctggcttgttgcttgccacttacaccatactgtatccaacgaacatagatccaacaaattgctatggcgcatgtatacctatctagatgccacccatgccggtcacgtaagtgacggtgtgtccctatatgactaactactggtttctgcatacatacaactggactttcatttgttgcgaacatgatcgaccaacataccaacttatgtaaatctaatgatggatgcatgcatgaaggaagggggtagttttgcgctcgctaccctaacaattata

SEQ ID NO: 126389 - DNA, 384 bp, Glycine max
  Clone ID: PAT_MRT3847_85136C.1
gctaggggaagtagaaaatgctcagcagtgttttaataagtgcatggaatcaggtaatgctgtttgtttggatcggagggttatagttgaagcagctgaaggtttacagaaggctcaggaagtggtcaagtgtataaataatgctgctgaacttttaaaagagaggacttctgatgcagctgttactgctttagaactagcttctaaggcattgtcaataagtttatactcagaaaaattgcttcaaatgaaggcagaggctctatgtttgctacaaaagtatgatgccacaattcagctttgtgaacagagtcagcatcttgcagaaaagaattttgtcttgacaaacaatgcagagaattctgatagttccttatgtgatag

SEQ ID NO: 126390 - DNA, 409 bp, Glycine max
  unsure (1)..(409): unsure at all n locations
  Clone ID: PAT_MRT3847_85137C.1
nantaggtnannnnaggnagctnctgtanngcnaaannaannannagaggnannncaannnganncanaaatnacaancagccaaagcnanannntaancaaggnantatgagnngtgtntgaacgcggatnncancatgcntannnagttgcncacgacaatanaatgnttacntcaggtganaacagngaagtncntagaangngatnacangngatgtngngtatngagtgnngtgtnagngtagngntgncnannaggaagtnatgntgagtancggtaacagancagccgaaggttgnngaagataagatannnanggagtagngtagctngnaatggnntgacngggtgtntnagnagtgagatatgagagngtanantgnnnnagagaggtggntnnntgtt

SEQ ID NO: 126391 - DNA, 1836 bp, Glycine max
  Clone ID: PAT_MRT3847_85138C.1
gaataatcccttctctcattgcttccatctcctatcattgtgcggtctgctaaacttgattttttgtttactctttcttgcttccttcatatttatattatattattattttgcccacatttcttcttcaacgactacactctctctcaaccttcaaagcttcaaactcaaaagaaatggcatccgatcccgagcaacccgctcattcctctttcgcaaaggaagcaaggtcaggtggtgagattgggagtgcaatagagcctctgcttaatggggttcatgactctgaaagctattccgtctctgctgcaattctcccatttctcttcccagctttgggtggcctactatttggctatgatattggtgccacatcttctgcaactatttccattcagtcaccaacactaagtggagtatcttggtacaagttgtcttctgttgaaattggtcttcttactagtggatcattgtatggtgccttaattggctccttgttggccttcaatgttgctgacttcttaggtagaagaaaggagctgattggagctgcagtagtttatcttgttggagctcttgtaacagcattagctcctaattttcctgtattggtgcttgggagacttgtatttggcataggaattggactggcaatgcatgctgctccaatgtacattgcagagacagctccaacaccaatacgtggacaactaatatctctaaaagagttctttatagtacttgggatggttgcaggatatggaattggtagcttgttcgtcgaaactgtatctgggtggcggtatatgtatggagttagtagtcctgtggcaataatcatgggagttggaatgtggtggctcccagcttctcctagatggttacttttacgtgctatacagggaaaaggggatgttcagaattcaaaagacatagcaattcgtagtttgtgtcagcttcgaggtcaagctttttatgattcagttccttggcaagtagatgagattctggcagaactttcttatctaggtgaagaaaaagaagctacctttggagaactattccaaggaaaatgcttgaaagccctttggattggttcaggattggtcttgtttcagcagatcacagggcaaccaagtgtgctctactatgctggatcaatctttcagagtgcaggattctccggagcatctgatgcaacccgagtctctattctccttgggtttttcaagttgattatgactggagttgctgttgtcgttgttgataaacttggaaggaggcctttactacttgggggagtttcagggatagtgatctctttattctttctcggttcatattacattttcttggataattcaccagttgttgctgtaattggtctgctgttgtacgttggcagttatcagatttcctttggtccaattggttggttaatgatagcagagattttccccttgcgcctaagaggtcgaggactaagtatagctgtactcgtcaattttggtgcaaatgccctggtgacatttgctttttccccactgaaggcattattgggagctggaattttgttttacacattttgtgtaatagccgtggcatctcttgtattcatatactttgttataccagaaaccaaggggcttacactagaggagatcgaggccaaatgcctctagtcagtcaccttgttttacctctataaatatctgtttttagtactctgttgcaacttgtcttgaatattgtaatgacacatattatattaataaaaatatgtaatgatgaaaaaaaaaaaaaaaaaaaaaaaaaagcccgagcccgcgccctagt

SEQ ID NO: 126392 - DNA, 378 bp, Glycine max
  Clone ID: PAT_MRT3847_85139C.1
ttattttgcacacaaacccaataaatttccgggtgattttttataaatatcgggctcaataaaacactcaaacatacctgcggtagccatactacaaatcaccatatgcaaccaccaagaattcacagagcctcaactgcgagaactacacccaaataaaccatgttaatgaacatccaaaacatggtcttaaatggggaaagctatccaggcaacaataaacccagtccatgaagagatcgaacatggaggcgccctacaagggtaactcaggaacacgacaccagcagcctacgtggagtcaattacatctcttttcaacaacaagactccgctccataatacactaacacccccccacggtccatgacgccaagg

SEQ ID NO: 126393 - DNA, 1004 bp, Glycine max
  Clone ID: PAT_MRT3847_8513C.1
gatccatctaacagaatcctaacgaaaaaaatagagaagagagtgaggtttggtggtgtggtttagtgtcaaaatggcggcgagtagagaggagagggaagttttgtggtgtggtttagtgtcaaatggcggcgagtagaagcacttttcctctgatgaaatacttgagagtgcgcgtcgacgctcttccccgcaacactcccttaaccctcgctcccaactttttgattcgccgcttctgtgaagaggttaggggttgttttctcgacaagtctgaggtcacagatcgcgtcatttcctgcgtcaaaaacttccagaaagttgatccttcaaaggttaaccctaatgctcacttccagaatgaccttggattggatagtttagattcggtagagattgtgatggctcttgaggaggagtttgggttcgagattcctgataatgaggcagacaagatcaactccattaaacttgcagtggacttcattgcatctcatcctcaggcaaagtagtggaattcttttgtttctcaacatctagtttagatgatccatcagacatttttgcttccatagtggaactttgttttctcatccctcagaagggtgttagctggggatgtgccagcttcatttggcggtattggcatccagaacttcacattctgtgttcctcctatattcgtgtcaataagaattgtgttaaatttccgattatgaaattgtgaggtcttgagttgtcctcagcaacagatgcattatgctattctcttttgctctgttttctgttattacatcatccgtaataattttgcttttgtttaatctccatgcatcataattgaagttatacatttatactctgccagatggttcttatgtaatgagttgtttccgtgttaagaaagaactgctcttttagagttctaatccagaaaaaggtgatttattgtgaaaaaaaaaaaaaaaaaaaaaaaaaaaaaaaaaaaaaaaaaaaaaaaaaaa

SEQ ID NO: 126394 - DNA, 858 bp, Glycine max
  Clone ID: PAT_MRT3847_85140C.1
gcttatcgtcccggaggggcggaggaggacagaaggggactcacaaataaacataattacttgccttgaggaacgttccagaccacatacagaggtttctctagtgatcttcgttcttctgtggagatcttgttttttcatctcacttttcttctaattaaggaacaagctttccgcagttgaaaaccctagctagctagcttccaccaatttgaatcaccaatggctcgctctttctctaacgtcaaggttctctctgctcttgtggccgacggattctccaacactctcaccaggcgtgggtacgcagcagcgacacaaagcgcaacaagaggaggagctgcctccatcagcagcaagatagctcccaagtcaggggaagacaaggtaggaggaggtgctgaaaaggtttcgtgggtcccagaccctgtcactggttactacaaaccggagaacatcaaagagattgatgttgctgagctgagagccacggttttgggcaaaaaattcaaccactagctcgctagctagttaatttcaataacctttttggtcacttgaatatgttatatcatatatgactctctcgaagttcacagaaccttcggggattattcagcatgggccatctagcatatggccaaattaatgtctactagtgtgattggatctcatgttgaatactcaaactatgctttagttgaattctcttttgctgaataatacgagtagtttgaaactttctaacacgctctattaagtatgaaccctccttttccgttttcaaaaaaaaaaaaaaaaaaaacaagcgactagttctcaaaaagggcggtccccaaaataatggggggggccccc

SEQ ID NO: 126395 - DNA, 173 bp, Glycine max
  Clone ID: PAT_MRT3847_85141C.1
atactatataacatgcccttaagggagcacgcgataaaatgcatcttaatactttaagatcaatctagcacacatggccaactataaagatattaactcattacattaagagcctatccatatctcaaatccatcttttggatcaaagcagctcggtcttttttaaatcacac

SEQ ID NO: 126396 - DNA, 526 bp, Glycine max
  Clone ID: PAT_MRT3847_85142C.1
atctaactttataaaacaagcatcctttcaacgagtgttttcctatttattaaaatgacaatagttgattcggaacacaagcaatactatataaaatgaattatattatttttatacacactttttataacacctagtacaatttattatatatatctctccattgcgtatcatccatcatatcttacacttattttatttttcatacttctcttttagttgaacagaagtattgtacaaataaaatttgtcaagcaaaatgttacaattttgacacttaaaaggtgtaacaattaaacatgtaaaatttctcaccataccactatcccaataaagaatcttcagggttgttcaaagggtgaaacacaaaagcttgtagctaccggttgcaatcattgcttgggctcacaccctcattacctgccaagaccaaatacttgtctttcctggtcaggttggtacatgcaaattccaaagcattgcatatctcattttgcacgaaattggcaacttcaatcttggactt

SEQ ID NO: 126397 - DNA, 257 bp, Glycine max
  Clone ID: PAT_MRT3847_85143C.1
attcccgcatccacactcttcggcggccgccctttttttttttttttttttgcacataaacaaaaatcatccattattaaaggggggatgggggggaaggttatattttttcttctttttctttttattcctttctctatattatcttccaaaccccaatccagattttatcccccaaaccgctaacattccctcctattttattctcaccccaaaataaatccaccggccccgaacatcaacctcccagtttgaaa

SEQ ID NO: 126398 - DNA, 388 bp, Glycine max
  Clone ID: PAT_MRT3847_85144C.1
gagggaaacccctccctactaaaaatcgggttttcaacatcgatcaaaaaggggattcaacaacattgactaaccggtggtgtatggaacggtggtgaaactaccaattttcaacaacagcccataattggcccgggggaaaaatacatttatttttacatgggggcctaccccaaccccggtggagaaaactacactttcaacattgtttttcgccagcatcgatataaaaaccggggctttcaacatcgtttttagtcagcactggtgtagtaaccggggctttaacattgttttttgcccccccgatgtagaacccgggttttaacaatgtttcttgccttagcaacgatggaaaaaaatttggtttcttctatacatttgaaaa

SEQ ID NO: 126399 - DNA, 160 bp, Glycine max
  Clone ID: PAT_MRT3847_85145C.1
tgagcgtactatacggctttgccagtatctttgaattccagctaccaactttcataatgaatacaagggctatatggttgtacctgcagatgttgccgatttacctattctgaaggacattattcatcgtgtcgctaggtggcagcttgctaaacgacac

SEQ ID NO: 126400 - DNA, 273 bp, Glycine max
  unsure (1)..(273): unsure at all n locations
  Clone ID: PAT_MRT3847_85146C.1
aggagaaaacgaagacgaaagagaacagggaagcagcagaagncnaggaagcaaggccaagccanggcgcaggcaaccaaaggaacccacnccgaaagaaaaccggccacggngagcgnncnncggaggaaaaaagcgcaagnanaaggcacgcagaggaagcacacaacaaccgagcccngaaaaccaaacccgaagagngcgnngaaccaacaaaggacnacaanaaaggcgaacaanngagaacagacncgaaaacagggaaccaacaag

SEQ ID NO: 126401 - DNA, 1604 bp, Glycine max
  Clone ID: PAT_MRT3847_85147C.1
gagctcctcaattctgtatgaatattcaatcaaagaatacacagagactgaacaatttgatttaggcctaacgtggaagcatccaattgtttggaatagcccacatgcacctttatatgccagtagattttcgatgggaagtgggaatgaaaggggtgctattgcaatatccttgaaattgatccagggacttgttgcaatcaataacgttaaagagaggtgtaagtttcaagctaatgttctccaaattgtgcctttggtatgttaaggtatatattatcatactttgcaattagtagttgatgaaaggcctcaagcactcacagattttgttgagagaatgcgtgtttcgccttccgaagacaaagtatcacccggggtgatggagatggttctccaatgtcattgtgaaatgaagtcagcggcattgaactgtgtaagttaatgtttgtaaacaacctcaaaaatcttaataagtaacttattgtattatatgaaagtaggactggtgttgatatcacgtgaaagtaggaggaatcatataaaatatcaatttgatttatatttataactttttaaagtagtgatggaagtgagtgagccaggccaaactctggccctgcttgagtaaaggtgaactgcccatttagctcatgcgcttcccttaaattggccaggacagtaaaatataagcctgtttaaaccttcctcttttaggctgctatgctcatatgggccttgttgacccatttataacatacagttaagtacatgtcaccatggcataaaaagctgatagtaatgtggtatcggaaaccttatgtgatatgctcactttagattattttaggatggatgaataggaaattggtttgtttttcatatcaaattggattttgacttgcttttgtttgtctgcatagggcttcttacacattgatgaataccctccagatgttaatcaaggatttgacattccatcagcaataataagctttcctgacttccatgctggtttgcaattgtctaataaatctcgaagcaagtcaccattgttgtctaagttacaggttatttgcggacgcgtggcttacacagaagttttacttgtacccttgacgacacctgatttcagtatgccatataatgtcatcacaatcacatgcacagtttttgcattgtattttggatctttgctaaatgttctccaaagacgagttggagaggaagaaagacttttgaaagataaagttgcaaacaaagcagtgttccttcgtcgagtactatctaaactatctgccaagcttagaggcagatcgttggaattgactccaccagctccctcgtggtcatcatcatcgtcctttgttactccaaaattgattcttagagtactagtggttgcaggaattgcctttgcatggcaatactattcacaatgatatctgccaactaagtagttttacttgtactattgcatgtattttcatgtacaatacaaaccttccactgcccgatgtgcctgcgtgcattcatgactttctaattgatcataacaatacatgtacaagaacaaattgattattataaaaacaattttgtcc

SEQ ID NO: 126402 - DNA, 285 bp, Glycine max
  Clone ID: PAT_MRT3847_85148C.1
gaagaagagaatttggaaagggaaagattcaggattgcagacacgacctccgttggtagctgcaagtcggaacacagcctaaacacaaattcactggtcacagtgttcatctctctcctgcgcccttcctgcgactgaacgtgggaaccgcacaaacacaacttgcattgatggctgtggcctaatttccttccttttccccaatcaaaattcaaaaccctaactatatccttcgattgattttttgttcattaagttgctgctagctattaaattgtgagagtc

SEQ ID NO: 126403 - DNA, 279 bp, Glycine max
  unsure (1)..(279): unsure at all n locations
  Clone ID: PAT_MRT3847_85149C.1
gngcccncgactggggccccggtggtggacaccgacctcatcgtcgacgacggtggtgangnnacnctnctcatccacnaaggcgtcaangccnaggagcncnatgagaagaccggcgaantcnccgannccaactccaccganaacgccgagctgcagatcgngcttaccatcancagagangggttgaagaccgancccatnaggnancgcaagatgaaggagcgtctcgttggggtntctgaggnnaccancactggagttaagaggctcnatcag

SEQ ID NO: 126404 - DNA, 723 bp, Glycine max
  Clone ID: PAT_MRT3847_8514C.1
tccggaaaagaatagagaagagagtgaggtttggtggtgtggtttagtgtcaaaatggcggcgagtagaagcactttacctctgatgaagtacttgagagtgcgcgtggacgctcttccccgcaacactcccttgaccctcgcttccaacttgttgattcgccgcttctccgaagaggttaggggttgttttctcgacaagtccgaggtcacagatcgcgtcatttcctgcgtcaaaaacttccagaaagtcgatccttctaaggttaaccctaatgctcacttccagaatgaccttggattggatagtttagattcagtagagatcgtgatggctcttgaggaagagtttgggttcgagattcctgataatgaggcagacaagatcaactccattaaacttgcagtggacttcattgcatctcatcctcaggcaaagtagtggaattcgtgtataatttttcttttgtttctcaacatctagtttagatgacgcatcgacatttttgcttccaaagtggaactttgttttctcatccctcagaagagtgttagctggggatgtgccagcttcatttggcggtattggcatccagaacttcacattttgtgttcctccaatattcgtgtcaataagaattgtgtgttaaatttccaattatgaaattgtgaggtcttgagttgtcctcaccacaaatatattcttattcttatctaaattttt

SEQ ID NO: 126405 - DNA, 734 bp, Glycine max
  Clone ID: PAT_MRT3847_85150C.1
cttttatctcagcccactcgtccgattttgtgaaaccttggtggtcaggccaaaaacaatgtctcgctgtgccccaaggtgtgtaacaaggagtgccacgaggcttttcaacctcacacgcgctctctccattgaggcgcgcgagcagaaggtcgagcgcatcgccaccgagcttctcaacctcaacaggttcgagaggcacgacttcacggtcctctggcggctcaagatgggtctacaccgctatgacgccgccccggtggccggcgttgcgacgccgtccgtcgtcggcgcgaaggtcggtgcttccgtggcggtggagaagacggcgtttgatttgaagttggagaagtatgatgctgctgccaagatcaagatcatcaaagaagttaggtctttcactgatttagggttgaaggaagccaaggaattggtggagaaggttccttgtgttttgaagaaggggctcaccaaggaggaggctaatcccatcatggagaaactcaaggagttgggcgctgctgttgtgttggagtgatgattctgaattttttttctttgtgttctagagttttgtgttagttgtagaataattggaacttgtttgtgggtaataatgatgaatgatgaatgatagatggtaagttatatattattattattattattgtaccaaatcacaaaaatgataaaaaaaaaaaaatattaccccacttcaaaaaaaatacaaacac

SEQ ID NO: 126406 - DNA, 285 bp, Glycine max
  unsure (1)..(285): unsure at all n locations
  Clone ID: PAT_MRT3847_85151C.1
angctggangcttccaccgcnnggtggcggcccgcttcttagatnactagttggattctccccgggctttgcagnngaattcnnggcagcgagaacgtactgnngcctcggagggggaacccacgaacannattatgtnntaacaaaanntaatctgnngaacccttaatggtannncagtgtcattcattcnnagtgtgnntagtttaaaagctangnnctttgcttanntggttacnngttctnnnttgagaatgnaagatgtcttngnnatgaacagnnnta

SEQ ID NO: 126407 - DNA, 449 bp, Glycine max
  Clone ID: PAT_MRT3847_85152C.1
cattatcaaatccaatggaagtgataaagggctagcatacatgtgttcaaaagaagaaaatggtagcagattattgggcattgctgatacaccaccacaaaaattcgacccaacaaacatttaccaagaattcgagatcagtaacgatatgtattatggcaaacccaacggttttaatttcaagtctgtggcttccaatggagtaactccatatgccatgacacacaagaattggagagcttattgcaagactctcaagactttccaacccaccaaagaagcgcttggtctcgacgtcacgcttcgagctcgtctccctccgctcacattctccctgccatgtaatttctccagccctattgttgtaaggaaatggtactgccctttcattttcgttcgagaaggcgatgtggattctcaaatcaagaactctccatattacgaaatga

SEQ ID NO: 126408 - DNA, 350 bp, Glycine max
  Clone ID: PAT_MRT3847_85153C.1
tttattctcttatatatacttttttttttttctataaaaaacaaaaaccatctgggggtggtttcatccatatcccactcctaaccaaaatgaacataacttctctgaaacatgaaaacccaacgctactatgcgttaaatttgtatgccttcttttaaaacctagaaggcttgactcctccggggtaaaaatagaaacacgagcctccctaacaatggcaaatatcacacacgcgttaccaaactatcgcacttcccttaaccttgcttaacctgcaagttccgattggtcattgaaaattatggataaaactgccccaacatataagaattactcatcactcaatttt

SEQ ID NO: 126409 - DNA, 512 bp, Glycine max
  Clone ID: PAT_MRT3847_85154C.1
atcggaggacttcaagtcttactagccgattttgaacagttcaaaacgcctttacgataactacacagtttgctggccgcatcttccctttgctccttcccatcgcatcctcgaaaccaacacggtgctacaatctcgcagcccaaccccattcccacaaaccaccaatcctcactgcttcagctgctccttcttctccgcctcggtcaatcccagatgatccgtcccactcctccctgtatccttgacgaagttcccaccagccttggtagtgtcgcccaggccctgggtgacgcctgtgacggtgtcgccgacacccttgcccgccgtcgtcacgacgttgcctgctgcgtcggtgacggtgcccacgcctttgcctagcgtgtttgttgctgcgccgagggtgttgccgaggccgctggctgcggtgccgaagaagcccttaggctgttgctggttcttgtcggtcatactggcgatggtttgtatatacgaaattgatcgagtttatt

SEQ ID NO: 126410 - DNA, 340 bp, Glycine max
  Clone ID: PAT_MRT3847_85155C.1
tttctgttttcaaacacttatgtgctcacatctaatttttggtgatcttaaccactggatctcagctgccatgatcggcgtctctggctgcctaaggtaccgcggacgacttaactgcgacctacgcagactctccgaattcctaatccctatgtctcgtctccacttgatatgggtcagtttcacgcacctatcatgccacctcttcatagactacctatcgctcacgattccgtagctcacccagcttatgtggcacacgctgaacatgatgtgcgccaggctacattcaggactgaggtacctgacagcgcacgccatgttcctggactatatgact

SEQ ID NO: 126411 - DNA, 734 bp, Glycine max
  Clone ID: PAT_MRT3847_85156C.1
gtgtgaggaaacctttgcaacaacatgacaaagcagaaagagagaaggaaagagagcaagctgagcaggtacatgaaggcaccattaaggtttctgaagaaggcaagggacatgtacgtcaaaggcatgatcgagtgctccggtcagttatcctatgtggaggcctccattggatgccccaccggccagctctgcacgcttcccagaagcttcagcgtcggctcggccacccgatccaccacgagcgacgacgatttcaaggagctcgtgagggccgcgtcgctccggagctacggcaatcgcgttcagttcggtgatgctgctgccgccgcggtgaagaagatgaaaatgcatcggagtcgcagcgtgggaatatttggaaggatcgacgaggaaaaggtgtgtgagtttggagatgatggaatcaaggttaggcctaatgcttatccaagaagtaaaagttatgctgcacgtagagacggatcagcaaaggactgttttagttaacattaatgttaattacgatgtttttctctcttaactaaaaatgtaaggaaatatgcatgacttgttgttctcttgtttaataatttgtgaaaatagttaatgtaaagccccggaatgctgcttgagttgaaggtatatccgtgagaacttgaaaaatgtttggattcagaatttgtacgtactgttatgtgaattagtagaaatctcaatattattaagtttctacc

SEQ ID NO: 126412 - DNA, 206 bp, Glycine max
  Clone ID: PAT_MRT3847_85157C.1
aaaaaagggagaaaaaagagactttgggaatccaacaatttattacaaaaccaagttcatgacctttaaagcaccatttaatttggttttaacaatttattttaggttgaaggggaatttttgaaaacttttccaaaacctggggaccggggactaggggtttgcattaactggatctccttcctggggggtgccggggtggtttt

SEQ ID NO: 126413 - DNA, 372 bp, Glycine max
  Clone ID: PAT_MRT3847_85158C.1
caactcatcaccttttttatcttttacttgggacacacaattatctttcccatgctacaaaacttctgtgggcacatgagacaccataaactttcttatcgtttatgacttctaccaccccatcttttctcgtatactcgatgacttcttccaccccatgttatttcttaccctatggagcttcttacacaccttatttcttaacctttatcgattgtttcacaccattttcggggttaacctctttaactactttcaccacatcttattgcatatgctaccttgctaattgcacaacaccgactttattgacctgtactacctttttcacactatcaggggggatatcttgaatctcttttacaaaatttt

SEQ ID NO: 126414 - DNA, 370 bp, Glycine max
  Clone ID: PAT_MRT3847_85159C.1
gccctgcaatctgtgattaattcactgtagtgagtttccagggtaattacttttcaaaactgcactcatcttaaaattgggttattacatcataatagtagcatcatgtctaaatatagaactggctcacaccatggtcgtacatataagacactagttcttctcgtttaacatcttataatcattaattgatctatctctcaatctatatatagctctcaatgaccactgacgcttcgctaacttggttcagtgaacattcatattgacacgtcacttgtcttttgtacgctgatatcgttttttccgacatggttgttatcctgtgcaactatctgtcaggtaattactaattactcctcacgtaccg

SEQ ID NO: 126415 - DNA, 298 bp, Glycine max
  Clone ID: PAT_MRT3847_8515C.1
ctcatctccccttatttccctttctattaatttaacattccactttaaccttttaacccccaccaaactttaattctttcttaaaaaccactataataatatttttatatcactactttccaatttcaacctctatctattaccctattcccctatcatattcaaacctaaaaaactcccttaattaacattcaaattcaccccacaatttaactaccaatttatccattaatattatttaatctaatcatattattctatcatatttaaccatataacatatattaaaatttttttt

SEQ ID NO: 126416 - DNA, 268 bp, Glycine max
  Clone ID: PAT_MRT3847_85160C.1
gctcgacctacgcgtcctagcaagcgtacttcctctcatgccttgtctacgaacgacctgttaaaaggactatgaaacaagatgaaacatatggaccacaactgccatgcatgcccatatccatttcttcgaatgtccagaccaccctaaacggaaaaacccgaacctacagtgggacccttgctataccactcaccacaaggctgctgaccgcatgaccacctgcatgaaaccctgctctataactatggcaccgtatgagtacact

SEQ ID NO: 126417 - DNA, 500 bp, Glycine max
  unsure (1)..(500): unsure at all n locations
  Clone ID: PAT_MRT3847_85161C.1
ccataggaaatgaaatttggagtttaattaaaaacagtacagatacatttaacagagaaataaaactcttgtgattatcaccttggaaactccaagaatccccaagcattggagacccccaagcttattcctgagacagcgaccgtcacagagggttacactccgagctatttcacattgtgtagcagaaaccagaaccgaggtctgaagatgtcccttctttgtttttcctaaagtcttcacaaaagagggtctttccatggttcaaaagaaaaacaaacagctttctttcccagccaatggggacctgaaatcttactaagggggcttagtataggcatccaatacaaccagaaactcccagggcacccctgattgctttactgtctcccctcaggaggatggatggatgagcctgtgtgtcggaagcctctctcctgggatctccatgtggaccacggtacaggagagtgggatatgggggagtgcggggggngggg

SEQ ID NO: 126418 - DNA, 316 bp, Glycine max
  Clone ID: PAT_MRT3847_85162C.1
cccacgcgtccgcagaacgtaggtccacacataagtaccacaatcgcaatacggactcacaggtgtacagaacgatttagaagaacgattagaccaaatattctgaaaagcgctttagcttggataagaccatggaatacataaacttataactgaacacattatccgcaggggacatcaagaacgtagaccttttcttcaaaatggacatattccctatcattacaatgtaccacaacactatatatgctgacggctctaacacccacgtacacatagactccggcagcaacgagacgtggtactaccccgtgaa

SEQ ID NO: 126419 - DNA, 274 bp, Glycine max
  Clone ID: PAT_MRT3847_85163C.1
ttccttactacaaacttgccactaatgtctccataatcgccatgatctccaaatcggggggggagagcagtcactaggtagacagtgatcggcgatctgcttctactgttactgcatatgctccgacgacgacgatactactttgcatcaggctcaatgtcatgagccataatatgctaccaaaacttaattgggtcccttacacattggtcgatacagacccttgacacataatactgcccatcatgctcgtatgagacaggattagctacga

SEQ ID NO: 126420 - DNA, 596 bp, Glycine max
  unsure (1)..(596): unsure at all n locations
  Clone ID: PAT_MRT3847_85164C.1
acggctgcgagaagacgacagaaggggacacaagaagtggtgctgccttaggtttgtgctgcaaaaatgggactcctcagaaactttgtcgttgttactgtgattgcactctcagagtttctgagtataggagctggggaaaccaattcctcatcacaaacatgtgattttcaagccatattcaactttggtgactctaattcagatactggatgcatgtcagcagcattttacccagcggctttgccctatggtgagacttttttcaatgaggctgctgggagagcttctgatggacgccttatcatagatttcattgccaagcaccttggtttgccactattgagtgcatacatggactcaattggatcaagttatagccatggtgcaaactttgctgcagcatcatcaacggttaggaggcaaaacaaaaccttctttgatggtggtagtcctttcagtcttgaattcaggtggcacagtttatccaatttatgacacgcaccgccaagttctaccaacaaggacagggaaatntctttccaaggccagaggactttgcgaaggccatctacacattcgacattgggcaaaaa

SEQ ID NO: 126421 - DNA, 392 bp, Glycine max
  Clone ID: PAT_MRT3847_85165C.1
gcacaactgagtttgatgatcgagatatctatgagcagtgtgatgaaaatgaaagtccttggattcttcgtgtgctacaactttggtagcattgcaatgccatgcgtacgatatgttccctctccgaatgaacactggctatggatcccgtactccggacgtgaaatgcgcatgttggacgcatgctgtgggatcacacaacatctttggctttgagatcattcttgaacagttcgttgaagctgcattggaatacatccatggcgaacactatagatcagactccaatacagttcaccaacaggcttacttttatgccacatacctcgaagtcgatcccaaggacacatttgtgttcagtatatatggcaccgtactcgctaatattccat

SEQ ID NO: 126422 - DNA, 1344 bp, Glycine max
  Clone ID: PAT_MRT3847_85166C.1
agcacgcgacgaagcgcgggggtcggctcgagggcctcttctgctcgtcgccggaacgcgctgctttcacgcgaactacaacaggcgtttcggcgacgaggtgggaccgtggaagttaacggcgttccagcgtttgaatttcacggcagaggacgtgctggagtgtttgtcgttgtccgataagatactggggatgggatccacgggaacggtttacagagcagaaatgccaggtggcgagatcatagcggttaagaagctgtgggggaagcagaaggagaataatatcagaaggaggagaggggttctggcagaggtggaggtgttgggaaacgtgaggcacaggaatatcgtgaggttgttagggtgctgcagcaacaaggagtgcaccatgctgctatacgagtacatgcccaatggaaacttggatgattggttgcatggcaaaaataaaggagataatttggtcgccgattggttcactaggtataagatcgccttgggcgtggctcagggaatctgctatcttcaccacgactgtgatcccgtcatcgtgcatcgcgatctcaaacctagtaacatattattggacgctgagatggaggccagagtcgcagattttggtgtcgccaagttgattcagaccgacgagtccatgtctgtcattgccggttcctatggctacattgctccagaatatgcttacacccttcaagtcgatgaaaagagtgacatttacagctacggagtggtgttgatggagatcctaagtggaaaacgttcggttgatgcagaatttggcgatgggaacagcgttgttgattgggttaggtctaagataaagtctaaagatggcattgatgacatattggacaagaatgcaggggcagggtgcacctcagtgagagaagagatgatacaaatgcttagaattgcattgctttgcaccagtagaaacccagcggataggccttctatgagggatgttgtgttgatgctgcaagaggccaagccaaagaggaaattgcttgatggtgttctaggtcgatgtgctggggacaatgtggttgttggtggtgacattcctttgccacaaaagccaattgcggatcaatgttaatgtgtttatatgattgaaatgatttttctttttttggatatttttcttattgtgggggattggtataggagaatcattttctattttactttcaatggaatttcaagtgttacttgttctagtttttttttctccagttacatattgttatgactcttgtttgctaatgcttatatattaaaaagtgtgcagctcatatgaatgactgacacatgttgcctccc

SEQ ID NO: 126423 - DNA, 614 bp, Glycine max
  Clone ID: PAT_MRT3847_85167C.1
acttccataaccattcacactccaattattcatacaatcacacacacttgacagctacataatagaatcatccaaaagagacctagaccaccaatattatgaattacaaagcagaaactagtattttttgttttttttccgctcttcccctcaacatggaaaacaaaggaacctttaccacaaaatgctacatatccaaacaaaggggggcccaaaaactcatgatgaaacactaggatcactctgccaaacatcaggaaactttcttgttacttttaaagtaaatgccagcatgatatgcgtgcaaccttgaaagaatgaaaaaaaggaggggggaaagggggaccccagttgcctaatgcgcgggcgttcaatcaccaagagagagggcaacacttgagagagagaaaaaaaagtgtcctcatttacaggaaagcccccccactaccatttccatcacttaaaagtttcaatctgggacctttaatctccaaaaaaagctacagtataatcatgttggtcaacaaattgaaaccccatatcctgcatttttctccaaccgaagtgccaaagtgcaatgctatctatttcagcattagtacaaactttatttc

SEQ ID NO: 126424 - DNA, 603 bp, Glycine max
  Clone ID: PAT_MRT3847_85168C.1
agctacggagtggtgttgatggagatccttagcggaaaacgttcggtgaatgcagaatttggcgatgggaacagcattgttgattgggttaggtctaagataaagtcaaaagatggcattaatgacatattggacaagaatgcaggggcagggtgcacctcagtgagagaagagatgatacaaatgcttaggattgcattgctttgcaccagtagaaacccagcggataggccttctatgagggatgttgtgttgatgctgcaagaggccaagccaaagaggaaattgcttgatagtgttattgtgggtcgatgtgctggggacaatgtggttggtggtggtgggggtgacattcctttgccacaaaagccaaccgcggatcaatgctaatgtgtttatatgattgaaatgttttttcttcttcttcttcttttttatattttggatatttttcttattgtgggggattggtataggagaaagtcattttctattttacttccaatggaatttcaagtgttacttgttctagttttaaaaacgtgttatatattgtcatgactcttgtttgctaatgcttatatattagaaagtgtgcggctc

SEQ ID NO: 126425 - DNA, 281 bp, Glycine max
  Clone ID: PAT_MRT3847_85169C.1
gaggggatcgatgtataaaaatatcatgaggtacctctgacataacgagagatagagagagaaagtgtctgtttatttgagttagctattcgtgatcactgattcgttggcccagcttggctaagcgatgactctatatctatcccttatgcaactcatgtgcgactctcatgtttacaatcatccctcatcatcatcgtcacactgtacccttttctcttaatgactctttccttgtggaatgtcccattgactgactgggctggacacttggatctaaa

SEQ ID NO: 126426 - DNA, 447 bp, Glycine max
  Clone ID: PAT_MRT3847_8516C.1
gtggcgttgtttcttctataaaaaaaccaaacctgaaaaacattatttgatcttttctacgttttccctccatggaaaaaggggaaaatgtttggcctaatcttactacaaggacaacaagttatttggctgaaaaatccttcctacaaaaatgctctgaaaaaggacttttgttttacttacggccatcaccgagggtttttatatctaccctccacaattattcccctcatgtatacccaagttgccccctctttcccggcttctgatgggccacaagaacacccaaagctgttttcttatcaggcatggggggagaggcttccttaagttgaacacaaaaacatagctgcaccagcaaaaaatcggaggccttttttgggggagtttccctccaccgaggcaacaaaaaagagcagggtgaaagtatccccacccccggtttgc

SEQ ID NO: 126427 - DNA, 336 bp, Glycine max
  Clone ID: PAT_MRT3847_85170C.1
ggacaagacaaacaggtgttgtatttgtaattaagaatccataaaagttcattaaaacatgaacaggaaccgggttttgtgcaagtaccgaacatgttgagaagtttttgcattttctacaaggcggctttaagaggatgactcattctaaaatgaggttccatttaagccatgcctccactctttgctggcctgattatctggatgagagttgatccaatgaccacaaaggcggagaaaccgggcaccactgggccgacagggtagtctttaccctttttaggggctgtggatggcacaaatactcttttggcgatgttgttatcaaacatcacc

SEQ ID NO: 126428 - DNA, 670 bp, Glycine max
  Clone ID: PAT_MRT3847_85171C.1
acgagagggggacccttcagtccgctcctccgtcttcctcgtttttgcctctccttcagaggtttcaacctttagtcgacggatcctccaatctacctttctttataggagctgctcctccttcttctgctcctccaaccatggacaacaacaacagcaacaacagcaacaaccatcaccaccttcagttctcacccatctttgatggccgcttgcaactttgctatggcgatggaacaaggcagcattctgatcacaaggggaagggaaagaactaagttcccccgaggagcaccacttttgttcctggaattgtggtctttgtttttttagtagctgcaagctgtgtacccagcttggtttctgcaaaatggaggataagttgttgtcatcaagtgttggtgtttcttcttggatcattttgagtcattcaattacattgagtacgtatttggatatttattaacttatgcgtgcatagtactatattacggataaatgtataagaatgttgattgaagatattttgattttctacaattgattctgaaattgcctgtaccctttggttgggaagagctgtaggaaactaaataacttcaaatttctacagtgccccctttccgatgacacttttttattaaggaaaattttcttttcaaaaaaaaaa

SEQ ID NO: 126429 - DNA, 854 bp, Glycine max
  Clone ID: PAT_MRT3847_85172C.1
gttgcattagcccaccatgttgaagcagttcatcgcgctggccaaagcgcagtggggcgaccagcaggacaaacagcacatgaacgtgcgcattcgcggcacgcaagcgcacacggagcagacacgcgcggtgatggcgcaaattcagcagcagcacgagggcaagcgacacgggttcagcgctcaacagcaacgcaaaatgctgcagcgcagcgccttcctgaaccaattccatgtggaggctacgtacgcactaaaggcgtacgcacagaacatgatgaaccgcggaatagaactgctaaagtcggtctacttctggaacaccaaatcgcaactgttgggcggaccgaacgcaccgaaaaacggaaagatcgccgccacaatttccattgatccgctgcagccaagcaatgccaacgtgaccatccgtacgcctgcgcagcagttgcacatgcagcaaatccaaatgccggccgcggtggggcgccccttcccactgatccgtcaacagagcgcgcagcagacgcattcgctggcacagctgttctacaagcagttcagcctcaaaagccgtgcccaatgcattgttgacggacgaaatgtggacacttttgacggctttgccttcaccgccccgctctcctccaattgcttttctgtgctggccaaacactgcagcagcccaatggaagaacagcatcagcagcagccccaatttgttgtgatgctgaagaaagtgccggcaaacagaacgccaacaaatcggcacaaaaagcggacaaagtgctgaaagtgatcactgctgagcacagatcgaatgcagcccaaacagcgcgggcaaaaaggacaatgat

SEQ ID NO: 126430 - DNA, 227 bp, Glycine max
  unsure (1)..(227): unsure at all n locations
  Clone ID: PAT_MRT3847_85173C.1
gatcnacacagaaganttgttttcatattgttgggggttnggcttttacggtcacctgcgcacattgacaaaggcaaganacaggtattacaagttaataaatgaccttagggcctcttcattgttgnttgaagaccctgaatgcattcgaatgcatgatgttgtgtgtgacgtggctaaatcaattgcatctaggtttcttccgacttatgtggtccaaggtacag

SEQ ID NO: 126431 - DNA, 301 bp, Glycine max
  unsure (1)..(301): unsure at all n locations
  Clone ID: PAT_MRT3847_85174C.1
gttcgagtcttctaagatgatttttaaccaaagcaattcacaaataccttgtgccatagcccaaaattcagcttcagctctagattgtgctacaacatcttgttttttactctccaagttaccaagtttcctcctagaaaggtacaatatttggaagtggatttactatcagttattgatccttcattgttagcattcgtataagcttcaagtattgtattcccatttcttttgtacaaaattcctcttcctggtggtgtcccctcaaggtagaggaattttgtncaaaaaaaaaaaaaaa

SEQ ID NO: 126432 - DNA, 1809 bp, Glycine max
  Clone ID: PAT_MRT3847_85175C.1
ttcaaatcctatccgaagttccttataccgtgtttacatccaacggattagaatgcaatatataataactcagtagctactagttgtagttcaacctccttcctccatatacgtttattctatctcactttcctattacagtatctttacctcaatggcaccaagttctgcagtgccagatgaacaggttgttgttggagaggagattgagcatgtaagagtggtcactttgaacaggccaaggcaattgaatgccatctcaccagaactggtttctcagctagcaacatatttggaaaagtgggagaaggatgagaaagcagaactagttattataaagggagctggtcgggctttttgtgctggaggagatttgagagtcttctatgatggaagaaaaataaaggatgcctgtcttgaagtggtctacagattttactggctttgctatcacattagtacctataagaaaacccaggttgcgcttgttcatggaatttcaatgggtggaggtgcagctttgatggtcccattgaagttctcagttgtaacagaaaaaactgtttttgccactcctgaagcaagttttggatttcatactgattgtggagtctcatactaccactctcgtttacctgggtatttaggttgaatacttggcacttactgaaagaaggtccagtgggaaggaaatagttgcagttggagtggcaacccgcgttcgcccaagaattctcttcatagggcaaacttgatgacctgagtatcttgaattctggtgatgagaatgctgtaagatcagcaattgaagaattttcttcagaagttaaactggatgaagagagtgccttaaacaagcagtcaataattaatgagtgcttctcaaaagattctttagaagaaattataaaatcattggaagctgaagcatacaaggaaggaaatggatggatagatgcagttttaaaaggaatgaaaagatcatcaccaactgcattgaaaatagcattaagatcggttcgtgaaggaaggaatcaaacactacctgaatgcttaaaaaaggaattcagattaacaatgaatatactgcgaactacaatatctaaggatatgtatgacggtattagagctctcagcaatgacaaggatgatactccaaagtgggaatgttcatcgcttgacaaagtgtaaaatggaaagttggacttgatctttcagccatttgagaagaatttggagctgcaaattccagaaagtgaggaatacaggtgggatggtaaatatgagaattcagcttatgctcttccaaattgagaaattcctatgtctgttaaatgttgcttcttttagaattcccccaaaaatatgtcatggatttctgtactttctggtatgcattaatccaggctactttttgagttcttgaacaaatttcaacagatgaaagaagttcatgaagagtagtcctctaagtttggagtattaatttttggtgtacaatgacaataccaagatttgaacttagaattttatgcaaattactcaaactccttactactaagctgttgtgggttgaatggtttcatgatacgagagagcattgataagctggttgttgcttcttgcacttgctctattgcttcctccacattttattgcatttggaaagcccattctaaggtcccggttggatcagtcggactgaactcagtctcacaagtatgcatattactaatatgcatactttaatttttaaattcttgggtccacctttaatttataatttataatttataatcagttcatcct

SEQ ID NO: 126433 - DNA, 940 bp, Glycine max
  Clone ID: PAT_MRT3847_85176C.1
gcatatttcaagtgctcttttggtccaaactgcccggtccaggggggtgtggatgatcaagctgttctggttgcaacttatgaaggagagcacaatcacacacacccttctcaaatggaggtaaaaacgagggtgcaaagatgcatggatgatcaatctgttctggttgcaacttatgaaggagagcacaatcatactcacccttctcaaatggaggtaacaacaggctccaaccgttgtatgactcttggttcagtaccatgttcagcgtctcttagctcttccccaccaacagctacccttgactggacaaaatccaagtccagcagtgagtctaagaatacaagtcccaaaaccgaatcaccagaagtcccgcaggttttggtagagcagatggctacttccttgaccaaggatcctaatttcagagcagcactagttgctgccatctcaggaaaaatgttgcacaataattaagtagaaaatgagtgaagtgtatttaactcattctataagtggatcttgtttagagcataggatctctatgtaaatacaacataggacattgctacatatatattcctcaatttaatcaaatccttttggtgggaatcgagctccactcaggatcgatagcatgtctagctgattgtgcatttgctaatcatgctcatctcagtcttctctattcttctgcatctggatgattaaaattaggtttacaattaagttctggcgaagtttctatagcatacaaaagcaaagagaaactttgtttcgaaaagtgcaactctattgagtattgagtattgacaatacaatatctccttgtcattttccaactgtcgcaacttctcaggctgtttaaaaaaatatatagaaaaaaaaaaaggaaaaaagaaacccccccaaaacgggaaaaaaaaaaaaaaaaaaaaag

SEQ ID NO: 126434 - DNA, 254 bp, Glycine max
  Clone ID: PAT_MRT3847_85177C.1
cctacactggggttgtttgctgaatcgcttattgattgaggtgatatcgaccaaaatgccaaccaggtgtccagctaggttcatattgatagtaaccctcataagaaagatggggtggaggaagatgatgacgatgatgctagatgtctgtgcagatgaggaaatgatgtgcatacagaggcacagggaggcactgctataacctatagatgtgctagagtgggagcttggtcagcttctttataggaccactg

SEQ ID NO: 126435 - DNA, 649 bp, Glycine max
  unsure (1)..(649): unsure at all n locations
  Clone ID: PAT_MRT3847_85178C.1
gagttgtctctactggttgcataaaaatcataaatggataaagcccatgcttcccaaaccttgtgctaaaaatccatttaatgaagataaatgggggttgcatagacgttttaataattanataatgaaccattgatcttaaatgcttaagctggcagttgaaagaaagccaagggatggtttttatgtaacttttcttgacaggaaagtggtcgagctggccgagatggacttccttttgaatgcctactgtactttagacctggtgatgctccatgtcaggtgaaactttgcaacacttttcactgtgaatttgtgcttatttctgtctatttatctttttctgcnnaaaaatggagcttgctggagatcaaacatattgttccattggaaattgaggtctatttttggcaccaatttcatttatgactatggaatgacgtaaaatggtatataggagagctaaatatggaattaatctatttcttgtttgtagttaatctacatgtacacttgccggggttgagccaaaaatttggttcccagggggggcaaggaagtagattatataattttataaaaaaaaaaatttgggtgcgggagattttgaagaatgtagtttttataatttatttgcaaatattttttt

SEQ ID NO: 126436 - DNA, 403 bp, Glycine max
  Clone ID: PAT_MRT3847_85179C.1
aattcggctcgagcttaccttcagccattactgttatggactggagcaatacttatttgcagagcattggagccattaatcctaccttcagaaactagccagattgttaaggaacggcttttgaattttgtaagatcattatcaacagtactggcctttgcctattgtttgtcaagtgtaattcaacaagtgcagaaattcttagccgagagtactgatgcaagtgaggcgagaaatatgggattccaatttgctggcaaagctgtttactctgcggtatggatagctgccttttcactgtttatggaattgctgggcttctctacccagaaatgggttactgcaggaggtcttgggacagttttgttgacccttgctggtcgtgagatatttacaaacttcc

SEQ ID NO: 126437 - DNA, 382 bp, Glycine max
  Clone ID: PAT_MRT3847_8517C.1
gccccgggcccagaaaacattaaacgaaaacctattataaacaaacccaaaaaaaagttcacgggcgaaaaaaagacccaaaaggaacccccccggcccccttaaggcctcaataccaatcgcgccttactttttcacgggagcccagacccccacacaggccaaaaaaaaacggcccccccctcccacttttgggggcacccaccaaaaaccggggggaatttttatctcccaccaggagaagtgaaacacctgaacttgcgctcaagctcaaagccggaattcaaaaccccattacagtgcccaaggcaacccaatgccttctcaaaaaaagaaaaaacaaagtttttcataccaaaaaaccccttggtaaaaaacaaaa

SEQ ID NO: 126438 - DNA, 2967 bp, Glycine max
  Clone ID: PAT_MRT3847_85180C.1
attaattcacgcgactcgacacagtctacactagtacaggcggccttcccttacctttagacattactgttatggactggagcaatacttatttgcagagcattggagccattaaaactaccttcagaaactagccagattgttaaggaacggcttttgaattttgtaagatcattatcaacagtactggcctttgcctattgtttgtcaagtgtaattcaacaagtgcagaaattcttagccgagagtactgatgcaagtgaggcgagaaatgtctgtatcttttctttttgaataggcaactgatattatagctgtatgaagtttaaacatgataaatatattgtcaattccatttatgttattacctgttggctgtcataaatttaattgctattattattatgactctattgaaacttgatttttcaatcagtcagccagtgacattagttgggcaatatagttgcccagctatataatgatgtgaaatttttcagcttttggatttagcatttctccctatcaatttgttttacacattctgaagattatcaatctgctaaacttctatctacagaagaatatgtagaactgagaacttttgaatatatgatggctatatctttttctatgtacataggctaaaacaactcatcatgggtgtgatgtatttatttgatatatcatttatgcgataattgtaaaaaattggatttgggcgtattgttttgttattagttatggttcaatttcaatgacatagtaaattgtctgtttttgttagatgggattccaatttgctggcaaagctgtttactctgcggtatggatagctgccttttcactgtttatggaattgctgggcttctctacccagaaatgggttactgcaggaggtcttgggacagttttgttgacccttgctggtcgtgagatatttacaaacttcctttcaagtgtgatgattcatgcaacccgaccttttgtggttaatgaatggattcaaacaaagattgaaggatatgaggtttctggtacagtcgagcatgttggctggtggtcaccaacaattattagaggtgaagatcgtgaagctgttcacattccaaaccacaaatttacagtgaatgttgtgcggaaccttagtcaaaaaacacattggcgaatcaaaacccatctagcaattagtcatttggatgtaaataagattaataacattgttgccgacatgaggaaagtattagccaaaaatcctcaagttgagcagcagaggttgcacaggagagtgtttttggacaacataaatcctgaaaatcaggcacttttgattctggtgtcttgttttgttaagacctcacattttgaagaatatctgtgtgttaaggaagctatactgttagatcttcttagagttattggccatcaccgagcccgacttgccacaccggtccgtaccctgcagaaaatatacagtgatgctgacttggagaacataccatttgcagattcgacatttggtcatggtgctgggacagtacctcaccgtccattattagtgattgaaccatcttacaagatcaatggagatgataagaaaagtcgagctgcacggccagctgttgatcaagataacaagacagctacgcaaaccaaagttgacaccaagacacacaacgtggctagaggaacccaggatgacactgagggggataacaaagttttgacacctaactctgatgcaaatggaaactctaagacagttgtgacacccaaacctgatcctgaagtgggtgaaaacaagccattgaaatcagattcaaacaaggagaacgtggaggtgccagaatctccttctaaatccaaagttactggtttggtagtggataattcagcccagaaggacgtagatgtcaaacaatccaaggttcagatcactaaaaacataaagccaaatattgactctgacaatgtagtgtcctcctcaactaacaatgctgacaaaattggtggatttaatacgaatatgccaatgaaacagcaaggggaaaagaaacctgctgcacaggctcatgcatccaggactgttctggaagagaatatagttctaggtgttgcattggagggatcaaagagaacacttcccattgatgaggagattgacaatgtgacatgtcgagaggcaaaggaaatggctgctttgcagggtggaaatggatctccaaaggcttcagatggaaatgacaagtagttattaaagcagtgagttcaacttgtttgaaagctcaatgttccaagtccagtagtacactgctttgaaccagtttcccacccctaggaagttgtatatattatcacttcatgtgtcacacaccccttttacaaaggactcgagctgtattgtcatatcatttcattatttttgctgtttcagcaatatatggagaagggctttctccaatttttctcacaatacccccctggaaaaagagcaaataaatttccctccagcactcacagatgaagctagtgcagatacccctatgacagatcaagctaaccaggatgcacaagttaaggaaagtgtctaacttgtgcatctaaatagtaggcagtattaagggtagaagtgtatcaacaaaggatgttctagtggcatggatgaatccaatagcacgtttttcttttatgatgttttacccccataggaaacaatgctgatagctctcctttaaagtttatctcactaacacacacttcttcacaggtatcacaagttctatgttacatttgtagcttctcccatcaacttggagcttgttttttttgtaaaatgtctagtaaaggaaattagaatttctgtgcgaatgagctaaagtggctcataaatgttctctaatctttattattgtgttcatttcatgaaaaaaaaaaaaaaaaaaaaaaaaaaaaaaaagggctggctct

SEQ ID NO: 126439 - DNA, 158 bp, Glycine max
  Clone ID: PAT_MRT3847_85181C.1
gggaatactcacttagccactattgaaggatcaaagatcatggctcaagcaatggcaacaatcgctggcttgcatggttcccctcaggctgtgttgggacgtagccttcacgagagtggctccacactcgtgaccgtcacgagtggcatcatggtggt

SEQ ID NO: 126440 - DNA, 442 bp, Glycine max
  Clone ID: PAT_MRT3847_85182C.1
ccgacttgccacaccagtccgtaccctgcagaaaatatacagtgatgctgacttggagaacataccgtttgcagattcgacatttggtcgtggtgctgggacagtacctaaccgtccattattagtgatcgaaccatcttataagatcaatggagatgataagaaaagtcgatcggcacggccagctgttgatcaagataacaagacagctacgcgaaccaaagttgacactgagggggataacaaagttgtgacacctaactctgatgcaaatggaaactctaagacagttgtgactcctaaatctgatgcaaatggaaacactaagacagttgtgacacccaaacctgatcctgaagtgggtgaaaacaagccactgaaatcagattcaagcagggagaacgtggaggtgccagaatctccttctaaatccaaagttact

SEQ ID NO: 126441 - DNA, 316 bp, Glycine max
  Clone ID: PAT_MRT3847_85183C.1
aaaagggccaatgcctttatactttgggagagcttttacacaaccaaactgcccttttttttttcacgtttcgcaacactcatttcgaccatagcatttgtgacacttgccatcaaacattttaattttgacaataaaaaatttaaaaaaaaatctaccaacattatcttattttttggatacataagcaaagtacattgccttatgaacaccgaatgccatgatcaacaaaccttcaactataaaagcgaatgggccacccttctcttctaccttttccttagttttgaaaacaaactcacgtttgttgtgttta

SEQ ID NO: 126442 - DNA, 178 bp, Glycine max
  Clone ID: PAT_MRT3847_85184C.1
attcgagctctgtacccggggatcctctagagtcgacctgcagtggataaccttgagattggaggaagttatctatagaaactgctaaatgtttgacaaagtagtgagggcttacttcactgaattggtggtccttgtaaatttgtaatatagcatgctacaaactcctaattctaag

SEQ ID NO: 126443 - DNA, 410 bp, Glycine max
  unsure (1)..(410): unsure at all n locations
  Clone ID: PAT_MRT3847_85185C.1
cacattgttagttacaagaagcccacaatggaggagaaaaagttgttatcaccaccactggtgttgccaccactgccagctcggactgggtcactatttaattctgaggaagcaaaacacagtcacatgaagaatataatgagcccttctgactcactacaattagggtgtggcatgtaacatggttggtgaaaaggttcatggcaacaagagcaagattcaggagtgtgccatgggtgggtcagaattcacataagggcaagcattgnggggtcacatgaggaggcaatacagcatctaacaatgatgacacatgtggatcatgcgacatcagccacagcaggtcctgataggggcgctggcgaggctaagactcgttacggacgagaggtggatgttaacattgcgga

SEQ ID NO: 126444 - DNA, 440 bp, Glycine max
  Clone ID: PAT_MRT3847_85186C.1
ttctttttttttttttttttttttttttttttttttttttttttaaacccattaaagccaggattattcaatttaattttctcatctaccattcaacaggggagaagatccccttatccctggaaattgggggggtaacaccttctcattgagatgccaacagtttaaaaaaaaaaattttttgaaaaaccaaaagttattattgaattttttatacctgcaatcagggcttgctaaaggtccagcagggcctttatttttgggtttcggaaaggattcctgtgcttaaccaaaaacatgttttgggaacctcacaactatgcgagagatggcatccctactttttttgcaaacggcctcttcaatcaattgctttggtgcaacttgcgcctcctttatttgtctaatagattccactgcttttttggttgacataacct

SEQ ID NO: 126445 - DNA, 101 bp, Glycine max
  Clone ID: PAT_MRT3847_85187C.1
ctcgagcctaggacctagtagccttgtcagatgctgataagcttcgggagattggtggacatcaagatacacacttgaacgcaaatttcaaaactcatcga

SEQ ID NO: 126446 - DNA, 485 bp, Glycine max
  unsure (1)..(485): unsure at all n locations
  Clone ID: PAT_MRT3847_85188C.1
gacgtcgcatggcacccgcgtaccgtaagnncttggnatncctnctagaagncggnnccgcccttnnnttttttnntttttttttnnttttttttttttttttntttttttnttttttttttntttttttttnttttttttttntttttttttttttttttttttttttttttttttgggcacaaaggcaaggggcccaaatattatttctctataggccaggggcccaaatattatttctctatagtcaaggggccccgggccccgggggaagggttcatcgccgggggttttcaacccaagaggggttggcccctaaaaaaaaaatctaacaaacccatcaaaaaaggggcaaaaccctttggaaagggtttggaaccccataacaaagggccctaaataaaaagggatatgggaagctgccaaagtcccccttaagccaaaccagaaagtttctcactaattccccaaaccttgggagcctt

SEQ ID NO: 126447 - DNA, 305 bp, Glycine max
  unsure (1)..(305): unsure at all n locations
  Clone ID: PAT_MRT3847_85189C.1
atggacccataaagttggatattgaaagatgagagaattgagaccttgttagattgttagtcacgactgttgattcatacaacattcccatcatggctcagctcattatcagtggcaaaagccntgaattgtctacatccattctgntctccagcagatgtctccgtggcgatacgtgtggcctgaaagtggangggaatggttactgcttcttgtgaanactgtgagcatacaatgtgagcnaggggtgcttagttttcctctatattgtgcaactctctctctcctgtgattgattcagagta

SEQ ID NO: 126448 - DNA, 270 bp, Glycine max
  unsure (1)..(270): unsure at all n locations
  Clone ID: PAT_MRT3847_8518C.1
gattgnacaggatgatgatcatatcaaaacattccagtcgtcagattcagntaaaacatccagaaatggtgatgtgaaactgtttgggaagatactaaccaatccttcaaccacacagaaacctncatatgggtgccattttcttcactccctttagcacccaccaaaaacaaaganaaaaanaaacccttngncaananaaccatcntggccacctttggtnttnggnaatcagnnttnnntggtcaaacngntntgaaggngntnaat

SEQ ID NO: 126449 - DNA, 872 bp, Glycine max
  unsure (1)..(872): unsure at all n locations
  Clone ID: PAT_MRT3847_85190C.1
tgtacgtatactactgtgcttctgttgagatttattcctgtcccttcatattcctcttctttatctatctattctctttgctcgttacagtttgcttcattattatataaagggtctcaaggtttttaattttttttaaaaaattaaaacttttgccaatttgtgaactgggtctgcttgattctattttgctgctttttatttattttaatttgtttggtgtattgtgtattaagctgaacatgaaaatatgttgttgttgcggattgctcttttgttaattaaaaccagttagttagtcattatgaagcttgattccttatgtctatgcagttttctagatttaaatcttgggaaaaaaatgttgctgtccacttatatattgtctttgaactaatgatcttttttttatcctagttaaacatgtgcaatgatcattgaatcaggaaccaaaacttaattcttatgctattttgtgttgtggcaggtgctgagctttaaaggagggacagagctgaaacgtggctagcaaaggaaaaaggtgttgctcttactgtctgaacaagttattggaaccaacaaagaaaaaagagccaatgaaccaaatatctagaatcaaaaacataattttatcatgcctccggcgcccgtgtcagatttgagcatttggttgtccctgattctgattttgaaaaaacccctctttaaaaaaaagatagtaagtttccgttagcaatgtctcctaacatgaccatctttttctgaggtcctaggactgtgttaccattttagtaagtaaaatctnatcnnagaganttcccannncaaggaagnnaaaaaaaaaaaaaaaggaaacccnggncgnncaaann

SEQ ID NO: 126450 - DNA, 298 bp, Glycine max
  Clone ID: PAT_MRT3847_85191C.1
gacttcaggtcacgcagagcaaaccgcagaatttaagcatcatccttgagctaaagaatggcagcagcttcttccatggctctctcagcccgatccttgggtggcaaggctgtgaagctgggccgatcagctccagaatctgggaacggtgagcatgaggaagatcgtcagcaggcaggtctcctcaggaagcccatggtacaagccagaccgagtcaagtatgtgcgcccattctctggcgagccctcgtcctaccgaagcggtaagttcccaggcgactacggttgggatactgct

SEQ ID NO: 126451 - DNA, 278 bp, Glycine max
  Clone ID: PAT_MRT3847_85192C.1
tttttgaatattaatatttcaactttgcgaggggtgcagtaatagatggacccgtagaccattacagtaattacatccatcataccggaaggaagcaaacattacatactactaaattttccggatgacttgaaaaaactaatcatagggtcataaagatcttgttttgcttgcaagcttaaaatgaagtcaacatgaccatagttcccaaaaagaaccaatttcggtgggggtggcaattacatgcgtgcgtgctggaaatcagttatatatgccag

SEQ ID NO: 126452 - DNA, 227 bp, Glycine max
  unsure (1)..(227): unsure at all n locations
  Clone ID: PAT_MRT3847_85193C.1
nagcaggcacgcgtncgtaagcncggnattcggctcgngcncgagccgaatcggcnngagcgatcgtgcaccgtggccaacnnnangtctcactcaaganggagnntnggaagancacangggaccncanttccaaacaagaaacgaacggnngganaaaancncnananaggaagaacnnaanaaagcanccacggnanaananaaannnacanaagagccccgna

SEQ ID NO: 126453 - DNA, 294 bp, Glycine max
  Clone ID: PAT_MRT3847_85194C.1
tgctcacccatgcaatacaaattaacacgaagggatcacaactcaactccaagcaaggaaagacaccagagacagaaacaaagaaggatgagtaaggtgaagattttggttgtgggaggcacaggttacttgggtcagcatctgctacaagcctatgttcatgccaatgccaataatggaactccttttgctttcgatctcgctttcacccatcactcctctcctgctccccaacctctgttgggtgccattcctttgtctatttcttttaaagggtatgtgtaatttggcttt

SEQ ID NO: 126454 - DNA, 540 bp, Glycine max
  unsure (1)..(540): unsure at all n locations
  Clone ID: PAT_MRT3847_85195C.1
aagctcggatcctgaagatttgccgccccccactttanttcccacgtttttgaaaaactccacaaaccctaaaattaataagaggggaccaatttggtacatccaaggggtttcatactaccccaaacattacataatttctgttgtcacattagatttcgatgatccaagccacttggccttattaaccacaaaaaccacgcacattcaaagcataagtttttgtaccagtttacaaactcctagcacaaaacatacaaataacatcatgatgttaaacatagccaccctccaacctgtggggcaaataaaaacaaatgtacccaacgtgaaaatcacaactcaactctaatgttgcatacacgatacaattcaatgactttaaaggcataaatagaaaaactacccaaacggtgtgggggattttaccaaccacactaaaactccccaaaacgccattaaatacttcaaaccataccaaaaccccgggctaaaccaatctcactagagtcccggttcctatgaattgcaaaaacgata

SEQ ID NO: 126455 - DNA, 255 bp, Glycine max
  Clone ID: PAT_MRT3847_85196C.1
aggcggccttttgtgcttttcacgctacggcacgcgttcgattttttgacagagggccattttggagcgagtgctgatacccagacacatcatctattaaaggaatgacaaaaaaggaggccacaggtggtaatactgagaatacaacgcctatcaatggcctgcgctatgaaaagcacttttagggggcgtgcccccactgatatttacaccatctgctcttaagaatgtgaatcatggcaatctgattggaca

SEQ ID NO: 126456 - DNA, 398 bp, Glycine max
  Clone ID: PAT_MRT3847_85197C.1
aaaaaccacccacaaaacccttattttttttggaaaatccggggatcccctacaattcacttttttataaacgggcacattaaaaggccccaacgttttactatacccatcaaaacggaaaaccaaagccttttccctacaataggggtttttgacagaacggacaaaggaacttaacaggaaattttaaaaaagctaacataacttttggcatccaaatggaatattccccccctaaagggcatctaaaagggcggggaataggaaaagctaaacgggtggggaccaaagggagccgggaaaacaccatgtctaaatggggcatataaaggaacatacattattgcagcactaggccactggagggaacccccctcactaaatgggggattcaatcc

SEQ ID NO: 126457 - DNA, 548 bp, Glycine max
  Clone ID: PAT_MRT3847_85198C.1
ctcgatcagtcgagggttgccgttgatttggtatcggtggcgacacacgagataggtcacgtgcttggatagggtcactctttggtgaatgtaagcggtcatgcacccgaccctcatccgccagagtacgaaggatgacttgagaattgacgacatggtatgagttctagctatttacggatttaagccaaacttctactttaagttctttgttgctggctcaaaattcattaatcgcgtgacattgggatggaaaccggcctctataaatggaccctcagtctacctcttgccttcttcctattattatgaaaggcttgattattcgtttttatacatgacttttgattcttcgacatatattatatgttaatagtatcaaatgggcggggggcgactaatgatctgacttaccagagaattagttacaaaacgactgctgcatgcgtgcccctttttcttatagcgaggatgatagaaacttggcgtactatgggatacatgctcctgtatgaggattgcatgctgtaacaattgcacggtgatac

SEQ ID NO: 126458 - DNA, 1298 bp, Glycine max
  unsure (1)..(1298): unsure at all n locations
  Clone ID: PAT_MRT3847_85199C.1
ttttctttttcccaaaactagcgtaagtatatggaggatttgataaaacaagtgcacacgcaacttatgtgcaaaggtggcccaaaaaaagaagaaagattcccccaattcccctcccactcactccctcacctaaaaattacctttttcttttcttttcctttcttctcactctcacgcacgcattcattctcactgtcattcttcttctttcaatcatcatttacaaaaccatttctcttttcctttcatgcttttcttgtattcctattcctattcctattagggttccaccgcatctcttcttcccaccatgtcgccggcggcgcctgatgctgccgagtactctttcgccgtcgagtacgacggcccgccgctcacctgcgacctccctcgggcggttccgatcagcgtcgacaacattccggtcgccgccgtcgtttcccaggttcctctctccgactccttatctctaccggtcgtgcagccgctcctgccgccgcaacaacaccaccaacccctccgaaccgaagctagggtttccaagttagcgtccgaaacaacggtctctcccacctcggtgatcgccttcgagcaccgagcttcgcagagcaacgtcggcgaactctccggcgagctgagcagctccggcgcgtttgagttttccaccgggaacgacggctccggcgacctgtccgatttggggggaagctcgagagtgctggaagaaactagaagctctagtaccattgagtttagggacaaatcagggagaagttccggcgcgttaagggttctggaagacggaaaagagagtttggatttcaacgagttgaatcagcaagattgggcatccactgagtcagtgctgagtttggagtatccatcaactcgggtttcttctctcaaggctgaggatatcgatgctaaacgtccccctattgttactttcgatgtggactctgatgatgcgttggttgaggagtttgacgtggaggacactgtgagcagcaataaacctgttaaaagggcacctctcacgaagggaaagaaagggtcttgttataggtgcttcaaggggaataggtttaccgagaaagaggtttgtctcgtttgtgatgcgaagtattgtggtaattgtgtgcttagagctatggggtctatgcctgaggggagaaaatgtgtgacttgcattggattcccgattgatgaggccaaaagagggactntggggaagtgctctcggatgctcaagcgtttgcttaacgagttggaggttcggcagataatgaaggctg

SEQ ID NO: 126459 - DNA, 297 bp, Glycine max
  Clone ID: PAT_MRT3847_8519C.1
aaaggtcggggtgctttaaaatagcaggcaagaagccttagaagtacacgtgcgacgacgaatgcaagtgatggaacaaaagcataacacgaaacaaggtaacaagaaaacaaggttaggcaaaatatacaagaggactaggctaggacagtccctaggaaaaagcgacctagggaatgataggctgcgaagcagagagaactcggaagttaaaataaagctcccagtgagggagcagaggaaaatgcacgggtaggggacagcaacgagtaggtacgatgagggggggcccgacca

SEQ ID NO: 126460 - DNA, 125 bp, Glycine max
  Clone ID: PAT_MRT3847_851C.1
ctactcttatcactcatctatggctacatttttttgaccttgtttaccatctttcttctacggcaatatcatcgggaagatctagaatctattactatgctctaagtgaagaccactattaggag

SEQ ID NO: 126461 - DNA, 476 bp, Glycine max
  Clone ID: PAT_MRT3847_85200C.1
gagtgaggactcttctctgccgttttgagtcctttccactgcaaggattctgagttcttcatcaacaccaccgggcaagtggcgctcttgagagcgctgcacagaccatccttcaccgaagcgcctgcaacgctccttagctccgaacgaaacgctactgatgccctcgactacgttgctataacatcaggatcgactgctgtcggattccgggctctttcagagtccgagccgtcggcgtactcgctacgatccttccgacgactgctcccgcgaacgccgcgctggatttagagctccgaggttcactttgctcctcctgccggcggtggaaatggcggccctggaaccgacgaccgggacagacgtggcggttctggcaggagagtctggagatgctagtctcaaactgggaggagacgcagccgagggagctacgccactcacgcctgatgtgaccatgcaaaacgattcgg

SEQ ID NO: 126462 - DNA, 383 bp, Glycine max
  Clone ID: PAT_MRT3847_85201C.1
attttgattcaaaaagcatgcaataaaagcaaacaaccccaaggggtgcgtttgttattccatattcaacatgcacaaaccctgctgtgatacatacccatactacaagcacatgtgatggtggttgatctatcaactccaccaaaggagccaacctctaaagtgcaaaccccagatattaaaaatggaattaccccgggaaaggaaatataaggaagtgccccacaagaaggggatatctggggcgggatttttggcacattcttacaactgagaaagtaaaggctctttttgatgaacaacaaactgactgaaaccaattcgcttatcaaaaaaagcccctacaatcctggggaagagcttaacaaggactattttgaatc

SEQ ID NO: 126463 - DNA, 182 bp, Glycine max
  Clone ID: PAT_MRT3847_85202C.1
atctccgcagcggaggccgcagacgcaatttcggagggggatgtgcctgcggcctagggggagaaaaaaacaaaaatatgtttactttcttaatttgatgtatttgcgtttatcttaattctaattgccaaaccctggcgcttattattattgtgttgattttctttgttgattgtttcaat

SEQ ID NO: 126464 - DNA, 565 bp, Glycine max
  unsure (1)..(565): unsure at all n locations
  Clone ID: PAT_MRT3847_85203C.1
ggctcgaggttgatgagtctctagcccaagtgtgctccgagagtggtgcaatggatcctcttatgaattcttactttgagagaatgcaagctacgactaggaaatggtacctgaatattttggaggctgatagaacacagcccccaaagaaaactgaagatgggaagctatataccccagctgctgttgatctcttcaggatacttggtgagcaagtacaaattgttcgggataatagcactgatctcatgttatacagaattgccttggcaaccattcaggtaatatctgataagacatagatgtagagtaactgatgcttattataaatttatcttttcgaaaaataaactctaggtaaataaaggtaaactggacagaacttggaagttggaaagcaatttttttgagtttaacaatgtgttcaagtttcatcattattgggaggatatcacgagaaatccatgaagtgctcctcacagcacaatgtgtagtgcttactgcttaactcagtagcttggtatcctagggtatactatatatttntacaggtgatgatngattt

SEQ ID NO: 126465 - DNA, 419 bp, Glycine max
  Clone ID: PAT_MRT3847_85204C.1
gaataaaagatagctttggttgcacatgcatggagggtgcgttacaccccaaaggaaggattaccatttatactacatatggcagcgacagagactatatttttccatatacacacctttgttctttactggatgaagacatgaactcctgctaccaccaaatttatacggcactttttttttggaaatctttttaacctgattcataccaaaattcatcttgacagccttgattgagaaaacctccataggacgtaaaacccccaaaagccggaggatccgtctatggcctccagacccatgaatgaactttaacatacactgggtctcaatgaaaagcttgagaaggatcttgtgagctaccttcatgtgcatgaaacacatggtttaacagcttttataattgataaaatgcctcc

SEQ ID NO: 126466 - DNA, 380 bp, Glycine max
  Clone ID: PAT_MRT3847_85205C.1
attcattattttttttaaatgaatcaacattgaattcccaaggcggagaccacaaacacatgattctgaaaactccaaaatcaacacccaatagtaatgttacaaaaccccaaacaaacctattatgcgaacagctaataaaaatgatgttttacaactaaacaggggaatcacccaaaatcaagtcccacaacaattaacacttcacactgttacccccctggcaataacaaacaccatatattaacaagccccaacgccataatgggctctagttctactactttctgcatttataactggattgaaccatggatgggccatgtcttcttttgcaatacgacgctcttgttgaacatagcctattaacttggcaaaaa

SEQ ID NO: 126467 - DNA, 1080 bp, Glycine max
  Clone ID: PAT_MRT3847_85206C.1
aagaactcctccacctgctggaaccagaggagcactggatcagcaagaggtcaagagatattccggtgctttacctacttcaaagctctccaataatttttcttccatgaaattacatcctcctttagcttcaggtgtgcaacggaagcttgatatggtaaatcaggatggaattaagaacgaaaagccagtgaggactactaaaccaaaatatcgacagccaggaaaggacagcagcccaacttctatgagcaaagggaggtctgtacgtggggtttcagagacagctgaaaagttgcgcaatttgtcagttaccaatcgaagacaatcatcaataggaatagggcaaccccgtcctcctccaccaatgaaggctggagggaattggatttctgaatctggaaacttcatccttgggcccgcacagcagatttcgactggaagaactttcgcaagaaaagttgccggatgagtaaatgtgggagatgattctataatgctcaatgttgtgaatgtgtgtcctaatataaaatataaatgtgtggttagacatatattctgatgactttgccgaagtcgtctaaactacaaaactagttgtactgcctgtgtgtgttattacttgttggtaatcgtttcgtacttgtgggacatacagagctcagttgatgctttttactataaatataaataaaggtttccctatttgtatcatttggaatattctacagctgtgagcctgtgacttggtacacacattgggtaggggtgttcataaatcttgtctatgttctctctataagattataataattttgttcactggcattgctcattgaacgctcgtctctagaagaggtggttgtccttgatgcttccacggatgaagctgcatggaaattttggccaccaccaccttgatccatagcttcagaagggttattccctgagggtttatagtgattcctgggtgtccagtcctttaaagacattgagtgcatggggctatcatgtccagatgtcattcttgagtaacaagaatctctttgctgttcaaaggcaataaataatgtacattga

SEQ ID NO: 126468 - DNA, 276 bp, Glycine max
  Clone ID: PAT_MRT3847_85207C.1
attggtatgcttgctgcataattttgggcatcattcatgagattttcccttctcattattagttttaattttctaaaagaatttagagattcttgtacccaggttacttatctatggtcttttggcatgtgtttgaaagattaagagaataatagaattagtttttctattggatcaactacaaaatgaattatgcccaaaaaagagtcaatcagggatgatgcctaatgaacttttccaagtcacgggaaaattaacttttccttgcaagtaatg

SEQ ID NO: 126469 - DNA, 2704 bp, Glycine max
  Clone ID: PAT_MRT3847_85208C.1
gggtgaataaatacatctatatataatatgcaagattatacctcccaataccatggctactgacccttaaatagagtcaccacaatgccaaattctgggcttgcattgtttgtgagggtatcaacaatttaattaatgccatgatttttttaccaatggtattggagaaaaggctagttttctgtatacaactccactccataaactggagtcaacaacactacaatctctagaaaacaaaattgaggattcgaccagcttgggacatccatttctcttcaatgccacaacacttcaaagatattgagcttgtattctttctctgttgtcttcccaccatttctttgcatgtccctccccaaatctctcccggctgaatctgacacggcgaaggtctgattgcatcatcagctagcagccggaattaaaaagccgagaagctgttgaaaaatctgtctatactgttactaaatttgcaagtatccgattttcatttttttgctacatggatacatccaagagaacatcggcttcataggcacttctcttttgttattttcagtactttttttgcaatactcttcctcttcgaaacagagcagtagagagaacacctacaccagctggaacaagaagagcaatggatcagtaaggagtaaagagataatcctgttctttacctacttcgaagttctttaataatttttctttgcatgatattacatcctgctttagtctacaggtttacaacgcaagctggatatggtgaagcaggttggaattaaagacgaatcaagtatttacgacaaattaaacaaccaaatcttgtgaaacgaaaggacattctcaactaaagtgaaatctagtactgtgtgtttgtgtactttgcatacaaactataccaactcatgaatttcagggaaaaactattttctgaagctgtagttagaaattggtgttttcaagtttttcaaggtcttggcttacatgcaccagcgtggatacttccatcgtgacctgaagcctgaaaacttgctggttaccaaggatttcatcaaaatcgctgattttggactagcccgagagatcagttcacaaccaccctacactgagtatgtctccacacgatggtatcgtgctcctgaagtgctgcttcagtcttatatgtatacctctaaagttgatatgtggggcaatgggtgctataatggctgagcttttctctcttcgtcctcttttcccaggtgccagtgaagcggatgagatttacaaaatatgtggtgtgataggcaatccaacctttgaatcatgggcggatggactcaaacttgcaagggatattaactaccagtttccacagcttgccggtgtgcatctttctgctttgattccgtctgctagtgatgatgcaatcagccttattacatcactttgctcctgggatccctgcaagaggccaacagcttcagaggctcttcaacatcctttcttccagagttgcttttacattcctccatcccttcgcaacagagcagtagcaagaactcctccacctgctggaaccagaggagcactggatcagcaagaagtcaagagatattccggtgctttacctacttcaaagctctccaataatttttcttccatgaaattacatcctcctttagcttcaggtgtgcaacggaagcttgatatggtaaatcaggatggaattaagaacgaaaagccaatgaggactactaaaccaaaatatcgtcagccaggaaaggacagcccaacttctatgaacaaagggaggtctgtacgtggggtttcagaaacagctgaaaagttgggcaatttgtctgtttccagtcgaagacaatcaatggggcaacctcgtcctcctccaccaatgaaggctggaggcaattggatttctgaatctggaaacttcatccttgggcccgcacagcagattccgactggaagaacttttgcaagaaaagttgcctgatgacaagtatgaatgagtaaaatgtgagtgatgatgattctataatgctcaatgatgtgattgtgaatgtatcctaatatcaaataaaaataaaaataaatgtatggttagacattctgatgactttgtcgatgtcgtctaaactacaaaactagttgtactgcccgtgtgtgttattacttgttggtaatcgtttcgtacttttgggacatacagagctaagttgatgctttttactattaatataaataaatgtttccctatttgtatgaatcagctgtgcagcgagctgttcgccttcacactcgtcttcgccgcatctatgattccctggtaatcctgcacattctgcgacttgtccttggcattgttgagttgctcgccgtattcgtagagcttctcgatgaaagcagcctcttcggcaggatcagacattggaacgcacgtttctaactagtgaatggagacgatagtgttgttgagttgaattagtagggaacgattccgtggtgcgaggtcaagtaagctcttcgatggggacgagtttcccttacctcactgaacacgccacacgacacaaccggacgactgtcgccccgggaattccggatgacatgacatgatacacgcattgggtcgaggtgttcataaatcttgtctatgttctctatagatgttaatatttttgtgaagacttgggatacccag

SEQ ID NO: 126470 - DNA, 248 bp, Glycine max
  Clone ID: PAT_MRT3847_85209C.1
agaaaataacgccttttttatttataggaaccatgggatacattggccccaccaatagtatgatttaccaacaaaagcttatgcgcttggcattgaaaaaaataaacaagttactacccttttttgataggaggtttttttcccatctgagcaacattggcataattattatttttcaagaatttgggccagaaggggtggggctttcaaacctgggtcatttctttaatgggaatggccctgggttt

SEQ ID NO: 126471 - DNA, 524 bp, Glycine max
  Clone ID: PAT_MRT3847_8520C.1
cccacgcgtccgatcgtatcctgaggcgtggatacagggatgtcttgtcatgcactgaacgtgcctagcctggctaaagatcatgcgcctcgcttctgatagccgttcatggttcatctctcttggcttgaaggagacaggaacagacctttttatgggtggaggatcttgtggacgagatcatatagagctactgacctgaatgactgctcatgcttaagctgtgaccaagagcacaacctaggtagacggggtatctacattgctgacaactgcaacgggcaattcagggaaggacatggtgaagcttgcatgaagagcaccataagaacatttacttgactaccttacgggtttcggcgagaactctgagggtcacttcccatgacagacaatcgcgaagggtatggtagcgattaacacactgttcgtggacatagtttgctcgcatttctgagagggtgcttgctttgtagagaaggctgcgctgctggacatgcgttgttcagaagtacgtggattta

SEQ ID NO: 126472 - DNA, 270 bp, Glycine max
  Clone ID: PAT_MRT3847_85210C.1
atcaggcttcagagctcataacgacattacttttacatctcattatatacaaacatgctgagcagcgtttgctctaacctgtgcatggtcagataaacatgcatctgaactgcctattacttaatgtgaatcattaccactttcctataacaatttacgacatgattcaatcaaatatttagaaaaatagttcactcatactacaaatctatcatgctcacattataactctaaattaagctattaaaaatgatttctccatctaaaatc

SEQ ID NO: 126473 - DNA, 153 bp, Glycine max
  Clone ID: PAT_MRT3847_85211C.1
ctcgagccgattcgtttgaaaaaagaagatagtaatgaaatggggagaaaaggaaagccaagactctaatgtgtacttggtcggtactgacgacaaggggcgtctgtagtcagaactacctgctgtaaaatggaataatcgggtaatgtataa

SEQ ID NO: 126474 - DNA, 1131 bp, Glycine max
  Clone ID: PAT_MRT3847_85212C.1
cgacccagcgtccggtttactacctgtgagttctatatggcttataaggactacaatgacttaatggatctaacagagcaaatgttgagtggtatggttaaggagcttacgaaaggcagctataaaatcaagtatcatgcagatgggattgataaggaacctattgaaattgactttactacaccttttagaaggattgacatgattgaagagttagagaagatggcaggtctaagtattcccaaagacttgtcaagtgaggaagccaatcaatatttgaaggatgcatgcgtgaagtatgagatcaaatgtcctccccctgagacaactgctcgtttgttggataaacttgtgggtcactttttggaagaaacgtgtgtaaatcctacattcatcaaaaaccatcctgagatcatgagtcctctagcaaagtggcacagatcaaaaccaggcctgactgaacgttttgaattgtttgttaataaacgtgaactttgcaatgcatatactgaattgaatgaccctgtagtacaacgacagagatttgctgaacaactcaaggatcggcaatctggcgatgatgaagcaatggccttagatgaaacattttgtacggctctagaatatggtttaccacctactggtggttggggtttgggcattgatcggttgaccatgttactgactgattcacagaatattaaggaggttcttctcttccctgccatgaaacctcaagactgagtcaaccaaaactgtttgaatctcagagaagtaaaatcatcatacacaggaacatgaaaaatgcaagatgattaataggggatctcagttttgattagtagacttggcatcgactggtcatgcatcgatcacacttggtggttggattgaatgtgatgtcatataccagcttatttattacatatttgagatttgagacaatagtttaacgaatagatttctcatcaacaagctcatattgctattgttcaatgtagaggtgggtgtatgggttagcttgccttgcaccgctacgtacaagtccgcgtgtgtgtgacggaatatggtttttgtttagtgatttaggagccatttaattgtagttagactagagatcgaattagtaat

SEQ ID NO: 126475 - DNA, 1681 bp, Glycine max
  Clone ID: PAT_MRT3847_85213C.1
ctgatgttttgggtgcatgttcacccaagactttctcctgtaaaccgttaccctaaacctttccaaagtcttgtaagccattactcaccctaacgttttgctccgttcgtaagaacacttcgactttgcccttcgcctcgcctcgcctcgcctcgcctccgatttccttctttctccaccaatggaagttccttcggaggtaccatctactgacactggcaccagcaccggcaccggcgaaaccatgagcaagaatgcgttgaagcgggagctgaagaacaaacagagagaagaagaaaggaagcgcaaggatgaggagaaggccaaaaaggcagctgaagcacaacaggcaaaggataacaaatctgcaccagctgatgatgaggatatggatccaactcaataccttgagaacaggctaaagtatcttgcagttcaaaagacagaagggaagaacccgtatcctcataaattctttgtcactatgtctattgatcaatacatcaaggaatatggaggtttaagcaacgggcaacacattgaggatgtctctgtgtctttggctggccggatcatgcacaaacgcacctctggttctaagcttgtcttttatgacctgcacggtggtggttgcaaggtccaggttatggctgatgctagtaaatcagacttggatgaggctggattttccaaattccattctaatgtgaagcgcggtgacatagttggtgtcactgggttcccaggcaaaagtaagaagggcgaacttagtatttttcccaagaattttgtgtcgctgtctcattgtttgcacatgatgccaaagcaaaagtctgctgctgctgctattgatccggcaaatttgaagagaaatccatgggtaccaggaagtaccaggaatcctgaaacatatattttgaaagatcaggaaactaggtatcggttacgccatttggatttgatgcttaatccagaggttcgagaaatattcaagacccggtctaaaatcatttcttatattaggaggttccttgatgaccttgatttcttggaggttgaaacaccaatgatgaacatgattgctggtggagctgcagcccgtccatttgtaacacatcacaatgatcttaacatgaggttattcatgaggattgctccagaactttatcttaaggagttggttgttggtggactggatcgtgtttatgaaattggtaaacaatttaggaatgagggcatagatttgacccataatcctgagtttactacctgtgagttctatatggcttataaggactacaacgacttaatggatataacagagcaaatgttgagtggtatggttaaggaacttaccaaagggagctataaaatcaagtatcatgctgatgggattgacaaggaacctattgaaattgactttactcctccttttagaaggattgacatgattgatgaattagagaagatggcaggcctaagtattcccaaagacttgtcgagtgaggaagctaatcaatatttgaaggacgtgtgcttgaagtatgagatcaaatgtcctccccctgagacaactgctcgtttgttggataaacttgttggtcactttttggaagagacatgtgtaaatcctacattcataataaaccaccctgagatcatgagtcctttagcaaagtgg

SEQ ID NO: 126476 - DNA, 3117 bp, Glycine max
  Clone ID: PAT_MRT3847_85214C.1
acgtttctgactcaatttatttatcataacacactctctctcccccaagaaatacaacaaagttttcattaacttgaatattgttcaacaaaaagttatcagcatttatgagaaaagtacaagaaaaacacttaatattttatctgaaaaattcacgagggagttgtcaggaagagatgaatctaagggacattttgctgagagaggcaatacccgattttcatgagaagcaagtcaagaatacagcctgtgttgggtctggtttaatgactctactggggatcatcaccagagtgaagacagaaagaatccaggtgcaacactaatggttctgcagattgtaccatgattagtgaccatgatgaagagaggatcccaacctgcaaaggtgacaataatagggtggccggcatttaataatcttaagattcagaatctgcgaaaaacgaaacaggaggaataagcattcagagggaactaggacttattctgagcaggaaaatggatggtgtaaattagatcaagtaaaattgaacttaatctttataatagctacatttaaatatacttggtctatcaagagattttcaatggcaaggttaggtattttctacatgtgggaagcttacaatggaacatgattgggtgcttcctgaatgaagatgaatattgtgaaaatgttagaagcaaatgagttgagggatgctgttgatcttataatccaaagcatgaaaattaatgcaataatcagatccaaatggtggagcaaaagcaattaaccgtgacgacatccatatggaatttcttagtgataggaacatgtaaggttgctaggtacaaatcacttggcctctgtgaatggtcatataaattagcttattgaaaagagagatgcacatagacggttttatttttcctttatttgtttatttcaaaagctaggtgactttttagacatgcttaaaaacactattccaaattctcaaagcctaaaccagaattgaaaactgtaatgaaatgagaagagatcgaataaaagtaaatgaaaaaataacattattatgtggtatagcgttaactattatttatattgacaatggagtcgagacaaatgtattggaaggtcaacttaatatttttcccatgacttttgtcatgaggtctcattgtttgcttaagatgccaaagtagaaggctggcggccggtgccgtttttgcaaaattgataaacaattcatgaataccagcatggacttgacacatagtcctgtattttctgacagagaattctatttggcttctcatgactccaatggcttaatggatttaacagagcaaatgtggaatattttggtgaacgaacttacaaaagggagcgcaaaagtcgattagcaggttcctttgatttcctggaagcctattgaaattggataaacacctgcagttatggggatgcagctcgttggtccataatataacacaatagacttaacatcagctaattctgggtaaagttacgaaactacatcctaatgtgaagcgtgtggacatagttggtatcattgggtttcctggcaaaagtaagaagggtgaacttagtattttccccaagacttttgtgttgctgtctcattgtttgcatatgatgccaaggcaaaagtctgctgctgctgcgaataatgcaaatttgaagaaaaatccatgggtaccacgaactacaaggaatcctgaaacatatattttgaatgatcaggaaactaggtatcggttacgccatttggatttgatgcttaatacaaagattggagtaatttttgagatagggaataaggtagttctaaatattcccaaagacttgtcgagtgaggaagctaatcaatatttgaaggacacatgcttgaagtatgagatcaaatgtcctccccctgagacaatagctcgtttgttggatctacttgttggtcactttttggaagagacgtgagtaaatcctacattcatcataaaccaccctgagatcatgagtcctttagcaaagtggcacagatcaaaacgagacggcatagatttgacccataatcctgagattactacctgtgagttctatatggcttataaggactacaacgacttgatggatataacagagcaaatgttgagtggtatggttaaggaacttaccaaaggcagctataaaatcaagtatcatgctgatgggattgacaaggaacctattgaaattgactttactcctccttttagaaggattgacatgattgatgaattagagaaggtggcaggcctaagtattcccaaagacttgtcgagtgaggaagctaatcaatatttgaaggacacatgcttgaagtatgagatcaaatgtcctccccctgagacaactgctcgtttgttggataaacttgttggtcactttttggaagagacgtgtgtaaatcctacattcatcataaaccaccctgagatcatgagtcctttagcaaagtggcacagatcaaaacctggcctgactgaacgttttgaattgtttgttaataaacatgaactttgcaatgcatatactgaattgaatgaccctgtagtacaacgacaaagatttgcagaacaactcaaggatcgacaatcaggtgatgatgaagcaatggccttcgatgaaacattttgtacggctctggagtatggtttgccacctactggtggttggggtttgggtattgatcggttgaccatgttactgacagattcacagaatatcaaggaggttcttctcttccctgccatgaaacctcaagactgagccttcagtcaaagctatgtttaaatctcagcagtaaaatcatcagacacacttacacaggaacatgagaaatgccagatgattaaacatgggatctcagttttgatttatgtacttgattaggagacttgccatggactggtcatgcatcatccacatctgttgatctattacttaagggcggtttggagagacattattctagattttatttgtgattggattgaacgtgttgtcatataccagctttttttattacatatttgagatttgagacaatagaatggctagatttctcaccc

SEQ ID NO: 126477 - DNA, 887 bp, Glycine max
  Clone ID: PAT_MRT3847_85215C.1
agcaatgaactaattattatataaagaagaaaaatgtaatgcaagcatacagcttaaagaacaccaccaattatcagttcaaaatgttttatctactgtcaacattaagtaagtctcaaatgttgactaaaacagacatcgagcaggatacaaaactttaatatacttatttttgttcatccagtaatccatggacagttccttttatttatcacctaactggaaaatcaacatgggcatcatccaaaattaaacatgttcccaaatgaagttttggagaatataaacaagcgccctatcgtccacaaatcctattccacatataattagaatgttaaataccatcatgtgttggttggaaattgaagcactgcaaactaggcctgttaaagagatgatctgttgggtgagatctttgcataaaatcatccactgggacaggaagctgaaactgagcttcaattccgtaacctgctgctcgcatttctgaacaatccaaattggtcattgatttaggcaaaagtttgaaggctaaagaacatcgtccatacatattagcctccatattaatctcagttttgagcaatgcagggtttacatatcctgcagttgcttgataaagagcaagcccaggaaaaacaatagcttcctgaggtcccagatctccgtccacaagaatccaccggccctgagagtctcttacatgtaaaccagccctatcggacttaacaagcgatagcaagcttttatcaacttggtgatcatggtcaggatacataataatataactactacccaagaggatggccaaatgattatgcatcctgaccatgatcaccaagcttttatcaacttggtctcgagccgattcggctcgagctcgagcc

SEQ ID NO: 126478 - DNA, 1166 bp, Glycine max
  unsure (1)..(1166): unsure at all n locations
  Clone ID: PAT_MRT3847_85216C.1
aaattatttacttcaatttcattagctctgacaagatttctttatatatcgtcctcgagccgattcggctcgagacggctgcgagaagacgacagaagggcaaaaacaataataaatatccgtttttctagtttcctagttctgcaagctctctcctacttttgacccgtgagtgcggaggaaagaaagatgttttttaacggatatgggtatcaagggacatcatcatttgagcagacatttcgatgttactctgcttcgtttattgaaaagcccgaaattgaaaatggtgataaaattataatgcctccttcagtccttgaccgtctagcatttctacgtatggattatccaatgatgtttgaactcagaaatggtgcttctgagagggtttctcattgtggggttctggagttcattgcagatgaaggaactatatatatgccatactggatgatgcagaatctgcttttgcaagagggagacatcgtaagagtgaaattcgtatcacttccaaagggaacatatgttaaattacagccacacacaaaggacttttttgatatttccaatccaaaagctatcttagagaccactttgagaaaattttcctgcttgactactggagatactatcatgatgacatacaacaacaaaaaatattacttggatgttatagaaacaaagcctgctaatgctataagcatcatcgagacagactgcgaggtggactttgctccttccttggattacaaggttactactgcaagcaaaacactagacaaaggcaagttcaatccattttttgggactggtagacgtttggatggaaactcaattcctcctgtttattcttcacggccttccgatgttccaaatgtcaattcattgtcttctacaacatctagttcaccaaatttcgctcgtccatctcagggaaagctagtgtttgcatcgaatttttaccgcacaaaaataataggaaagataattctggtgttctaacccaatgtcttctgcagtttggcccttcttatatagtaataattagctgactgcaaactaatatcattttcctatttactgtangaaaagaccgagtcaaaacaagaggcaccccaaatttcagcctttcactgggaaagaagtattcccctaagatataa

SEQ ID NO: 126479 - DNA, 830 bp, Glycine max
  Clone ID: PAT_MRT3847_85217C.1
gctgtacgtagtggcaaaacggtaaaaaaacatgagaaccatgtcgttaatggaagcttataataattaaaattgtattattattgttttacacaacgagttgaagatccaggttcaagtttggcatctgaatcccaatacggaacccaaaattagctcgattaaatccaaatctgagagaagcattgattggtacggtaatggcggaagggaaggaagagagtaaatctagcgaggaaagtgtgaagctgttcgtagggcaagtgccgaagcacatgaccgaacccgaactgcttgcaatgttcaaggagttcgcgctcgtcgacgaagtcaacataatcaaagacaaagcgactcgtgcttcccgaggttgttgcttcgtaatttgtccgtcaagggaggaggcggataaggccgtcaatgcgtgtcacaataaaaggacgttacccggggcatctagtccattacaagtgaagtatgcagatggggagttggaaagattagaacacaaactcttcattggcatgcttccaaagaatgtttctgaagttgaaatatctgctcttttctccaagtatggaactataaaggatttacaaattttaagaggctctcagcaaacgagtaaaggttgtgcatttttgaagtatgaaaccaaagaacaggctcttactgctttggaggcaatcaatggaaagcataaaatggagggttcaagtgttcccttagttgtcaaatgggctgatactgaaaaggaaagacaagctcgaagagctcataaagcacagtcccaagcttctaatgtaccacatactgattctcaacaccca

SEQ ID NO: 126480 - DNA, 641 bp, Glycine max
  Clone ID: PAT_MRT3847_85218C.1
cggctcaggttttggattcaagtgtgagtgctcttgtgaagaggccaaagaagggaaggagtgagaaggaaaaggaagaggaggaagaggttttggtgatagaagggattgagtttgagagggatttgggtgtgaagtttgatgtgtatattaacgatgaagatgatgtgccaggtgggccaagtaagactgagtttgcgggaagctttgtgagtgtgcctcataagcacaagcacaagcatgggaagatgaagactaacttgaggcttgggataacggagttgttggaggatttgggtgctgaagatgatgagcatgtggtggtgactttggtgcccaagtttgggaaggggcatgtcatcgttggtgggatcaagatagagtttcacaagtgaggatggcgatagttaattgaattgaaaaagtttgaatgaaattaagccatatgcttgctggttaatttcactgttcataacgaggtttgcactaggtttgaaaaatgatggttggataaaagacgtccttggagtaccaagaggtgaaatcgtatctagctatagatacgatatatatgttatactatgttatgcgatttaatagcgagaaaaagattggaaataataataagcgttaaaagtgtg

SEQ ID NO: 126481 - DNA, 209 bp, Glycine max
  Clone ID: PAT_MRT3847_85219C.1
gccttcttctttttacaggtattcttatgttgccaaccagaccaggaccaagatagaattccaaataaaccgttgtacagatacaaaactgactaccactataatctgcacaaccaaatgttcccatctctcaacatcaaacgcgatggaagataacgtcatgatcaaggtattgaccgagtccaccaatattaaagtcggtggatatg

SEQ ID NO: 126482 - DNA, 246 bp, Glycine max
  unsure (1)..(246): unsure at all n locations
  Clone ID: PAT_MRT3847_8521C.1
gtctcagagggtctgtgacanacagnatcanntggnaaggnnagcgtttntgggccatttatnnccactgtttattgaacatngcacagattttaggcnccctctaacggcaatggcagatnanaatcctcaaaatcctctcccaaatggcaagtcccattacatnnaaacntgtggagttcnttntngnggaaacnaantgangaacgtttacacccanagtatgcaaatttangngtggnaatn

SEQ ID NO: 126483 - DNA, 385 bp, Glycine max
  Clone ID: PAT_MRT3847_85220C.1
gcccgaattcggttaggaaaatggaagacaaagccacctattctcatttcaattcgaagacaatgcaaggtgacggcttgcttcatttatcaacaccactctcttctgtcagagccgcaacaatcagagatagtatgcctttataaccccggacatcagcgacactggtattggaagcaagctcaaaaaaatgcgtgtgttcaagacaaagactcttatgccaaaaaaaatgatgcttccggtgttcactctaggactacactcactgcatcggtcctttccaatcagctgtacaaaaggtagacggagactggcatctgacatgtagccagagatcagaatgaagcttcaaactatcacagccactatggcgaaccacatactg

SEQ ID NO: 126484 - DNA, 291 bp, Glycine max
  unsure (1)..(291): unsure at all n locations
  Clone ID: PAT_MRT3847_85221C.1
cgtcgcatgcacgcgtacgtaagctcggaattcggctcgagcntannntnanaccnccantgtcagatcaagcttgnaccatacgtacntncatagntatngncaataatactnttgccacgtncntanccccancttgagtcagaanaannatcttcngagnataaatcagnaantcnancatcatagagnaggctgatggttgagcnancagttgtggcagtganggtatgaganaggttggcaagntnaagaatgaagggctancctcnntttntngctttggaggaa

SEQ ID NO: 126485 - DNA, 624 bp, Glycine max
  Clone ID: PAT_MRT3847_85222C.1
ctgagtgcgaggaggcattgaaggatggtgacttattaatgaatgtgggaaagctgaaggaagcattgccctactatgagaaggttatggataaattaaccttccaggtaaatgttttaaataaaaatacttaccagacttgaaaaaaaaaatatctatcttttccataaaaaagctaatatcatgtctctgaaagcgaactaaagtcttgcttaatgaattgaaggtgaatacaaggaccagcggaagatgccccttttttctactttaattgagcttagcattgtatctaatttttgaacttttaaatgtaatgacatatactctagcagggaaactagagaaaaaatatatatttggaggaatatatgcatgagattaatcatgtctgtgcagagtgagcttcatggattagctgctttgcagtggtcgatttgtcaagactccctcagtaggtatgttcagaaacttcatgacatatctgaacttctcaaggaaactaccagattgtgttctacataaaattgatgacacatcctaatattaaatatgcatatgcttggttgttcattcagctgtgttgtgatcatgttgataactggttttgattaaaattatgtggtt

SEQ ID NO: 126486 - DNA, 419 bp, Glycine max
  Clone ID: PAT_MRT3847_85223C.1
tacttaacagtaaagaagacccagatttttcattaattaaccatcaaacatcttcttagcatcaaaagataccttaagggagcacgcataatgtataccagagattgaaaagctgagctacctttggtgatatatcggaagatccagcccactaacagaacacattccaaaggctacagctcaaaataacatctaaaactaaagagcaacactagtttccttcgaactgtggatcacccatgacaaactgatacgcgaacactggtacaaagatccaagacgccaagaaatttgtcaaagaaacccagatcttgaccatccatcatctttagacgcagtggcaatggacgcgactatcccctatgatgaaaggtggagacgtgcttcctaggacacgctgcggagcccctccaccgtcc

SEQ ID NO: 126487 - DNA, 254 bp, Glycine max
  Clone ID: PAT_MRT3847_85224C.1
cgtaccgctgccagcagacgacagaaggcggcacaagtcactttgttgatcgagatacctagaaacagtgtcatgaaaatgaaggtccttgtcttcttcgttgctacaattttggtagcatggcaatgccatgcgtacgatatgttccctctccgactgcacactggctatggtgccggtacccggaagctgaattcgcaagttcgaggcttgctgtgtgaaagcacacaacatcttcggccttgagaccattc

SEQ ID NO: 126488 - DNA, 706 bp, Glycine max
  unsure (1)..(706): unsure at all n locations
  Clone ID: PAT_MRT3847_85225C.1
ctactctttgctaagattcttgctatcatctgctgcaccatggggtgtctgcaagaccgactacgaatgcgacgagtctgagcactgaaccttagctgctcgctagtggagaacttgggcttgcgagagtgaagatgtggcaggaggtgataccgaaggaggcagggtaccagatcataaacgacgaggtgatgttggatgagaacccaggggtgaattgggagtggtggggacgactcgcatggaggcagagtgtgatgaactgatcgtgagctggattagtagcaactgtggggacgtgaacgagagcgctggcggactgagctggcaatgggatgggggggatcatgggtgatagtgtgcatggctgcgtaggagagactgtngggggtggtgagggtggggggggtggcggatggaggggatggtggaggtcgaatgggcatttgggggatgggggggactggggggcgggggagggtccttccatggggcagctccgatggaggcgcggggggcggggggggggggggtgagggaggagcgtggtgggggggggtggcgctgagagggggggggcggggggggggggatggaggggggaggcgggcagggggggggggcaggagggggagggggcatgcccggggcggggggggggggggggggagaggggagggggggggcgcggggggcgggggggggg

SEQ ID NO: 126489 - DNA, 414 bp, Glycine max
  Clone ID: PAT_MRT3847_85226C.1
gcagaagacatccttcggtccgcttcggagtcgcataccctatcctctgtaaccccggttcactattccgaggccaacgcgatgacttgccaaacgaacaccatcaacctcgaaaaccctgtaagcaacaacaaaaacctctctgctattgctctcttcaaatgaccaaaccttgaagacgccaaaaaagtctaacactgcatggccgactatgactacgaccgccgttgtcgcaactgcctacttcactcttacgccaaactcgacaccacccctgacgattgcatcagattcttgaacacatatcaacaaaaccctaccttccttctacgccgaccgctccaacttacacatcctcgtgtcacacgcctccaacaattacaatttactctatccaatgcaccaaaccctaaa

SEQ ID NO: 126490 - DNA, 618 bp, Glycine max
  Clone ID: PAT_MRT3847_85227C.1
ccctcatattacaaccagggcggtgtttcgccagactactacggcggcagcccgaaccgctaccaacaaggcccgccccaaggccagtacggaccgccacagggccaatacggtcctcctcaaggacaatacggatacggaggccagcagatgcaataccagcagggaccgccacccccaggcggctactaccaagatgacaggagggccgatggcggcggcggaggcttgttcgctggattgtgcgctggtctggcgtgctgttgttgcttggactgcttgttctagacaggtcgctgtggacaaacagtgttggagggattgatagaaatggaatgcgcaagaggcggcatgttacatggggcaatctggcttttcgaccccggtaaatccgtataccatgcgaacatggagtgacgggaagaggattcggcgtacagactatagaccgatgggctttcttttgttctatttcaattggggtctctatggatatgactggttatcgatccgagggcatattaaagagtactgccagctaccaacttacctaattcccccctttcattttcaaaaaaaaaaaaaaaaaaaaaaaaaaaaaaaaaaaaaaaaaaaaga

SEQ ID NO: 126491 - DNA, 582 bp, Glycine max
  Clone ID: PAT_MRT3847_85228C.1
cccacgcgtccgactagcttcaattagagcactgtgtgtggaatgacttgtaaaccttacaagcaagcttcaattttgtccaaattagttgcagaaaatataaattgaaagtatattaaattgaaagatataacataataatatacatctgagtgtgtcatttcagtgtgtcatctcaaaatatatctgagagtgggctacagcaagctagcctcccaccaagaggttggaattcctatgattccttttgctggacaatttctgaagaagaattcttacaaagtgctgaaatggtttctcaacgtctcaaggctcacggatatcaggtatagatactgcaaagaacaataacttatggatgatttatctgtattagcagtgttatatatccttccacttattgatgcaaattgtttacaagatccaattcgagttgagaaaactaatttaatagtgtcgatcaagatctttatgttcttgttcccctttatgtgttggtttttcaattatggaagtctccttgtatatctcccttggtatattatacccagaaaaaaaatctgccttagtattttttctctc

SEQ ID NO: 126492 - DNA, 403 bp, Glycine max
  Clone ID: PAT_MRT3847_85229C.1
gtcgcatcgcacgctacgatattcgtctagtgctcgtgccggagacatctgcccaattttagtttatagtggtgggcagctgatatccttgcgctccgtaatcaataaaaagctgagcggcccaacactcctgagcagttcagcacaatgccgggtctggtcttcgtagcggacaccccccaaagatcccctttcccagttcccaagaaagcagtctccccattcccttttggcttcttcaaaaagaaagccccggttatcttgatgtcctttttgacaaccctgatctcggcccatttctttctaagctgggccgcgacaccattgtctttggcgatggccccgccaagggcctcgactttgccatccgggccttcactttctctgagcgctgcgccattca

SEQ ID NO: 126493 - DNA, 435 bp, Glycine max
  Clone ID: PAT_MRT3847_8522C.1
gtgggatacagcaaggcgaccgtcgagaagcttgtcgacgaattcagatttttatgcttgttataaggacattgccatacattcgagataattcgaatgaagtttcaacaataaatcctacagcatttagtgcttcatcataatttaagttgactacgtcaaagctatgaatatattttcgcatttctttattttcactactatattctactttacgttcttcagggatttgtgttgttatatgtgatgtacctacacctacttatggtccaggatctctgaatgtggtgtctgtattaaaacgaaaacctaatgcatttattacactggctttgccgaaccgtgtttgttccgcattccaatttataagttcatttgtcatagcccctatcatgaacgaccacttgctgatgcacgtacccaacgttggtattt

SEQ ID NO: 126494 - DNA, 523 bp, Glycine max
  Clone ID: PAT_MRT3847_85230C.1
ggacataaccaaaacaagctgtttaagtttaacgggcatttttccaaaaaattatcatttttattattattatttttggggttggctgtatacttgttatagttggcaatttcccccccccccaacctttaatggggacccttaacttaaaactttgcccaaacttaacctttcagggtttactttacatggggccaaaaatgggctttaacaaggaccattttactttggacttgaaggccaatctaaaaatggggcttttgcctttactcctttggaggggggcccccccatcgcccatgcttttttattaaaacaaacaaggcattggttgcatgccccattgcaattccccccttcaccaaagttttcccaacataaaggtcaattttcccgggggggccccccacatacccaaagtttggataagccatttcccctggcccatttacaaggcctcccatgattgcaatcgaaacccaggggggggggatgtcttctcccaaatttgggcccttacttt

SEQ ID NO: 126495 - DNA, 248 bp, Glycine max
  Clone ID: PAT_MRT3847_85231C.1
gcaaggcaaagaaaatgacagtggacatcattctagattttacaaaatcaaaggagcgaccagacatggctgtcatgatctaagatacttcaacgtgattggatcgaacccaaacatatgactaggagaagctccaaggccactttgtcaagggtctctgcaatgcacctactggtgcatgatttactggaggttgtgcgcatgaatgtgccacacattggtatgggggttggagttgaagcaggtga

SEQ ID NO: 126496 - DNA, 639 bp, Glycine max
  Clone ID: PAT_MRT3847_85232C.1
cacacattgattccagcccaccccctgaacaagcacctacaccgctgtcattccagcttttcaacacccctctgatggcaatgatctcattcttaatagccctaagggcttgaaaatcagcctgagtcacaaccaccgcatcccacaagtggcctgaaacatgctgaatggtggaagtggaagccaaaagaaacagaaaaaagggtaagcaaatgaaaccaccgctaccacttttttcattgctccggcattttctcctcctatcaccaccaccatttgaagcaaaagagaggctatgctgaaaagggtctgcgtggaaacctttgacatgatgatgacaagtgttgttgtgtcccatgaaagtggtaagtaagtgggaacttataacaaacaatggctaagcaaaagaaagaaaaaaaaaagtaagacacgaacaggttccacttgcactctctctttttgggtttctcacttcttaaagcagataatagtagtagtggtagtagtgtagtacaatgaagaacaaaggggaggatctaaataacacaagaaggaaagtggagagtgaaaagagagaaggacatgtgagtccccttctgtctcttatcgcagccgtcggacgcgtgggcggacgcgtgg

SEQ ID NO: 126497 - DNA, 761 bp, Glycine max
  Clone ID: PAT_MRT3847_85233C.1
gagtggaagccaaaaaacagaaaaagggtaagcaaatgaaaccaccgctaccacttttttcattgctccggcatttcctcctcctatcaccaccaccatttgaagcaaaagagaggctatgctgaaaagggtctgtgtggaaacctttgacatgatgatgacaagtgttgttgtgtcccatgaaagtggtaagtaagtgggacttggaacaaacaatggcaaagcaaaagaaagaaaagaaagtaagacacaaacaggttccacttgcacactctcttttttggtttctcacttctcaaactcagatactcagatgatagtggtagtatagtacaatgaagaacaaagggaaggatctaaataacacaagaaggaaagtagagagtgaaaagagaaggacatgtgactgaagaaagttgttgtcggtggggtttaaggtttgttgtagaatgagtcaaatgttgcaaatttcttaatgatcctaacggctagttttatttgttcatagtctaaattattatcataactgctgcataacgtattaacgttgttgttgggttgggacattataatagaagaccgagcagagatggggttgcgtttcgtccctccaacggctacattgcattggatttggtttttttttggatgcttatgtattcttatgggccccactctttgccacgttctgctggctcaatgtgactggtcatcatgaatattattatagtataataaaatttgcatcggtcatagaagac

SEQ ID NO: 126498 - DNA, 456 bp, Glycine max
  unsure (1)..(456): unsure at all n locations
  Clone ID: PAT_MRT3847_85234C.1
cccgggtcgacccacgcgttctacccgacccgcctcttcggggggggagggagggaggggctcgccgattcaacgtcggggtgattgaccgccggagcgcgggggagatgcccgtcaccgtcnaggactgggcggggtggccggggaactggggggtgaagaagcatcacagcgtggagtactggatgatggggggggggggggacgtcnncgggggcananaagtgggtaggggttcggatccggaactcgcccaagcgttcttcgtgcgcggcttctcgtcgctcagcttcaacacgcatgggcacacgatgaaggagcccgccacgcanattgagcgccaattgcaggggttgtgttctgggtcagggggatttaatggaattattaaagaaatccaattactggcanaggtgtnggggtggagaccatgtgtttcccatgacgcaccccaat

SEQ ID NO: 126499 - DNA, 124 bp, Glycine max
  Clone ID: PAT_MRT3847_85235C.1
cccacttgtccgctgacgcatccggtgattactaggatgctaagtctcagaatgacggtgctgataaccgaggacgaactcaaggaggacgctgagtgcaagaaccattgcaagtaccacctac

SEQ ID NO: 126500 - DNA, 196 bp, Glycine max
  Clone ID: PAT_MRT3847_85236C.1
caaaaagagatagcaatccacatcatcgaaaatggctgcacctctgctctctaataaaatcatgaacaataaggtgaaggggttcaggacgcctcatattgacatgataatttccgtcaagacaaaatgtcatatatcacacggtatagactccattcttaggacaatgttcatgggatacactttggatccaaag

SEQ ID NO: 126501 - DNA, 113 bp, Glycine max
  Clone ID: PAT_MRT3847_85237C.1
tctacgtaagtgtctgagagaatagtgcgtctgtttgtttgaaattaagtcgtcaagatgtttgcaatcatcggaggaaacaagggtcacacgataaaggggaactcggtgat

SEQ ID NO: 126502 - DNA, 1872 bp, Glycine max
  Clone ID: PAT_MRT3847_85238C.1
taaaaagctagctagctagtttcatctgggttatgcttatgtctggcacagaacaggtgaccatgggaggattaggactcaatttgactccaattactacatttgctatcattactgtgattgctacggtgctaatatggtggttttggaatgcactcaactgggtgtggctgagacccaagaggatagagaggcgtctcaaggagcagggtatccaaggaaattcctaccgccctttgattggagacatcagagatatggttaagatgattaaggaagccaaatccaaacctatggatcctcactctaatgacattgcaccccgtgtgttgccttacgttgttcacaccatcgctaaatacggtaagagttcatttatgtggcttggtccaacaccaagggtattcatcttggatcctgacaaattcaaagaaatggctactaaggtctatgattttcaaaagcccgacactagtccacttttcaagcttctagcatcagggtttgcaaattatgatggcgacaagtgggctaaacacagaaagatcgtgagtccagcattcaatgtagagaaaatgaagctcttggtaccgatattttgccagagttgcgatgatttgatcagcaaatgggagagtttgttatcttcgtctaatgggtcttgtgagttagatgtgtggccttttgtccaaaacgtgtcaagcgacgttcttgctcgtgcaggctttggaagtagctatcaagaagggaaaaaaatattcgaacttcaaagggaaatgattcagcttacaatgacgctctttaagtttgctttcattccaggttacaggtttctgccaacgcataccaacaggaggatgaaagcaattgacaaagaaatacgagaatcacttatggtaatcatcaaccgaagattaaaagcaatcaaagcaggggagcctactaacaatgacttgttaggcatactcttggaatcaaattacaaggaatctgaaaaaagtagtggtggaggaatgagtttaagggaagtagtggaagaagtgaagctattttacttggcagggcaggaagcaaatgcagaattgctggtctggacattgttgttattaagcaggcatccagattggcaagaaaaggctggggaggaggttttccaagtgttcgggaatgaaaagccagattatgaaaggattggtcaactgaaaattgtgtcgatgattctacaggagagtctcagattatacccaccagtggttatgttcgctcggtatcttcgtaaagatacaaaacttggagagcttacaattcccgcaggagtggagcttgttgtacctgtgtcaatgctacaccaggataaggagttttggggagatgatgccggggaattcaacccagaaagattctcggaaggagtatcaaaggcaacaaaaggcaagctttcctacttgccatttggatggggtcctcgactctgcataggacaaaactttggcttgttagaagcaaaagtagctgtgtcaatgatcctgcaacgtttctccctccatttttccccctcctatgctcatgccccctcctttattatcactcttcagcctgagcgtggggctcatctcattttacgcaaactctagaatgcactttttagtctaaataaggcttcttcatttgaggcgtgtttgcaattttagttttcctattcctgctagtttcttatgtagacgatagatctgaaccttcacttcaaatctatttccaagatcaatatatacctgttttgcctaagttactggtgtaattactcctccttatataaactttatcatgtttgaattttaaattgatagagtttaccttttggcttttgcgaag

SEQ ID NO: 126503 - DNA, 365 bp, Glycine max
  Clone ID: PAT_MRT3847_85239C.1
aactttttcacaacctcaaaattctcagcacaattctgctcctatgcatgtttcctcactcactcaagtgccaacaagcatacctcaatggcactgtctatgactgttctgataacccttcagtcccaaaaggttacctttgcaatggccttcagaagtcatgcacttccttcttacttttcaggtcaaaacctccctatgatagccccgagaaaattgcttaccttcttggctctgaggcatcaaccatagcctcaatcaacatgatttcaagaaatgacaagattccttccaataagtcaatcattgttcctgtgttctgttcatgttcaagaaacatctaccagcataacacaccctacact

SEQ ID NO: 126504 - DNA, 448 bp, Glycine max
  Clone ID: PAT_MRT3847_8523C.1
gggttggataaatgatcggaagaaaggattagctgtagacttgacttgcattgcagtgagaccactagtcattcccatccaatcaagctgtgcactgacatttcaacttttaattgcttttagttgtttgtactaatcattttgtcaactcttcagacagagtgcataaaggaacagcattttgtgcccatctggtgtttaacttaaatatgattgttttggcgagcacagcaattcattgtattgaatggttggtttcattggtcatgttgtgttgctttaaccatgacttgctttcgttaatatgaaataaaaagaaaagaactagtcctttcaatacttaccctttcttattaattttcaacgatactgaagctattcgttaccttgcactgataatttgctcttggtaaaaagagtaattactatatgaagcccgtgatagctg

SEQ ID NO: 126505 - DNA, 695 bp, Glycine max
  Clone ID: PAT_MRT3847_85240C.1
tcctgacaaattcaaagaaatggctactaaggtctatgattttcaaaagcccgacactagtccacttttcaagcttctagcatcagggtttgcaaattatgatggcgacaagtgggctaaacacagaaagatcgtgagtccagcattcaatgtagagaaaatgaaggttagtttgtccttcgtctctcactcgctgtcattacattaccgttgtattatatttaaaaatagcgattacttctttatgagtgatgttaatgcatttaatatggtcttcatgaaaattgccacagctcttggtaccgatattttgccagagttgcgatgatttgatcagcaaatgggagagtttgttatcttcgtctaatgggtcttgtgagttagatgtgtggccttttgtccaaaacgtgtcaagcgacgttcttgctcgtgcaggctttggaagtagctatcaagaagggaaaaaaatattcgaacttcaaagggaaatgattcagcttacaatgacgctctttaagtttgctttcattccaggttacaggaggatgaaagcaattgacaaagaaatacgagaatcacttatggtaatcatcaaccgaagattaaaagcaatcaaagcaggggagcctactaacaatgacttgttaggcatactcttggaatcaaattacaaggaatctgaaaaaagtagtggt

SEQ ID NO: 126506 - DNA, 287 bp, Glycine max
  unsure (1)..(287): unsure at all n locations
  Clone ID: PAT_MRT3847_85241C.1
cttttgcttctaacaagccaaagtagctgtgtcaatgatcctgcaacgtttctccctccatttttccccctcctatgctcatgccccctcctttattatcactcttcagcctgagcgtggggctcatctcattttacgcaaactctagaatgcactttttagtctaaataaggcttcttcatttgaggcgtgtttgcaattttagtttacctatncctgntagtntcttntgtagacgatacatntgnnnctacactnaaantctnttnnnaagannaataaccngt

SEQ ID NO: 126507 - DNA, 286 bp, Glycine max
  unsure (1)..(286): unsure at all n locations
  Clone ID: PAT_MRT3847_85242C.1
tntcgcnngtacgcgtacgtaagctcggaattcggctcgagcntgcttgcactcttcaccgtgtctatcanctccacngtcnganncanttncgcnannaccgncgggaanattgtgcgtgangnntnnntnnnganctccgntgtggtntcatctctnacnggctatgccttttgggcgtncaagaanggcnangatnttngctnccttggcncantgnngtncagnttnctcnttnctcncatccncantggcatgatgnanatgtncntgcctctnnnacctn

SEQ ID NO: 126508 - DNA, 158 bp, Glycine max
  unsure (1)..(158): unsure at all n locations
  Clone ID: PAT_MRT3847_85243C.1
ctgtggaatgactggtgatggagtgaatgatgcactgcatcaagaaggccgacatggtatagtgtgtgtgaatgatgagtcgangactantgttacagactgctaggtatatatgagtgcagcgnactcanataatacatangccatcacgagatgta

SEQ ID NO: 126509 - DNA, 286 bp, Glycine max
  unsure (1)..(286): unsure at all n locations
  Clone ID: PAT_MRT3847_85244C.1
gacgagggcgcgcaggtccttgcaggtttagtctcaggtgcgcggaaagtgaagcgacgtgaagatggaggtggngccaggcggncgtctggtaccgatggtgtccgggagcggaggggctcgtccgncagctagaaggaggagccaagatgagcccgttcagtcggggatgaacgggattccgaaacactcctactggctggatctctggctcttcatccttttcgacctggcgttgttcatcttcgtgtacctcttgccctgattggtttgctgagatctagaa

SEQ ID NO: 126510 - DNA, 1263 bp, Glycine max
  Clone ID: PAT_MRT3847_85245C.1
aacgtccccaacactgtgttcctgttcttcttcttcgatggcggcaacctcaacatcactggcttctcaactctacattggcctgcgccgcccatgcctcaagcttgattctttcaattctcaatctttctctgtcttcgaccccaatcttcgcctatccctctctcctcccagaccctcacgcgccatcgtcgccatggcaggcaccggcaagttctttgttggcggcaactggaagtgtatgttgttgtcgcacctccctttctgtacattgatcaagtgaaaaactcactcactgagaggattgaaatatctgcccagaattcttgggtgggaaaaggtggtgctttcacgggagaaatcaggttagctcacactttcctttcaagtgttaattgatctaaggtttctctttatattttgattttatagtgtttggctagttggacgattgtagataccttctttttctatgttgacattctccttcgtgttgttcttgatgtgattctgatgtttgaaccaaatgttatactacaatttaatgagttaattcagtcacttagttattaaaacctgactctttagcgcggaacaactaaaagatcttggatgcaagtgggttgttcttggacattctgagcgaagacatattattggagaaaatgatgagtttataggaaagaaagctgcctatgctttgagccaaggtcttggagtgattgcatgcattggagaattgttagaagaaagggaagctggaaaaacttttgatgtttgttttcagcaattgaaggcttatgcagatgcagttcctagctgggacaacattgttattgcatatgaacctgtatgggctattggaacgggcaaagtggccactccccagcaagctcaggaagtacatgtagctgttcgagattggctaaaaaagaatgtccctgatgaagttgcatctaaaacgcgaattatttatggagggtctgtaaatggagggaacagtgctgagctagcaaagcaagaagatattgatggatttctcgttggaggtgcttcattaaagggtcctgagtttgctaccattgtcaattcagtcacatccaagaaagttgcggcttgaacttgattacatattgtgattttggcaataagagagcattaaggatataaagacgggctagtcttaaatgtggcaataatatgggtgtacaataacagattggtttttattatcaaaattactgcgtcaatttctttgcaatc

SEQ ID NO: 126511 - DNA, 1457 bp, Glycine max
  Clone ID: PAT_MRT3847_85246C.1
tcccacgcgtccgtacggctgcgagaagacgacagaaggggacttcccagttgctacctcaacgtccccaacactgtgttcctgtttttgttcttcgatggcggcaacctcaacatcactggcttctcaactctacattggcctgcgccgcccctgcctcaagctcgattctttcaattctcaatctttctctctcttcgaccctaatcttcgcctatccctctctccacccaaaccctcacgcgccgtcatcgccatggccggcaccgggaagttctttgttggtggcaactggaagtgtaacggaacaaaagactcaatcagcaagcttgttgctgacttgaacaatgcaaaattggagcctgatgttgatgttgtcgtcgcacctcccttcctctacatcgatcaagtgaaaaactcactcactgagcggattgaaatatctgcccagaattcttgggttggaaaaggtggtgcttttactggagaaatcagcgcggaacaactaaaagatcttggatgcaagtgggttgttcttggacattctgagcgaagacatgttattggagaaaatgatgagtttatagggaagaaagctgcctatgctttgagccaaggtcttggggtgattgcatgcattggagaattgttagaagaaagggaggctggaaaaacttttgatgtttgttttcagcaattgaaggcttatgcagacgcagttgctagttgggacaacattgttattgcatatgaacctgtatgggccattggaacgggcaaagtggccactccccaacaagctcaggaagtacatgtagctgttcgggattggctaaaaaagaatgtctcagatgaagttgcgtctaaaacacgaattatttatggagggtctgtaaatggaggcaacagtgctgaactggcaaagcaagaagatattgatggatttctcgttggaggtgcttcattaaagggtcctgagtttgctaccattgtcaattcagtcacatccaagaaagttgcggcttaattacttattgtgattttggcaatatgagagcattaaggataaagacgggctagtcataaatgtggcaataatgtgggtgtataataacagattggtttttattatcaaaattactgccaatttctttgcaatcagtaggaatggcattatctgatttttccaaagagacagtgtatttatagcatttagacatgcagagatggtagaaagcaataaataataaatgtttctgaattattgtttttttcatatcgtcaaaaaaaaataaatgtttctgaattaaaattttaaatcctgtattttttattttttgcttttgattgtcaccgtcactgacggggtccagaatttttgtgactaaaaatgcaccttgtatgtttgttcactttctaaatatggaagttattgtgaagttttaaaaaaaagaaaa

SEQ ID NO: 126512 - DNA, 525 bp, Glycine max
  Clone ID: PAT_MRT3847_85247C.1
tccaataaggtttcccgtcatcactgtatgacgtcctccgtctttggggggggggtgggggggggggggggggggggggggggggggggggggggggggggaatggggaaagctgcatactggggaggaatttgtggggtggggagccccccgaagttagaaagaagccgatatcccaataaggaaggacaaatttacggattaaatgcccaccaaagttttccgaaaaattccctaaccttaataaatgaatggaaattaaaggccagcctaatgcaagcggcgttaagataccggtgaaaccccgctaatagtttttcccgaaaaatgaaaatacaactaggtgaatatagatagggcggttaaaaagtaagggtaccttaaggggtggaacccaccaaaatatacgtatccatatggaataagagggcttgagagtttaaggaacgtgatgatttctccaaaattgatttggttgaataattttaggggggcaagaaaaaacccaagtgcaaaaataaaaat

SEQ ID NO: 126513 - DNA, 448 bp, Glycine max
  unsure (1)..(448): unsure at all n locations
  Clone ID: PAT_MRT3847_85248C.1
gtcccttgggcngcngttnttattattacctcagcccctccgggaccttagccccgtccgttcccgtccgtgaacaagttcctacctatcttcattagcttgtctgtacccatagatcctcacttttggcnncntanaagcctgcccttcncttggaantgctttgttcactcttattctttgccctctgctgcngctgccgaacatcccttgcgctacccgctttattctttgccgtctgctgcccgtagcgggccctgttgagctggggcttgggtctgacccactttggatgatccatagcctggtgagtcaacaccttctgccttctctttctcccgctgctctttggtccccgggtgtggggttgtcagcccatccttcagcttcctagttggcgcccagcccggtttctctttggttaatgcgttgcctgttttacggcccc

SEQ ID NO: 126514 - DNA, 332 bp, Glycine max
  unsure (1)..(332): unsure at all n locations
  Clone ID: PAT_MRT3847_85249C.1
gttttcgcagcagcaaactaacaaattactcatatcatataataagatggcncgtnctctctngcaagcnaaacgtattggtgtccttgttgctcatctatctccctaattcccggtccatcgggaaggtacgcgtgggcatcggtgtattcggtanannttggattggnnatattgggcnaaggantggaatctggnagtgtagaggagaanctgttccaaaggatggtcaaaagcnaatcantgntggggccccagaccnantacaggttnctataggcccttaaccaaccctgnattgaccggtgnagttcgnataggttctccgatcc

SEQ ID NO: 126515 - DNA, 143 bp, Glycine max
  unsure (1)..(143): unsure at all n locations
  Clone ID: PAT_MRT3847_8524C.1
aaagtaactgcacgcntacgtaantcgnaatcggctcgangtttctncgttnntagccagncntctnttgnagnatctagatntanntnttncngtgatcagacnntacgcnttnagtgaccagcnnngnatggangctgnac

SEQ ID NO: 126516 - DNA, 368 bp, Glycine max
  Clone ID: PAT_MRT3847_85250C.1
actcttgctaaaccgggggtgaaagccttataaaacggacagtttgtgttacaaactttgcttacgagatgaatcgcatcaccatatatacttctgaattgcaggctcatgcttcccctgaaacgtccgaagcttaaccttcatccctgtccagatattgacgcccatatacaatgtgcctgcgataatgccactttgatcatccctattgatacaatgatgcaccagtatatagcatggactcgtgtagacaatgaactctattagcggctctggaacacacacatgtccaccataccaagatgtatgccagtgcccatattttacttcgaaatatcccctacatgtggatgatggttagccattac

SEQ ID NO: 126517 - DNA, 427 bp, Glycine max
  Clone ID: PAT_MRT3847_85251C.1
cttcatcactcgctccatacccagcaacctaaacattcactcaactcgaccaaccatatcaaccaacatgctttccaacatcctcttcctcgccgccgccggctacgtcgctgcccaggacgtttccagcatcgttgcttctgccacctctctcggtggtgatgctgctaccagcgcggttggatctgccctttctggagacaactctgcagtctccgctgccagctccttcgctgtgaacaaccctagcgaggcctcttctttcctcgcctcctacgcctctgagagcccatccgaagcttcttcctacctcgcttcgttcctctccactgccgaccccaacgtgagctctgaggttgccagcgctgcctccaactactttcccggtggctctgctgcccgtactggtgtcgtgcccatgcccacc

SEQ ID NO: 126518 - DNA, 391 bp, Glycine max
  Clone ID: PAT_MRT3847_85252C.1
atttctataaaccgcgagcacaggttgccgtaccttaaaaccggaaacaaaagcaatcgttacttgattccaagaatctctcaattgcttgctacttctttgtgtaccaatttcttatgggaaggaaaatcacttttttgtgctggtcacagacatttgagaatcattctcttttccactcttagtttatttgctgaacactctcctatttgatataggattgcgtgtcagatttaaactttttctgtttctttttcagttctctgtttaatttcaagttcaagctggtgaaaacttggattagtgctcccactctcctatttggtataggacttcgggggctgacttttctatttctctattttgcttgactctctttttttcactgatc

SEQ ID NO: 126519 - DNA, 248 bp, Glycine max
  Clone ID: PAT_MRT3847_85253C.1
gcgtacgcgtacacatacacggggaggtgcatacctacaggaatatatccacgcgagggcgtggagggcgtccggtctgattaaagcaggactgtgtaaatcggactgacacaagaggagaacaagcaagtacgagcgtgccgaaagaatgcgatatagagtataacaccaaccggtggctcccacaaacaataccatgggctgggggtcgctcaggattgaaacgaatggactccggatacaagcaa

SEQ ID NO: 126520 - DNA, 304 bp, Glycine max
  Clone ID: PAT_MRT3847_85254C.1
tgtctatcaagtagccttcttccatctaattaattggagaaggacttttcattgcattttaatcagtggtcgagtaacttacgacaaggttttttgcagtagtagggtttacagtttatattaaaacacatgtattttttccataatttggttccaaatcagacttttgctgtctgctttcaggaaccatttatatggagcccaacttcgtaatagtacctctggtacttcttttaatatatatatatatatatatatatatatatatatatatatatatatatatatatatatatatatatat

SEQ ID NO: 126521 - DNA, 395 bp, Glycine max
  Clone ID: PAT_MRT3847_85255C.1
gatctatttttttgcttgagtcgcgacgttttttacttttcgtgaacggttgatgaactaccttaccctgtagggggtccaaccatacctagaccaaggcgtgttaaagattgttttttaactggaatggcagcacacttcattataacagaatacgctcaccattacacgtgaacagacctagccggcccagagaatggaaaaacccaggtggcttaaggtgggaacaacctcacactaaactgtctgggggtaaaagccgccttcccatttggaaaattgaaccggccaccccgtgaggggaggggccatgcgcatcggaaaaggcgggtggctttttggtttcccggggggctagttttttttataaaggccacgggcagccggggcatgac

SEQ ID NO: 126522 - DNA, 521 bp, Glycine max
  Clone ID: PAT_MRT3847_85256C.1
cagggacacacgggaggggccacggcgagcaccaaggatagaccccaaaaattcggacacgaaccggaaagggaacaaatttttctaaaacagagccgcttacacaattgcccaaaatatggcagaaacgtggcttgcctgaaaaaaccaggcccgccaaaaaatgaaaaaaaaaaaaaaacccgaagaaaaaattaaaaacccgggggggccaaaaaaacgagccaacccaaataaattggggaccccccaaacccccgttaaaaggaagaaaacctttagggcccaaggaataaaaaaaattgccaacccccggggaaaggcagtttgtaaatttggccccagggggtttttttttttacacaaaaaaaagggcaaaaagttgtgtcccctaaaacgaaaagaccctaaaaaaagggggaaaaaaggggaaccaaacaaaatggagccccaaacaagggaaaaaaaaccctcccaaaaagagcaggaaaaaaaaggggggggaaaaataaaaaaaaaga

SEQ ID NO: 126523 - DNA, 262 bp, Glycine max
  Clone ID: PAT_MRT3847_85257C.1
aaaaaaaaagaccttttaagataacagacatgttgaagttatgataacccaactcaaaaaatttcttctagtaaaatgctacaaagaatagttttaaaatatacattatactttaactaatattgactttttttcattagaaaattaaccttttgtctttcaattcagccgaagaaataaaacgtggattgaactgtacaaaaaaaatcttgtgaagaataaacgtaaaatgatcagtatacatattttttatggtaataat

SEQ ID NO: 126524 - DNA, 410 bp, Glycine max
  Clone ID: PAT_MRT3847_85258C.1
aaaaaaaaaaaattgggaattttatttgtttaaaaaagccccaaatttgtttgggccaaaagcaagggggggggaaaaaaaacaacttaagggggggggaaaaaaacataaaccaaggacaaacctcccaaagaaaaaaagccattcaaaccacaaaaaggcaaaaaagggaaaaaaagaaaaaatggtttaaaaaaaaaactggagggaaaggggaggctcaaacgggaaacgagaaattaatgggagggagaaataaccagggaaaagagaaaaacccccaattaataaatttttaaaccaggggccaaagaaggaaaccccccttttctttaattggaggcaaaaaaattaacataaaacctggggggtcaaaccccaaaggcccaaaaatcctggacccccaaatt

SEQ ID NO: 126525 - DNA, 386 bp, Glycine max
  Clone ID: PAT_MRT3847_85259C.1
caaaaggggaaaggaaagactggcagtgctttaaagccacattggatatgcagtcattttctttacacaaggaagttgaactactgctgtagcttttagccaataccaataccttctgtgcctaagtaaatgaattaatcaaattccagccttgcacgctgttctataggcttgaatattgaaaccaacgtacacacatcaatatctcaagacttgaacagggtcaatactagaaaatatgatgttaagcttggaaatgcgagaccctgcaggtaagatacccggctggactgtaatatccatatataccgcaatgggtctgagcaggagtaagaagaaccaagacaacaggtgtaaccattgagataatgccccacggattactg

SEQ ID NO: 126526 - DNA, 368 bp, Glycine max
  unsure (1)..(368): unsure at all n locations
  Clone ID: PAT_MRT3847_8525C.1
atgactatagctcccaaggatttaatctcttatactgtgtcatacttctaagcactttcactgactctatcaggggctnattataatatacttgagatgaactcttacataaaatcattcccttacgcttaacacatcatcaaacaacacctcaagattgtctacaagcaccacaaaaacactgatttctcctatctcacaaacatcatccatgactgtcctattcagatttatgatgcttcactatatctggactacacaatatgcatctcctcttacaaggaaacagatagaatctttaagatgagaaatttcatgtacatttagaccatcaaataatctatggaaatgcaatatccacatataac

SEQ ID NO: 126527 - DNA, 1996 bp, Glycine max
  Clone ID: PAT_MRT3847_85260C.1
ccaaaggaattaaaataattaacttgagaaaaacaaattgttacataaatataagacaagagcacgtagattctaaccgatgcaaacaggaaaaaatggctctactatcatcagtcctaaagcaattgccgcatgagctaagttcaacccattacctaacagttttcttctgcatcttccttatacttcttaagctaataagaagaaacaagtacaattttcctccatcaccaccaaagttaccaataatcggcaatcttcatcagctaggcacactgccacaccgctccttccaagcactctctcgcaagtatggccctctaatgatgctgcaattaggccaaactccaaccctagtggtctcatcagctgacgtggccagagaaataatcaagacgcatgatgttgttttctccaaccgaccacaacctacggctgctaaaatctttctctataattgcaaggatgttgctttcgcgccctacggcgaagagtggagacagaagaaaaagacatgtaaggttgagcttatgagtctgaagaaggtgcggtcgtttcgttctattcgagaagaagttgtttcagagttggttgaagctataggtgaagcgtgtggtagtgaaagaccatgtgtgaatctgactgagatgctgatggcagcatcgaacgacattgtttctagatgtgtaattggacggaagtgtgatgctacatggggtgatagcgggaattgcagctttgcagcgttgggaagaaagattatgagactattatcggctttctgcgtcggtgatttcttcccttcgttgggttgggttgactatctgactggccttattccggaaatgaaggccacgtttctcgcagttgatgctttccttgacgaggtaattgcagaacacgagagcagtaacaggaagaatgatgacttcatgggaattctccttcaacttcaagagtgtgggaggcttgactttcagctcaaccgagataacctcaaagcaatcctagtggacatgataataggtgggagtgacactacttcaacaactctagaatggacttttgcggagttccttagaaatccaaataccatgaagaaagctcaagaagaggtaagaagagtggtgggaatcaattccaaagcagtactggatgaaaattgtgtgaatcaaatgaactacttgaaatgtgtagtcaaagaaactttgagattacatccaccccttcctcttttgattgctcgagagacatcatcaagtgtaaaactaagagggtacgatattcccgcaaaaacaatggtatttatcaatgcatgggcgatccagagggatcctgaattatgggatgatcctgaagaatttattcccgaaagatttgaaactagccaagttgatcttaatggacaagattttcaattaattccgttcggtattgggagaaggggatgccctgcaatgtcatttggacttgcttcaactgagtatgttcttgctaatcttttgtattggttcaattggaatatgtccgagtctggacgtatattgatgcacaacattgacatgagtgagacaaatggactcactgtcagtaagaaagtaccacttcatcttgaaccagaaccatataaaacatgatcatttcacattatgcatgtttggcaacacctataaagagtatagatctggaagtacttcaatttagtaatggatgtaaaagctatacaataagaagtgctaacaagctaggatatgagcatttatggagtaacgagtgaggttccaaagagtctaattactcgtctcttgaacattgttatatttgttttcttgcagtttgttaatcttttgaatagttgtttcacatttatttttgtgtataatttgttgagctgtggaagatattaataaaattttgtggtgtgttcttaaaaacaaaaaaaaaaaaaaaaaaaaaaaaaaaaaaaaaaaaattttttgcgaccgctctaccccag

SEQ ID NO: 126528 - DNA, 489 bp, Glycine max
  Clone ID: PAT_MRT3847_85261C.1
cgtttcgttctatcgaaaagaggttgttcggaggttggttgaagctgtacgtgaagcatgtggtggtagtgaaagagaaaatcgaccatgtgtgaatctgagtgagatgctgattgcagcttccaacaacattgtttcaagatgtgtaattggacggaagtgtgatgctacagtgggtgatagcgtgaattgcagctttggagaactgggaagaaagattatgagactattctcggctttctgcgtcggtgatttcttcccttcgttgggttgggttgactatctgactggccttattccggaaatgaaggccacgtttcttgcagttgatgctttccttgacgaggtaattgcagaacgcgagagcagtaacaggaagaatgatcactctttcatgggaattctccttcaacttcaagagtgtgggaggcttgactttcagctcagccgagataacctcccccttctgtcgtcttctcgcagccgtaa

SEQ ID NO: 126529 - DNA, 294 bp, Glycine max
  Clone ID: PAT_MRT3847_85262C.1
acgctgacgcgtccgtgcaagcgtccgaatcaactacattcacttcaatttgtgagcgagtaaagggtgcctaattctcttcacattgcaagattaactacatggtgcacgcaccacagatgtgaccggatccaattggactctattctgcaacacaaacacaacgcatcatcatttttcttcaattacttcacttgaggaatctctgatgatgctgaatcagacgatgaaaaccaccacataggtgacacctttactgtgtgttacctcatcaactagtggggattgtcccca

SEQ ID NO: 126530 - DNA, 809 bp, Glycine max
  Clone ID: PAT_MRT3847_85263C.1
tttctctccttcctttctttgtgtacctcttacaatttcttatattattgttattgtaatagtctcccacatagacatcccctgcatagtagtatataaggccaagagattagaggtaccccaatagtccaatacttgttcacttggcaccaaattcaaaggctcatcaaaatcaaataccaattcatttgcgtacccaacatggcctcatggaagaagaccattgccaccccattcaaaaaagcttgcactttctttaaccagcaacccccaagggaccataagaataagtctcaaacagagcaacagaaccggattatggatctgcacggtgaagtcatggcatgtggctatgaagatgttcaagttatgtggtcaatccttgataagtcaaaatccacagcctgcaatataacttcttcatgacacaaaagtgttttttcccttctttcatctaccaagaaaaaaaaaacccatatatattcacaaaaaaaaaggttctacttaagcgatattagcatatgttttagtatgctaatgtttcaagtcatgattgcatcatactagcttgttttggctaggtgactagctttgaaatctggtggtatgaatgtaattctcattgtagaaaatgaaaagagattgacgtgtagctatttgataggtttgaaaatcagtgacccttcttgtttgattatggtggtggcggtttcactctgtaatttttgcaagtaaaggtgttattaacagggaatccccatgattcatgaatggagagattttttttttaaatgtacattgttttcttc

SEQ ID NO: 126531 - DNA, 386 bp, Glycine max
  Clone ID: PAT_MRT3847_85264C.1
cacaggcatcttgcataggcattcaagatagtctggagttttacatgcatgtacgaggatacatctgtatcatgcacctcctgaacttgtgcctatggcgggaacagggaaacattgtttcctgtttctgtttttaaatccttgcaactatattaattttgtgcttattttgatgggatttttttttctttttatgcatctaactctccagccatatcaacctgggtatactgcccccccacctcgtcctaatcctgaagaaactactattgatataggaggtggctggacaatatctggcacacccttagacttgcgtgatcctcgactcttggcaattgcagaagcagaaccgtagttcttggatgctgaatatgatgagtatg

SEQ ID NO: 126532 - DNA, 409 bp, Glycine max
  Clone ID: PAT_MRT3847_85265C.1
gggggggacccaaattttaaaaaaaaaaaaaaaaaaggggtttaaaaaaaatttttttgctacaaggggggggttcctttagggaaaagggggttaaacacaggggaactggaaaggggaacaaaaaattgctttggttggaggcatcctttttggccagggaaaaagttggggggaaaaccccaaactttgggggaaaaaaaaaaaaaaacgggggcaaaaaggttttaaaaagggcccttgccaaggaaaaaagccggaaaaaaaaaaccaaacgggggaaaaatacccaagggaccggttttgagttccttgcccttcaacccagggaaggggtggggggcttcccccaaaccaaggggggcaaaagccccccccggggaaatgggggaaaatcctttacaaaggg

SEQ ID NO: 126533 - DNA, 491 bp, Glycine max
  Clone ID: PAT_MRT3847_85266C.1
taaaatcttgggacaagatttagacagtgaagaataccagaatatttcaaaagttaattttaccctagacgaaagtgatgcagtggtaaatggcaaaatagcagtcattgtttttaagaatgctgtccctgtattatccaaaaaattggctactgtgaaaggttttttaggtattcttgataaatttaaaccgggtttgcgaactccagttaaagtagagatgataaagattttagaagaaaactttcctgataccgaagagttatatgacatcaaagctcattgtgtaatggatcaatattatgcttgtcgttacaaaaatttatctgaagacgatctagaatcatttgcaccagaagaaaagcggattgaattggcagtcaatatttaccgaatgggtattgacaaagttcctacagttaaaatgtggaatttattcataagtttcaatttaagattgttatccaagtctgctgatggagaagaccaag

SEQ ID NO: 126534 - DNA, 194 bp, Glycine max
  Clone ID: PAT_MRT3847_85267C.1
cgacgtcgttgcggtcattgctttcattcgataccgtctgccaccaaacataaactacccgcggattccaaggatgccgtgagggccttgaatggatcaaaacccaccaagattaatggctgaccaactaccgtgattacttcaacggttttcttatggggaggagtgcccgaggaaacataacctacaacgcg

SEQ ID NO: 126535 - DNA, 280 bp, Glycine max
  Clone ID: PAT_MRT3847_85268C.1
acccatacctcactctctctctctgtcttatatagtgtcgaaactttccctccattcaggagtaggggataaacataaacatagtcagaagctatggaaaccaactcattttccaagcttctgtgactagtcttcactgatctgtatgttggtcctgaggtgatccattgcagtggcacctatgataggaaggccattatcatcaatggcgcaaaggagaatccttatttttggctccattctctaccccagaagcacccctgaaaatgtggtaggatct

SEQ ID NO: 126536 - DNA, 406 bp, Glycine max
  Clone ID: PAT_MRT3847_85269C.1
gctgggatcctctagagggccgcccttttttttttttttttaaatctccaaagtaaagtgaatatctcaaataagttagggagtagatattctaaccctgcatgccgtatgtccatttgttaacctaaatgacattcctgtattcagaagaaaatgggtaatatatgttccaccgaagcataggaaaagagactactttcgagtggtgatatatagtacaatcccatggaaggctgcagatcgcagaatattaaaaggaacaaaatcaatagaataggctatttgaacgccatcaaggattgccatcatcataatattggtttgacttcctctctgctaaatacattcattaacatattttaccgcgtccaatttcaattgaccaaatcaatccatctatgcaata

SEQ ID NO: 126537 - DNA, 236 bp, Glycine max
  Clone ID: PAT_MRT3847_8526C.1
gactttcattcatctcttcgttttacacggagcaggtcacgctttttcaaacaaaatagggcttgatgataagctcgtgctggctaacacacaacaattctttgatggaaatcttccagtggattcttggttaccaattcttgagaagcgattttatctctgtcggacaattaccttcataagctgtcgatgcaaatgttacatgtggaattcgacatggtggcttacccaccact

SEQ ID NO: 126538 - DNA, 250 bp, Glycine max
  Clone ID: PAT_MRT3847_85270C.1
atttaataattaaaaaaataatagcattgatgcggcgactcgaacacattggggaaaagataatttattccattctctggcatgccattatttatttgatatcaacgatgtcgctcgaggaggtgcatcagttgctcttatatatattaattatcaatatcaaggtgttatttggacatagcatatggtctcagctggtgcggcggccgacctgtgagctaatgtacccggtaattcattgcgtatattt

SEQ ID NO: 126539 - DNA, 202 bp, Glycine max
  Clone ID: PAT_MRT3847_85271C.1
agaccacaagaaaaacgaaagggggaagggggacaacctaacacagcaagcccacaaataaccaaagacaacaatacccgcactaacccaaccaagcataacatatatggtaactctccgtaacaccagaaccttcattaagaacagtggcacattcaaagcccgagccaccaaaccttgagcagggggctagaaacccgcc

SEQ ID NO: 126540 - DNA, 392 bp, Glycine max
  Clone ID: PAT_MRT3847_85272C.1
caaaagtgaatgaaacgatggctaactatgaataatgttttatttactgataatcatcctatgaaaggggtcaacaatgaggggggggggggcataaaaatctatccttaatcataaacaaaaaatacacgtattttttaataaaagccgtgagcttttatttgtactaatatgatgtgaccgacagttactattatacaaacaaaaaaaataattgtataaacttggaaatcttgcgcttatctttattataataaactgaataagatttgatacaaaaacgtattctattttatatctagttctgtactttacatttaatcgatttcacaataatctttaatgattactgaggctaatgacaaaacatctgctcaatgtttgctattaaa

SEQ ID NO: 126541 - DNA, 279 bp, Glycine max
  unsure (1)..(279): unsure at all n locations
  Clone ID: PAT_MRT3847_85273C.1
ttccttagcctggattctttaaaacctgccgcctttttttttttttttccaaaaatttttagtcttaacccaaaaatccccaacaaggggttggccctggaaccattatttccgaagttcaggtagaattaaaaaatggcccccaccaatttcaaaagaattccaccgatataacctaaaaatcttttttttgnggaggatataacacaaatggctctcctgaaataaaccttccagggcggagcctccaaaaatattctctataattacaggggggat

SEQ ID NO: 126542 - DNA, 1438 bp, Glycine max
  Clone ID: PAT_MRT3847_85274C.1
tattatcatgttataagggaatgaaccacgcatcttttgaaaatatatgaattattcaaaggcgaaaatatatacttgattcttggagacgactctctttagaaaaaaattccagtcctcttaaattatgcattttctaaatttgtatttaaattatttgacacatatagttatattttccttagttctttcggtaaaagtaagagattcaaataaaagcactgactatatataaaaaagtagatattatacgaatacttcgtccacttttatatgtctcaataccaatttaatctaaacatatatgtaattctagactttccacgtttcatttcgttggatgtaagtaacaagagatttaattttttgctacaggttgaatatcaggttgaaccttgcagcaaaggctacaatagtagtgcttgcattgatgtcagaaagacaagcttccctatgcaaactggtggatatgtcatctatggtgttggtcatcagcatgttggtgcaaatgaatcaactctatacggacaggtgatattagaataattatatgaatatacattattgctttctagtcataaaataaaataaaataaaataaaatgaaaacaaaaaatagtactatatatttttcttctatctcatccaatttcttgaatgagatagaaggatagttgttgggaattggatcatcagtgcttcttttactatttttcgattaatcatatctttgaacccttatcattgtaactgaatttgtaagatgtatattataccctgaagaaaaaagattgtgagatgttaactaaatattggactagagcttattgtttgaaattttgacaaaattaatttcaggatgggggagttatttgttcttcaataccaaaatatggaaatggaaacgaagcagggaatgagaaagggtatgttgtaggaatgtctacatgttaccctcgaccaggtactatcaaaataaaagatggtgaaaccctaactctagagattatctacagcaacaaccaaagccacagtggagtaatggggcttttctacatcttggtggctgaacaactgccacaccaacacctcctttgacattattatgtgtcctaagtaaattcatcttggaatggatccaagagactataatattatatgatatctatataagtgaatatgtgttgtgatgaaaaataaagccagctctgagtcttgtaataataggtctagtattaatgtattatactatagtcgcacatctttagatatatatcctgtcaacatattcttcatcacgacgaagaatatatagtaattaatcagattaagaatagctggttcttatctgaaatgtatgattccgtgtgttgattgtactctgtaaatgatatacatagtaagtaaaaataatattaaaagtgctttcaagattaat

SEQ ID NO: 126543 - DNA, 950 bp, Glycine max
  Clone ID: PAT_MRT3847_85275C.1
ggctcgagcagctttccatggcattctctaatagaagagtccattataaaaagacatctcgtgttattcgttgttggaccaaaccaaacccctaagaggccctaactagctaactattttctttctttcttcttcgccgggaaagatgggagtggctttttatttggacaccattttcgtccctttgagtcttttcatcacagtgggttaccatgcctatctttgccacaccatcaagaacaaaccttcacgtacaacttatggaatcagtaagaagagaaggacagattggagtctcaacttaaatcagggtgatgccagcaaagctatgttgacggtgcaaagcttgaggaacactcttatgtccacaatactcacagctactataaccattcttattaacttgggtttggcagctttgaccaacaacacctacaatgctagccatctttttagcagtgaattttttgggtcaaagtcagataaaatctttgttttaaagtatggatcggcatcaatttgtttggtgatgagcttcatgttcagctccatggccataggatatctgattgatgccaattttctgatgaatgcatatggagagtttttgtccgggggttacacacaaactatattagaaagagggttcaccttagctcttgttggtaatagggtgctttgtgttgctgttcctttgatgttatggatgctgggtccagtgctagtacttttagctaccttggtgttggtttttgtgttgcatgagtttgattttgtctgcaaattcccagacaacaataagcaatgtatcataaaatagcctagctaggtacagcaatatatatgtagaggttgagtcgaaaaatcatgttaaagaatgaaaagtatgatcaactttatcttctaaaaaactgaccaataaaaaaacaagcaaaaaaaaaaagggcggc

SEQ ID NO: 126544 - DNA, 251 bp, Glycine max
  Clone ID: PAT_MRT3847_85276C.1
acccttccgtttttttttacatgaaaggtcaactgacccctagggaatttttagatggatttggcatctttgatctcatgaatacaaagtgggacatacaatgcacttgcgctctccaaggagaaggtctttatgagggctgggaccggatgtccacaagcttgaacgatagactagctgatggatactcactaatacaactaggaacgtcatccttgtaactcaaagagatactgatgcaatggacgaat

SEQ ID NO: 126545 - DNA, 109 bp, Glycine max
  Clone ID: PAT_MRT3847_85277C.1
agcctatcctcagtacggtgaactcgttgaaacgaagattatcaacgatcgtgagattggcagattcatgtgttttggataggtgaccttctcctcggatcactccata

SEQ ID NO: 126546 - DNA, 352 bp, Glycine max
  unsure (1)..(352): unsure at all n locations
  Clone ID: PAT_MRT3847_85278C.1
tccatgtacctggactatggtcacatgnttcttctgagaaacttggtcattgggcggggcactcctagtcaaagtttatctggggactctatctccaagcatggggaacttaaccaacctccagattgtgcttctacagaataacancataagtggaccaatcccttcagagctaggcaaacttcctaagcttcaaacgcttggtgtcgctgacaacttcttcaaaggggagattcctccctctcttgggcacctggagaagcctcgaagacctgaggctcaataataacagtcttgttggtgaatgcccagagtcactgggtggcatgacccagcttaagtttcgtgattt

SEQ ID NO: 126547 - DNA, 402 bp, Glycine max
  Clone ID: PAT_MRT3847_85279C.1
cttaagaagaaaaaattttcgcttttgattattaagattcattctgtgatttaaaaaatctttaaccccatccactttggttggtggtccacaaaaggaactttcttattgtgaaagaattagatcagggttaggaagataccaaggggcccggaattcgtggggaattcttccaaaccacaaaatgcggttgggggttttcctttgccctctccttagactttaaactgcaattcacttgaagcaccaagcacagtttggaccctgccccaacctggaacatttgatgaagccctcttgcattgggggaatccctacaaatgggggctaaatttctaacccctttgtcacttgccacatgaaagacccttaaaatttttttggacacaatggccactcctg

SEQ ID NO: 126548 - DNA, 235 bp, Glycine max
  Clone ID: PAT_MRT3847_8527C.1
gtttttttttttttttttttttttttagatgcttttcatgagtgatgagtagttacagagagcagtttaagaattacttgtgcgaaccaaatgacagaaataatcccatataatataatatgggtcaaaaacatggtgtggtaagaaaaaaaattgcgttagagatccaccgagagttggtagccttaaccagaagtgttatcaggaaaatacaactgttccgtccctaggggag

SEQ ID NO: 126549 - DNA, 364 bp, Glycine max
  Clone ID: PAT_MRT3847_85280C.1
gacaccgaagcactcgcgattccagccatagcacagaactctttgcaagacagttgctgaatgacgccacagatagaagcgtcttagttcacgctcatcgctgaaaaacctgaattcttctcttcatctcttcacattcgtttcgatcttcgatatctgaaaatgacagtgtgcatttcaatccacatcggtcatgccggtattcacgtcggaaaaacctgctggtagctctattggctcgaacacggcattcagcctgataggcaaatgctaagtgatacgactgttggtggacgtgatgatgctttgaacatcttcatcagtgaaactgggtctgaatagcacgtgcctcgtgcgatttttg

SEQ ID NO: 126550 - DNA, 174 bp, Glycine max
  Clone ID: PAT_MRT3847_85281C.1
attggtcaatgtgtctcttggaatcaaaggtgtgccagggaattctacttttccaaggttacgttttgtttctttcaaagggtgaaaagcctgaaaattgcatttttccaaaatctggggtcttgcttaatacctggtgcctgggttttctatctgctaagtatctccttgttc

SEQ ID NO: 126551 - DNA, 621 bp, Glycine max
  unsure (1)..(621): unsure at all n locations
  Clone ID: PAT_MRT3847_85282C.1
cccacgcgtccgtggaattggaagaagcagaagatgaagaatggtatactactagtagtaaatactcgttcaaaaataatgctggaaatggttgtaaggtgaggaggtggttgctcaaaaggggactctgtctgggaaggaagatcttagtggctggcttcttagcttctgctgccccggtggttgttccacctcttgtggttgcttctgctgttggcattgttgtttctatgccttgtgctattttcttggctagccatgcttgcactcagagtttaatgagtaagttgctccctaggcctactcctcaggatactttgttgcgtgaagagatgtgttttcagccaggcaatgatgttatacacacatatgaagaggaacaagtccttgtatatgaaataaagagagacattgaaatggttggtgttcaatgtttgaagaatggggaaaatatgacatcagggagtgagtgtggtccacaagaagaagatgccaccgatggaatagaaggacactcaagaggagaaactaatggggtgcaagtgccactaataagtggngataaaaatgtagctgtgacaatgatttgaagaatttaagactccctttgatagtacaact

SEQ ID NO: 126552 - DNA, 203 bp, Glycine max
  Clone ID: PAT_MRT3847_85283C.1
accaatgccatttggagagactttttattaaaagtcatactgctaattgctaactcagggccaaaatggtaaaataaagaatgagccactgcaccacttatgaaggtccttggggcttgtagtcaatatcaaaattacaattttggcactgagttaccaatttggagagacttttttatttaaaagtacatactggtaattgc

SEQ ID NO: 126553 - DNA, 253 bp, Glycine max
  Clone ID: PAT_MRT3847_85284C.1
tgttttttttatataaaaagggtttttcgctttccttacacaaaaagactattcttccgagttgtttcctgaatggatgccattcccaattccaatgacaacaagcgtcgcgccaacgacgaccagctcgacctaaatgactccgcattcagccacctactcaattccatcatggaggctaaccatttccgacaccaagccaaaccattgcaactcgactcctccccgaccaagagagttcgccgggacctcc

SEQ ID NO: 126554 - DNA, 676 bp, Glycine max
  Clone ID: PAT_MRT3847_85285C.1
tgccactactgctgccgcaacttccccacctcccaagccctcggcggccaccagaacgcccacaaacgcgaacgccagcacgccaaacgcgcgcacctccagtccacgatggtgcagggcagcaccttctccgacgcgcaccatgtctacaatctcatgaactaccgctacggttcttccattccaacaccaccaccaccaacaatgccttatccaacatggaacaacaacaacaacaacacgcgcttctacggaacaacaacaacgacgtcgttttctcaccaccaccaacaccaacaacaacctattaacggaagccccttagcattttggcgaattcctaatggcaccaccattaataataataaccctagtttcagccacgagcgttcttcgacgttgccgcctttgttcgcgactgaggaaatagcgaacgtgagagcctcctcgcaggttgttgtcggagcctcggggccgatgacgacgcaaaaccgctacgtgtatgactcgaaacaacgcgaccatgtgagtttggatcttcatctgtaatagtagtaacatgtttcatgttttcgtacatagtattatcatgagccagtaataacaactctattatgatgatgatgatggcatggcgctacgagagaatcgagggatttgcaggcagcgactcttt

SEQ ID NO: 126555 - DNA, 487 bp, Glycine max
  Clone ID: PAT_MRT3847_85286C.1
ctttttcttttttttcttttcttttacatacgggacaccattctcttgggggcgggttttattttaaaggcctaacaattacatttaaactataaaaatccctgatttatgatgacctgtgtgacactaatctttcttattggcctgcccaaactcaaaaacatttatggtcaccaacttcttcaaatacatcgccaaagctaaattaaaagaatttaaccagtcagtatcaacatcgatatcccattttcataaaaaacggggggttctttacatggctggtttgccacatctaatttttgcacatattccttcattccatgacatccctgatgatactttacttccacacaactttgacttacccttccaaaagagtaccaaagtccctccttactttaagccctaaaaaaaatgttattttcaatcatttacggtgacttaccattctttcaatacacttcaagccttttttttttttttttaa

SEQ ID NO: 126556 - DNA, 405 bp, Glycine max
  Clone ID: PAT_MRT3847_85287C.1
cacacacattcctttactgaacgaaccctatttatttataagaaccatcctttcgaacacgggcgggggatctaaaaattaaagccgggtgacaaaaaaatattctttaaagtcactcgcattgcaacaagaagtctaaagaaatcacctttttattccccactacattaatttccagatatattcccttaaggctggtcagaaaattgctattatgcccgtttcaacacttaatcccaacagtactccagacactatgtattatacccagatcactttacaattactttacaacaatttttaatatgtcatgtctgggaagctctacatgataacacaaggttcaaggcctgaaaaagccgacattaattatttattttgtgggcttttgatgatgcttaacgg

SEQ ID NO: 126557 - DNA, 637 bp, Glycine max
  unsure (1)..(637): unsure at all n locations
  Clone ID: PAT_MRT3847_85288C.1
cccgcgtccggaaacggcagacacagcacagtgagctcggaatcgtgggtgagctgaagaatcaggtaaagactttcttcctcacactcacattcccaaatgtctcttattattttcgcaacttcaactttttttcagtttttgtttcgattttattttggtttcggatgtcaaatgttttgctgtttctgttgtgcggatcagagtgtttgttaccttaaagagacatcgattatttaatttctttatgaaactgacgcggtgggattgggtgttgtgtttaactcagaattaggatttactaggtttctgtttctgtttctgggaatactctcttgttgtgaatgcacaattacctaacctagtaactatttatgggcatggatttagttcctaatgccatgctttattttattttatgctgaattcaatcccctttagtgaactacttttggaattggtattacatcttgttgttattggaactagatctccatgtaaatcatatgcaaaacaatctatttttataaaacacactanttgtgttctcacttgcaagattatagattactttggataaaacaagttatagtattaggaaagaagcagatttaatatattataaaggtatctatct

SEQ ID NO: 126558 - DNA, 240 bp, Glycine max
  Clone ID: PAT_MRT3847_85289C.1
gctacttacttaacatacagagatatgcatgatgctatgcgccgtacatgtaccttggctctatggtgctcaccatactatagtgacagacagggcaggggaagacctaagttccagactcgtatcaaggatgctaacaatgggtcatggatttgctggtgccatggatgatacttattgctatataaggatgctgataacagggaacttactgcttatgagtttcgtgaatagctgaaa

SEQ ID NO: 126559 - DNA, 393 bp, Glycine max
  Clone ID: PAT_MRT3847_8528C.1
agggaccattgtttgatgacatgcaacctttgtttgaccacttcgaggtacttggcaccctttgttgcacaatatgtgaagtttcgagacatgccagaaatcaaaaggaagcattgttacgccatctgtgaaattccgtaacatgccggaaatcaaaaggaagtattgttacgcaatccgtgagtttccgtaacattccgaaagctaaaaaaggagtaattacatgacccgtaaggttccgtgaccttatggaaagaaaacaagtatcgttacgaaattcgtaaagtttcgtaacgatacggaaaaagaatcacctaaaaaagcaaagggggtgtatttagtaaaaaaaaaggtgcaaatagcaaccaggcccacttgggccttccaggatgt

SEQ ID NO: 126560 - DNA, 182 bp, Glycine max
  Clone ID: PAT_MRT3847_85290C.1
gtggaccgaggacagtgcatcctttctttaatatcaaacaatagtaataaatttgacaagttaggtccatgtttccctgcatgaaaaggactaggatgcatgatattaaaatatatttgttatgaggatccttttttttttgtctttaaagataacttaaaagcatgtgctatgaaatagtt

SEQ ID NO: 126561 - DNA, 337 bp, Glycine max
  Clone ID: PAT_MRT3847_85291C.1
gatttccgggtccgaccacacccttccgccccttttggggctgctgtttcaatttttaggttggacccttttttgaaggtttgaggggcttttttttaacaaaggtccttaaaaatgaaatggttttgctaaatcctccacctgggttggggatgggaaaccccaacctctgccttttggttctgcccccaaactcttcctcaatgaatgttaatggccagggatgcttaaacttaccacctgtttttagccactttcaacctgtggtggtgtgcggaacctgccaaactgttttgtcccaaccatcaggggtccgtgcaaggttaaccgaaggtgg

SEQ ID NO: 126562 - DNA, 341 bp, Glycine max
  unsure (1)..(341): unsure at all n locations
  Clone ID: PAT_MRT3847_85292C.1
nnaccagaggagggncngcccatttccannncaacnnngcgaanncncaanggncncggggcncaaacaacgtttttaggaaacacaaatttttttttgggggaggattgctcacattaaacgcgngtggtttttagattgaaagagttgttgaccaggagctntgttagtacaggatttccaaatcggnttgtnctttgaagattaatcaatattgggggagtnatagtttgtncgttaaaggtntcatnngaaattncagccactgaatgcctncaaattttctagttttggattggggacttggaaaatggggaagggnggnaaactcaaattntntt

SEQ ID NO: 126563 - DNA, 364 bp, Glycine max
  Clone ID: PAT_MRT3847_85293C.1
tcactatagcagagccgtgacgtgcactcctcccttacctcagcttggggttcgagtagagtgactcaccatttaaccgcttactgaagcaatcatttcgtgatttcaagaatgtctcaatggcgccctacttctgtgtagccaactgctggagggaaagaaaatgactctatgtgctgaacacagagttcgcatatcatgtggtgttgcactcctagtttattcgctgaacactgtcctctttcttataggactttgtgtcagattgcaacattggctgtttctttatcagctctccgtgtaccttcaaggtcaagccgaggagatttagaattcatgctcccactctcctacatgagcttgg

SEQ ID NO: 126564 - DNA, 427 bp, Glycine max
  Clone ID: PAT_MRT3847_85294C.1
gatttggacatgcatgcatgcgccggtgggcctcccctcacatacctctgctcacttatggtcggcgagtgggacgataccatgcggagaggactatcgcactgtgatgtatccgcctgtgtaaccggggtgacaccggcagaatgtggatacggagaccatctatatgagtgctgttcactaacgacaagacgaactgactgacgcaggagcgcggagcgtcacccctaatgagaaaacaagatcgtctctaccaaagtcgggcaagaatgaagctcatttcggacatgagactgcgaggctggacgactccagtggtttccatgcgctccaggggaagaatgcaattcttccaagtgagaggactgctatggcaggactattgagtttggccgtgtatggatgaatccacacagaacatggtgct

SEQ ID NO: 126565 - DNA, 473 bp, Glycine max
  Clone ID: PAT_MRT3847_85295C.1
gtgagatgtgtggtgggggcggtagaaaggcttttctgccattttcgatttttaaatgatgaggggcctagaatagcaaaggatcggcggtggttgcctagcttgcctgagtgctgttttagctttggggtggtttgatgtttgtattgctatgaggattccagttgatgagggaggccaggcattgtaagttgaccagccaggtgctggtgaactatgatttggaaatctttacgctgcgttgtttaggcagtggcattagactgcttttacaggtaggaagcagacattcccagttgtcacgtgtccagggtccacagctaagaaataggcagaattcgagcccaggcagtcttgaccagagcatccgttgtacagcggttatgccatggatcatgggtcagcctggttttctgagagcatgttttgggaccagtgaaggtccagaggactttctggaaaccgttgggcta

SEQ ID NO: 126566 - DNA, 1213 bp, Glycine max
  Clone ID: PAT_MRT3847_85296C.1
gtggatttgcggcagtttcctcgcttggttcgggtgatttcttatttgtgttttggtcatgcgcttcccttctgcttagcattcttgtgctgtgggtaggcttcctaatggacgacgtatagctgtgaaaagattatcgacaaattcatcacaaggttcggttgaattcaaaaatgagattttatcaatagcaaaactacagcatagaaatcttgtggagttaataggtttttgtctagaagtgcaagagaagattcttatttatgagtacatgtccaacgggagccttgataactttttatttggtttgattcttgactttaaactcttgaataatatcaaattgatgattaatgtattttgcattcttttcaatacattatatctttacaaatatatgtttcgttctatcttaattcatttaacctaatattgcagatcctcaacaaaagaagttgagctggtcacagcgttataaaattatagaaggaactgcacgaggaattctttatttacatgaacattctcgccttaaagttatacatcgtgatcttaaaccaagtaatattctattagatgaaaatatgaatcctaagatatcagattttggtatggctagaattattgaactaaatcaggatcttgggaaaactcaaagaatcgttggaacatttggttatatgtctccagaatatgcaatatttggacaattttctgaaaaatctgatgtttttagtttcggagttatgattatagagattatcacggggagaaagaatataaattctcaccaattgcccgatattgtagatagcctcatgagttatgtttggcgacaatggaaggatcaagcaccactgagcatattggacccaaatttggaagaaaattattctcaatttgaagtcattaagtgcattcatattggtttactatgcgttcaagaaaataaaaatattaggcctactatgacaaaagttattttttatctcgatggtcacacacttgatgagttgccatctccacaagaaccaccatttttctttcgagatataaaggataaaaaaatacctatgcaacatttttctgtaaataagatgtctacaagtatattttatcctcgataataagttaattctattttgtagcattatttacttgtgtttctaatgattgaactctcatttatagttatgcttatggttatcaaaaa

SEQ ID NO: 126567 - DNA, 357 bp, Glycine max
  Clone ID: PAT_MRT3847_85297C.1
gggaggaaaccggcccaaaaggaattcaaattgtacaggaaataccatgcccccaaagggcccaccctaaaaaagtgttccctaaaaacaggggggcggaaaataagggggcaagaaaacacgggcagctttttaaaaaaaaacagggtaaaacagatggaagggaaaaaacaaaacataactggggcttaaggttttggcaaaaaggccttcaaagccacctttttttttttgggggcatgccccaaaacttttgcttcacacagtgggggagggggggggcccccccattttgtatcccccccttttgggggttggatgaacctttaccaacgggggttatcttggggaatcccc

SEQ ID NO: 126568 - DNA, 891 bp, Glycine max
  Clone ID: PAT_MRT3847_85298C.1
gtctcgaggctctttgtgcttataactattaaataaggagtttgatgacaggttcccagcccgggtcttggggtcgtttcgctttggctcctccaacgaaattatgtcaaagaatattcctccgtctcgaaaagaggcagcattcccgccccaaccactgatggagattccttctcagtttaaggcagcaatagaggcttaatctcttgggtggtcgaaatgcaaatgctcctcagagagttgctctcccaacaccatcatatggttcagcatctatgggcatttcaaaaccttatggttcagcatcttttggcgcttcaaaaccctatggttcagcatcctttgatgccccaaaaccttatggttcagcatcttttagcagttcaaaaccttctcatgctgctagctttgagcagagtgccccttcttattatgacaacacggaccctgttggcacagctcctcctgccccaagttcctcatatgacaatcagctttgccccatatgtctgaccaattcaaaagacatggccttcggatgtggacatcagacatgttgtgaatgtggacaagatcttcagtcgtgtcccatctgtagaagccccattaacaccagaattaagctttactaggcggcctcttccgttgtgaattaattattttgttgtgtaagctaaaattctttgattttttttaatttttatcttctctggttgtatacaaacgttagatcagctctgtttctattgatgaaaaatggtacaacaaaaaaaatatccaaaccaattaaattatttggttttatttggtttggacttgtaaaaaaattcttcaaaccccaaccgaacaaatgtgaacaagaatttgtttggtttgtttcttgggttgtcc

SEQ ID NO: 126569 - DNA, 338 bp, Glycine max
  unsure (1)..(338): unsure at all n locations
  Clone ID: PAT_MRT3847_85299C.1
cgtaacctccgagctctgcaccgaagaacgaagccatggggaagacacatggaatgggatctgctcgcaagctcaagtcccaccgcaagaggcaaaggtgggctgacaagtcatacaagaaatcacatcttggaaatgaatggaagaaaccttttgctggttcatcccatgccaaaggaattgtccttaaaaagataagtattgaagctaancagcccaactctaccattcataantataccaaagttcaacttatcaagaatgggaagaagattaccacttttatccctaataacaattacttaaactacattaaagaaaataacgaagtcttaatt

SEQ ID NO: 126570 - DNA, 168 bp, Glycine max
  Clone ID: PAT_MRT3847_8529C.1
aaaaagacaaaaagcattgctatcaaaggaggaaaggccgatagggcatgccagggaaaaaaacctttaacataacccgaaatcattatacaacgcaatacttaaaaataaaaaaataagcagcctctcacttcccttggacataaacaaattcacccttattttaaa

SEQ ID NO: 126571 - DNA, 293 bp, Glycine max
  Clone ID: PAT_MRT3847_852C.1
cattattactaatcacaccctgatttttcttataagaattgttcatctcctgattccttttcttattgattctatatttgaacatgtgtgggattatctctataacaaataaaaaactagaacgtgtatctggaacgtattccaatagaggaagttgtttgtgtcatttgatatgttcaatagcaagtttaacattataggatggggccaatcttgtacaagtatttggaccaaacaaattggatgagaaatatagattgcaagttttttgagttatagggcattatgtggaa

SEQ ID NO: 126572 - DNA, 436 bp, Glycine max
  unsure (1)..(436): unsure at all n locations
  Clone ID: PAT_MRT3847_85300C.1
ggcctattcggacaatttttttaattttaaggaagaaccaaaaaaaaaaaaatttttaatcccataaaaaaaaagacaccttccccaactcaaaaagaaaactgggattaacccactttcaaacatggaaatccagcaccccggcaggaacaggggcttaaaccaatttccctctttaaaacaaaggaaagccttttcacctttttcgccatggccaaaccccccccctcttctggacacggggggggcttttcccccgctaagttaacactctgaactgaattgctgttnggggatatatgggaacctttggggggaaataaaaaacaccccccccatggggaatataaaaagaaaaagcacccccgccagctagggaaaaatcaattttttttggcgcagaaatcccggaaaaactgccccggacagcaaaacc

SEQ ID NO: 126573 - DNA, 401 bp, Glycine max
  Clone ID: PAT_MRT3847_85301C.1
cttgcacattgacaacctttattttttctttattatatcaccttggcttactcttgagcggaagccttgttagctctgggtactctgaccttgacagcgttctttcgttgcttgttgttaagtcgttgagccttcttggaagagtgcttggggggctttcgctcagccttcttgatggagggatcagctcggatagcagcatgagccttcttgtagagagcctcgagtccttcagccttaactccagccttgacgtatcgggagaagaccttggagaacttctcgttgtcttgctcagccaaaagcttcatgtaatcagcaacgtgtcctccgaagatgtactttctaaggacatcggcgttgagcttgttagcctcatcgtcgtatccaacgtatcttcg

SEQ ID NO: 126574 - DNA, 258 bp, Glycine max
  Clone ID: PAT_MRT3847_85302C.1
tcgtgagggcagcggagctcatgctcgagcagcctatctatctcctcgtgatgactcgtgctttggataaatgatagaaattctcatgctctcggtgctgatgaagacttggagtctggcaatgtgtatacgttctatcgagatgaggagagtgaacgtcgttggcatcttcaccgatatagctgtactcgttttggccgcgagatccaccgcgatgagattgtctggtggaaatgcacgtgttctccttgacaactg

SEQ ID NO: 126575 - DNA, 309 bp, Glycine max
  unsure (1)..(309): unsure at all n locations
  Clone ID: PAT_MRT3847_85303C.1
cggccccccttttctggggggctgttttatctctcgcgaacccnngaggctcctgtggcactctttgcgttgctcaaaccccttcactgcctttttcctttctttttgcgggccccccccctgggcgggcccccttccctcccttttttttttggcgcggcncctttgttgctgggcgggcgcctttttcctcttgctccccggtttggctcgcggcgcctggtgctcctcttcttgctcgcgtgctctggccccgtggtgcggctctccctttccctcgcctcgctgggcccgccggcccctgggtgc

SEQ ID NO: 126576 - DNA, 265 bp, Glycine max
  Clone ID: PAT_MRT3847_85304C.1
ccaaaacacgggggggtctttcaaaaaaacaaagttaaatccccttcccggttgcaaaggtttgaccaaatacacggaattacaaaaattgacaaaaaaggaacactaggaaaacaaaaagcaaaattccaaacgattatccggggaaaagtcaacccacaataatacttatcaacaaaaaattcggttgttgtacccaaaataccgattccaaaccccactagtcccttcaaacaacaccaacttcgattgatcagtaccggta

SEQ ID NO: 126577 - DNA, 216 bp, Glycine max
  unsure (1)..(216): unsure at all n locations
  Clone ID: PAT_MRT3847_85305C.1
cggaanaaccgggtcgacccacgcgtacgtacctacatgcgaacacactacataaggaaaaatacgacactaaaaaaaaaacatacaatgggcggaaattcatactgtgttgactttcccataataacttcactttcaaaaaacctggtggtttttaacttccacaacatgaacatgatctaaacttcttctacagaagatgatcacaatcatatt

SEQ ID NO: 126578 - DNA, 343 bp, Glycine max
  Clone ID: PAT_MRT3847_85306C.1
cccaaggataccataaaatttttcataaagataataaaattcaagtttgatagacttctacacactcaaaactttcatgataatagaaatggaaaacccctgggccggctttaatagcacagggaaaaccaaggctttctctcttaacctctaattgatcttccatctccctaaagaaacaaataaattaaaacaaaccaccccccccaggaactagttttttcctgagatctcacaaaactgtaaagcttttttaagcaatgacccaaaacttggaatttttttggatagaacccattcctatgtaggtgcaaaatctataccccaggtttattgggggggt

SEQ ID NO: 126579 - DNA, 444 bp, Glycine max
  Clone ID: PAT_MRT3847_85307C.1
tggatccactcgaatctcattctttcagactttgtctctcttacaggctgtgcctacttacaactactcttaattaattcgtgctgtgcactaccacctgtttgttcgttttctttcaacgaaaataaaaattaacccctacaaaaacgaagtcaaccccaccctctaattatccccattttcgccgatatgcgttccactctcatcattgcctctttggcacttactgtgctcgctgctccagtgccgactccagttccggtagctgagcaagcgccttcacgccgagacctctctgacaacaccgccccggttgaggcctttattgaaaagcgattccggagaacaggagatggtaccttaatagactctcgaagcattcacatcgaccacaatgctcgctcttgagagaatgaggatgatttcgaggtcgagaagcgtttt

SEQ ID NO: 126580 - DNA, 269 bp, Glycine max
  Clone ID: PAT_MRT3847_85308C.1
tgataatttgaggtcgtacgtctgaattctcactggatatcttggatgatagagtcagagtgcgagcatcttatcatgacctgctctgatgctctagtattcctgataacgggtgtcttctatgtctgaaatccggttactcgcgagtacaggttgcttcccaagagtagggacaggcatgttactcgatttcacccggattgcgaggctaccttagttagtgtcgcctatgattcagcatatcggaagttcagtgttgtactagcggg

SEQ ID NO: 126581 - DNA, 604 bp, Glycine max
  Clone ID: PAT_MRT3847_85309C.1
gcaatcacacacacacccaatcgacaaatgtaaggaggcgatgcagtggttgtaccaaacagtggcatggcataggataacgaagaaatgaatgggttttgtgtctatgagagtggttctaatcttcaccggcgttttatgcatgggcatgggtttgatactcacactctctttcctctggccttggctcctgagccaggcctcctcacgtgtggtccttcctgcttacgtgctctaactcccccttacctctacttctttttcaactctatcatgctaaccatggtagccttcctcctagctcatataccaccacctctgtacgggcggttactaccaggactcctattcttccaccattttgtgtactaccctctattgctgcactcttcactatcttgattgggatactctctacgtctgtgcccatgcctgactgactacgactgcgatacttcctgtaaatatctatgccctacgtaaccgactatcaactacgacacctttactgattgtaacgggtatcacgattactgctaccacgataacacgtcggagcaagcgacggacatcaacgatctacaagccgttggctgttctttct

SEQ ID NO: 126582 - DNA, 413 bp, Glycine max
  Clone ID: PAT_MRT3847_8530C.1
taaaattttatgcattttttctttcaattaaatatttaaccatgatatgctctaacagcatgtgcttcatacccttgcaatttttaaaaatgaatagatcctaaaccatgtacatataggctcaataagaaatgaacgctatttggcatgttttttgcaattgccaacttcacattcccggcggataaaagtttaaagtcttatatccacgattctgaataatgagctatggattctgccttccattcccaacatgtagaccgaagtgtatttttttgccttgaaaagatagaagggctcttctattgtaatgcaatattccaatggcagaatctatcatcaccttaagactatcgtgagactggcggaagaggatcaattgaaggaccatgctttcatataagacaaccaaa

SEQ ID NO: 126583 - DNA, 251 bp, Glycine max
  Clone ID: PAT_MRT3847_85310C.1
cctgcatcaacaccaatccagatgaatgattgatcacatgtcactttagatgaaactaagactctagttgtttggaatacttcatgcctgtcctttgggctttaggagtagtgtgcagaggttttggagataagaatgaagataagattttatgcagatttcctatgtttgcatagtagagtgttaggatttctaaatcagtttgtgtgaatgcaatgcttatggtagaggattttctttttggcttctct

SEQ ID NO: 126584 - DNA, 450 bp, Glycine max
  Clone ID: PAT_MRT3847_85311C.1
aattcggctcgagcaaaggtaacacagctgaaagccacaggttcttcagccagctttgttgaacagtatgcaacagcctctgcaacagtgaggaagatcttgtcctcaccaagcaaagtagcaaagtttgatgtgtggagcttgtctattactattgggccagggtttgccagaacaagctggtcaaagaggtgctttggtatagagaggaaaaagagaaagcatactccatgatgggctgatgacagcactgaatgaatcacagagataacatcagttttctttgtgaacttttcaatcccaaggaagcccttgagctgttgaagggtaattgtgatggcagctccccccataaaaccaacaattgcagcatgagaaaggaaatctatcaaaaatcctaacctgatcaaaagatccacccagccagaatgtcatcaaggtgtattaaaa

SEQ ID NO: 126585 - DNA, 876 bp, Glycine max
  Clone ID: PAT_MRT3847_85312C.1
tcttcctctatataaaccctaccctcaccttcaatttgattttctctcgtcaaatttatccattcaccacagagtttcttcaatggcccagcctcaaccagagtcccacgccaccaatggctcacacgagccattgctcaaaatcccaaagctccaccaaaacggcgacgtttccgcaaccgctccctttctccgcgtcaagaagctctccgacaaggccgttttgccctctagggcttcccctctctccgccggttacgatctctctagcgcggtggagacgaaggtcccggcgagagggaaggctctggtggccactgacatcagcatcgcgattccagagggcacatatgctcgcgttgcgccgcgttcggggttggcgtggaagcactcgatcgacgtgggtgcgggggtgatagatgcggattacaggggtccggttggggttatacttttcaaccattcggacacggattttgaggtgaaggttggggacagggttgcgcaacttatcattgagaagattgtgacaccgaatgttgttacagaggtcgaggatttggatgagactgttagaggtgaaggtgggtttggatccaccggtgtttgattttgttctgttctcttggtaattttgtaaagcagttggtgggtgtaatcgaatgaagaacctgtctttatcttttggcttgtaagtgttctgtgtgtgtccaagttatgatggtattgatttggtcatcggggaatgccagtaggtattaggtaaatgctttcaaagctagaaaactttattgaacaagataattaattttattattgtcttaaacatgttgttcagtaagattgtgtatcttattataagaaaattgtgtgtga

SEQ ID NO: 126586 - DNA, 365 bp, Glycine max
  Clone ID: PAT_MRT3847_85313C.1
aaaagagctaatcagaataaaaaatccctaccaatgccgccgatggtgaggaagcgaaagggagcacccaaatgttctctatccaccgagccagctggtaggcatcaacaaccaaaacccgaatttccccctcacgaattctaacatatcgcacaggaagttgaggatgaagatgtagaggaagaggtcgaataggaagatcaagaagaagaggtggacgaggaaaaacaggaggaggaagaagaacacaaagacgaaaacgacgtcgtctaacagcagcagcagcatacagcatgacgaagacgacttcccgatatcaatacttctagaaccgttaggctaggaccagcttgtgaaccttcttt

SEQ ID NO: 126587 - DNA, 451 bp, Glycine max
  unsure (1)..(451): unsure at all n locations
  Clone ID: PAT_MRT3847_85314C.1
tgttgaaaaacaaaaatacttaanacatgctccttgttaccactaaacttatatgaggacatgaaaaacaacgtattggctacaaacaaggcttgtggcgttaaaaactgacctacaaattcttattggagatgttattgcttccaattcatctcacctttactttttccatgtgtggaataactattgactactaccacacatgtatttgctgtattatcacattcttcaccctactgaaaaatattacccattacctactgaattgactgagtcaacattctacttatatcaacctactaacagtctgatacttcttatatctttttaactcatttcatattttgaaatattgatccacttcttctaaaatagcctactcttaaaaagatttgtgcacatgtaaatatttcattcaattattaaaatggtctcaaactctaaatttaac

SEQ ID NO: 126588 - DNA, 173 bp, Glycine max
  Clone ID: PAT_MRT3847_85315C.1
ggttctctgcagaatgcataaataaaagggggacaaaccctgtttacattgcaaccacaatgcccagaatgcaatggtgcgcacgcccatagtcaaagaacaataggaacttaatttttttgttacaatcgacaaaataccaacttgccggagaggactctacactgcctccc

SEQ ID NO: 126589 - DNA, 417 bp, Glycine max
  Clone ID: PAT_MRT3847_85316C.1
tgaagatgaagaacaggtggaaattgagaatttgaatgctagggtcagtgatgttgatgataaaggggacaatcagactaaactggctggaaccgctggtcgatctggtcaagaagctttaaaatccggggcttcttaacatgccagggatgatgaccttgtcgagaggtcttcaaccattgcacctgggtatgtacccaaggaacttgatgaaagaattggtcttgagcttccggcattaatgggcccaccacttaagggcataccgggaaccttttaagtaacccataggaggattaattttataggtgattaccgggagacccggaccacaatggatgggttccatttcagtggtgagaccgggaaacaagaaaaagaacggagctggctaatggcatctcttcattaaaatta

SEQ ID NO: 126590 - DNA, 572 bp, Glycine max
  unsure (1)..(572): unsure at all n locations
  Clone ID: PAT_MRT3847_85317C.1
agggtcaaatggaaaacagtgtgtctaccaaaagataaaggtggccttggcataaatgacctcaagaccttcaacacagcattgctaggaaatggtgatgggatctttttcagcagcatggggaaccgtgggctaggatattacactctaagtatggtggatggaggacattggaagaaggaagaagaggtagctatgaatcctcatggtggaaggacctgctcataactcaccaatagcagctaaacaacacacttgaaaaggaaacagcctggagggtgggacgtggtgacaagtttaggttttgggagcactgttggataggcaatgatacaccattaatggtaaaatattcaagactgtatcagatttcatgccaacaacaacaaatcattatgcagatggggagcaacacaagtgctgaatgggaatggaagttcaactggaggagacctttatttgacaagtgaaatgcaatggctgatggctttcttggtgagatagcacagagagaaatccacctcacaagggaagataattgggtttggaaacctaatncaagcggatcctac

SEQ ID NO: 126591 - DNA, 1078 bp, Glycine max
  Clone ID: PAT_MRT3847_85318C.1
gggcttttttttttcatatatcaggttactttttgaattgtgaagttgtagtttgtaatactattatgtaagttggtatgaatatgaaataaacaaacatttctccaaaagaaaatgttaccaaacacgtgttcaagttccctaaatacgtaacgtaaaaaaaaaaggttccctaaatacgtagtatttgggtttgatgtgtatgaaaaaaaaaaattattgatagctgaaggcggtgtcggaggagaaccctaacgagactgtgaaaagggaaacggtggatctcggaaacggaagcgacgtcgtttacattcagaggttaataccctccgatcaatcatggaaatggttccattatctcgacaaacacatcccatggaccagacccaccattcgcgtcttcggaaaatctttccttcagcctcgagacacatgttatgttgcaactccaggattgactgagttgacttacagcggatatcagccgcatgcatattcttgggatgattatccaccacttaaagacatgctggatgctgtccataaagctctccctgggagtagttttaatagcttactcttaaataggtacaatggtggtaatgactatgttggttggcattctgatgatgagaagctttatggaccaacgcctgaaattgcgtctctaacttttggatgtgaccgcgactttgttttgaagaagaagccatgtaaaaaatcctgtgatggaagtgatgaacctgccagcaagagattgaagaagggtagccatgatgctgatcagcatacatttagacttaggcatggatcccttttggtgatgagaggctatacccaaagagattggattcactctgtgcctaagcgtgcaaaagctgaagctacacgcattaaccttacctttaggagggttttttgattggcttgagaccaaagcaagtttgtggtaaatctacttctggcattctagaaggtatctgtttttttttctttcttttttttgtgacagattgatatgaaaattataatttcgcaatgagtaatatgatagtatgtctcgattttataacaccac

SEQ ID NO: 126592 - DNA, 352 bp, Glycine max
  Clone ID: PAT_MRT3847_85319C.1
aaaaaagatacaccgaatatggtgcaagaaccttcctcaaaggggatgaagaatccacaataacttacaaattaagcttgtataagacataaaaaaacaatttatttacattgttaatttataagaaagaattatacactaaataagtaattcgtgtttagtaattaaagcaccgatgatctgaatccacaatctgctcattatttgacagccacatcatcatcattttcaatatcccaactaagatcctcattttggtctgccacactcaaccttttccgcaaatcaattctacttgcggacccaacaccatcccctttactctaataattgctttcaatatcttcaattt

SEQ ID NO: 126593 - DNA, 395 bp, Glycine max
  Clone ID: PAT_MRT3847_8531C.1
tttttgttttttgcttttttttttttttttttttttttttgaacggccaaaactctgggcacaactttattaagttgaaaataaaaaccaggaatccacgcctccaaaatatggaagctctttctttgcccagtttttcgatagttgataccatagcaacggtccattcccccgtcgcttgaaaattcccgaattttttttcctccccgtttgattctgcgtcgccttgggttccctctaaatctgggcaattctccacaaggaaaagttcaaaaaaaattgggcccccttgcgttgaaccgtacgttcaattttccttccctcgaccgatccctaagcccctgcaaatagagctcaaaatgcattgtattgtgttgcaatggctccccttttta

SEQ ID NO: 126594 - DNA, 283 bp, Glycine max
  Clone ID: PAT_MRT3847_85320C.1
gggtataccagtagtaccttgttacccagtcttagacctagttcgaatggcaacacccaagtttccatattaatgccattcataggccagaaggtgaagaggatctcgccccttcgctatggacagaggctactaactgtatttgggcgtgtttgctgcaaacacaatgggtgactattctgtctcgtgcgaccgcaagcattaatgtcacagcctggggtgcctatgagaaggttcacggcactaggaagggcatgatttgagtgccactgtttactggagt

SEQ ID NO: 126595 - DNA, 1220 bp, Glycine max
  unsure (1)..(1220): unsure at all n locations
  Clone ID: PAT_MRT3847_85321C.1
aattcggcaccagaaaaagacaccaaaaaaaaaaaaaaaaggaaaagctagatccttcagtccatgagaaatcatattcagtttttatttttggtttctgcttcctttctgcctcctctagccttcacgagtgtggttgtccaggtttgccctctttctcttaccttcagatagaacaagaaagaatgggagttcagcaaaagctcatttcttagcctctttcatacttgtcttgttttcattatgttttcccttgtaagctcattcacaagagcacccccgagctccacccaagcccttgcagtcccccaagatccctacctcgctaccacgtgtcgtggactccaggtcctcagttcctgattacattgcatggctttctcctataggcttcaatggggttcttgatgcctgttggtatacttgcaattagactgtcaaacagagagaagaatccatagaggcatagaattttgtgttatgttcattcaattttgcagatgattgcggtgctacttgccaccgctggagcaatcatgtccataaaaaatctcaacaacctcttcaacaatagtcatcaaagattaggagttgcgctatatggtgctatctggctgcaagttttacttggcatttttcgaccacaaaggggatccaaaagaagtgtgtggttctttgcacactggatacttggaactgcggtcacattccttggtgtcctgaatgtatatcttggtttaggagcctaccaccaaaaaacatccaaaggcataaaaatttggaacatacttttcactgttcagatatctttgattgtgtttttctaccttttccaagaaaaatgggtgtatatacaaaaccaaggagtggttttgggcaaagaaataaaggctcccatttgtcaagaaagtcgtccagatgaaaaggagaaggtattgaagggtgacacgtgttgaggaagatgaaaccaatgcctcaccataattgaccctgacttctacataggatacaagtgttcaaagaatacagagtagtggtgaatttttatagataagaaataatttctattgtttttgtcagaaatggcaaagccattcaaagatggtaagttacatatttggtggcttatatgttttttgtttgtttaagatgcaaatacaagaaattcaaatattatttcatggagatccaagaaaanttaagtatccaantatgttgat

SEQ ID NO: 126596 - DNA, 595 bp, Glycine max
  Clone ID: PAT_MRT3847_85322C.1
cacacacacatagcaaaaagacaccaaaaaaaaggataagcttcttcagtccttgagaaatcatattcagtttttatttttagaatgttatagttttctgcttccttaaaatcttcactagcaatgaagattgagtttgtccagtttttcactttacattaccaaaagaaagaactaggaagaatgggagttcagcaaaagctcatttctttcctctttcatacttgtcttgttttcattatgttttcccttgtaagctcatcacaagagcaccaccaaattacaagcagcccttcaaaaaccaaagatagcaaccacattaagatgagtcctggacttcagtttcagattacattacatggctttctcctgtgggcttcaatggggttcttgatgcctgttggtatacttgcaattagattgtcaaacagagaggagagtccaaaaaggcatagagttttgttctatgttcattcaattttgcagatgattatatctttacttgccaccgctggagcaatcatgtccataaaaaatttcaacaacctcttcaacaatagtcatcaaagattaggagttgcactatatggtgtta

SEQ ID NO: 126597 - DNA, 482 bp, Glycine max
  unsure (1)..(482): unsure at all n locations
  Clone ID: PAT_MRT3847_85323C.1
aattcggctcgagctgctcatgcagctgaggttagcttggaggaagaaatgcaaattcttggtcaagaatatatcaacctagaaaatgagcagaggaagctagagcggaatgcagaatctgtaaacagtgaattattcactgaatgtcaggaactactgcaaatgtttggcttgccatatattattgctccaatggaagcagaagctcaatgtgcttatttggaacttgagaaactagttgatggtgttgtgactgatgactctgatgtccttttatttggggcacgcagtgtttacaaaaatatatttgatgaccgcaaatatgtagagacatacttcatggaggatattgaaaaggagcttggattgaccagagaaaaattaatacgcatggctctacttcttgggagtgattatactgaagtgggattggcattgttaatgctaattgaggtngtgaatgcattcccttgaggaagatg

SEQ ID NO: 126598 - DNA, 582 bp, Glycine max
  Clone ID: PAT_MRT3847_85324C.1
ccccccccccccccccccccccccccccccccccccccccccccccccccccccccccccccctttcggcaaatgaaaagctgtttttattaaaaattttaaatgtttgccccaaaggtcttgttctctgttttgtaaaaccccccccccggaagggtttgctaaaatttatttcccaggaatgcttccttgtcccttgaccaaaaaaatctttcccggggaagtcttgacctttaccccgaccaaaatccgaaccagctggaagggcccctcaaaaccaccttggggggaatagcctcccaaaaaatctttttaccctatttggggccgggattacccctaaaaccctcctttgtaactagcctttttttcaccgacctttgtttgctttgtttttgggttcctgaccaggcctttccaaaaaaagcggcttcaacccctcttattcaagcccgatagatcatcctttgggatttcaaggccccccctaaagccatcatgaccttgtaacccatcctcttcaattttcacccacaacccaagatcctgaccttggtcttccccaacaccaagtccttcctt

SEQ ID NO: 126599 - DNA, 307 bp, Glycine max
  unsure (1)..(307): unsure at all n locations
  Clone ID: PAT_MRT3847_85325C.1
tccacgcgtncggccacgcgcacggggttagatgcacctaatcccactgtgttaaataggcgggtggggaaactgactttcccccagggcacttcccgaagggtggaaagaatgcctctgtccacacggggaggagctggtgcaaagaatgctattctcatgaatgtgccagatgcagttgtttcatatgcggagatgtggacgggggcgaactgcttatgcatggcactgaggcgctatgcgcatcaatgaatgtggcatggggatattcagaacagctgcaagagaggcggaaaactccattgag

SEQ ID NO: 126600 - DNA, 429 bp, Glycine max
  Clone ID: PAT_MRT3847_85326C.1
aaaaaatgtttaatttcagctcaaggtaggtgggtttatgcattgtccatgctactctcacatgaggggacaaggtagaagtataatgccattcatgtgtgttcaccttgtagcttaagcttttggagtagttgggcaaattttgttgaaaatattagttggccagctttgggatttttttttattattccaaaaggtattggcttctccttggtggattttgcactcatgagtcatgactgaaacaggtatttacgccttggtgcatcaactgtgaggccactagcaagcaagtagagaagttggcaaagcactacaaaggatcaagtaatctaatatttgcaaggatagatgcttcagcaaatgaacatccaaaacttgaaagtaagtgtgatgaaaaggcttgtcatcttgttttcaatggatttt

SEQ ID NO: 126601 - DNA, 265 bp, Glycine max
  unsure (1)..(265): unsure at all n locations
  Clone ID: PAT_MRT3847_85327C.1
attcctgcacttgtacttgttctcaaacaanatagaagtaacgccctaaccctcggaattctactggggataaaaaactaacattcttaggttttttcttttatttgaacgaaaaaaaatgctgggggaagggttagaaaaagagtatctagaaccctcgacgtctccaagcttcaactgttactctacctatgaacctccaggtatagcttaaagcactattcaaaacgacgacgcgttgttttcggcctcataaaatgactac

SEQ ID NO: 126602 - DNA, 300 bp, Glycine max
  Clone ID: PAT_MRT3847_85328C.1
tgcagtccagttttcagaatactggcggagattgtgattctttaatctgtctctcctcccccctcatgagtagagaacactgccttttgaatctgataagcaaaactattgcttgagggagttatgatcaaatgaacaaatggaagatttctgtggcaactgcataacaaaggaaatatgtttattggccttggttttttaatattagtatattgtaggccttttcttatgtttttttgctgacataggttaccgcattaagcatgggggatgaccgtgactatgtgatggcagctattg

SEQ ID NO: 126603 - DNA, 163 bp, Glycine max
  Clone ID: PAT_MRT3847_85329C.1
acggctgcgagaagacgacagaaggggaggatagagatcacgcaacaaaatatttgctttttggtggatttcattgcaagcatgtttggctatgcagcagccatcgttgcagcaatcctcttctacgactactacttccataggagacgttgttgctaacacc

SEQ ID NO: 126604 - DNA, 386 bp, Glycine max
  Clone ID: PAT_MRT3847_8532C.1
ctaataggtttaaagaatttttttttggcttattcctttctattaataatatggctaccataaatttacttgggaataaatttttttccttaaaaggaatatatatatatatatatatatatacataaaataaaaattcgcctggtatatttggttaaatataaaaagggattttggggatctatggtgaggtaaaattgaacattaatggttaattaagaataggtatagaagggagaattggttacttggacacaaagaccttataatctcttgaggtaagttttttttaaaaaataaataagtgtgaccaccggttatttgagaatgagaaaattaactcttcttaatggggtaccaaaccacatgaattcaccaatggggat

SEQ ID NO: 126605 - DNA, 492 bp, Glycine max
  unsure (1)..(492): unsure at all n locations
  Clone ID: PAT_MRT3847_85330C.1
aattcggctcgaggtccttctcttcgttactgcgcaaaaatcctgttcttcggattcgcgttgcgattcggtctagggtttcagttcaacgcgcactgaatccgattgcggaatttccagctctgtatttcggttgttacgtgtcgtttgaaaaatgcatgtccctgtagatccatggcgagcttctttactctctgaaatggcgaggttccgntttttttttttttttttttttttttattccgttgttgataagcttcgtttgtgccctgggttttgttaatttgatgatttgtgatatcaatcaacatgttcaattttgtggttttatttatttatcttaaatatattttttatagtttttttttcttttccttttttttgctgaatgttcaaatttggtacttttgaatccatggtccatgatgctagctagctacctcgagttttgaaatgcagtttgatattgtgatattattgtccccaaacggg

SEQ ID NO: 126606 - DNA, 178 bp, Glycine max
  Clone ID: PAT_MRT3847_85331C.1
aattccggaacggtatctgtctgagtaataactttcaatctacaatattaaagcataaatgtctctcaatgatatcataaatgtccctcagtgaggaatataagatctttcttaactaggtaatcaagactgagaagattgtgaagtatttttttaatcgaaggacagttagtgattc

SEQ ID NO: 126607 - DNA, 732 bp, Glycine max
  Clone ID: PAT_MRT3847_85332C.1
ccacgcgtccgaagtttcgttgctagactttgcctgaaactagctcttattgacttacttccttcaccatggaaattgggaaagaggatgagattatggacatgtcaatgtcacccccattagttggttccactaacaatgacacttgtcacaacaaagacatcatgtctcaggcatatcttcaaaataagtactcagagattgacataaaaattgaaggttccaatatggaacaaaatcgccccctccccatatttctcaagtttgaaaatgtggagtataaggtgagaaatagaaaagcaggctctagtaaccttgtgaaaacaatggtgtcaaaggtatccacacaactcactgtggaagaagatagatataagaaaattttgaagggcatcacaggaagcataggccccggtgaaattcttgctctgatgggtccttctggcagtgggaagacaaccttgttgagagtcataggaggaagaatagttgacaatgtaaagggaaaagtaacataccaatgatgttcgttttactacagctgtcaagaggaggattgggatttgtgacacaggaagatgtgctttacccacaattaactggtgaagaaaacttagtcttctctgcactcttgaggctgccaaccaatatgagcaagcagcaaaaatatgccaaaagtgaatacaactatcaaagagctaggcctttgaaagatgccgccacacaaaaata

SEQ ID NO: 126608 - DNA, 560 bp, Glycine max
  Clone ID: PAT_MRT3847_85333C.1
agacccacagtagacatttctgtgccaccagatgcagactttgttcgtccggagttgcgttctagcaattagaacttaaaagcaattatggctttcacttcgaatctttttcagatttctcagaactgcagttatcttgttagtttgggttttcatgattggatgctagtgtgtaagttgtattgtcattttacagtttgtacccgcctgtgttctgccactgaggaacgttacttggtgtcctatttaaatgagtcacgctagtacttaccattagaggctgagaaggattaaggattttacgatcttaatttcacgtttctaacagttccttgcaagccttccgtcagttttagccccggaaccatcttagtgatcacggtaactcgatctggtcatagacggtcgaattgaacatgcatatagtgaagaaaatgttaatgcgttgagtattcctataattttctttgaattttttttactttataagatcttggattgttttagaggagtttacgtccattcatatgaggaaggtgaaatttttatttggaatcctt

SEQ ID NO: 126609 - DNA, 434 bp, Glycine max
  Clone ID: PAT_MRT3847_85334C.1
atatcacaagcacaacgaaactagggttatggctgaactaataatcgcgtgatcgataccgatactgattgatactgtactctctcacgcaaggcatgaactcgaacttggaattcatggcgacaccaacgacgacgaagagaaaaccggtgttcgtgaaggtggatcagatgaaacctggtacctacggtcacactctgaccgagaaggtggtcagctgcaatccggtgaaaacggagaccacttgcggcggtcgatctgtcgatgctcagcgtgtgcgcgccgcagcgcatcggcaagtgccttgactgatacgaaaccgtaaccataatcgtcacagtgcgcaacgaacaggaggaccatatgaaagctagcgcaactgtaagtctgcgtaatgcaaaaattgacatgttcaaaggatctatgacgcttgc

SEQ ID NO: 126610 - DNA, 1598 bp, Glycine max
  Clone ID: PAT_MRT3847_85335C.1
aattcggctcgagtagaaagagggttagaacaacttaacacagatgggtcaaaatcaaaacatgttgttcagctttccattttcgtagtgggattcttctcttcttgctttctccagtgtcatgaagaagagttcttcatcatcattccagaacttgggatctttcccaagtccaggggcaccctattatagggagagaaacattaggagccaaaagggttggtgctcagagagagtttcaaattcaaagctttcaactagtgctagtagcataagcagaagacacactatggcagggttaataacaacacccttttgtggtggaagaacactgccatctaaatgggatgaagctgagaggtggatttgtagcccagtttctgcgtatgctgagagcagaagttgttcacatgcacagcttcagcgaaggccaaagtcaataagtggccctattgtgcctcctggtgtggcttctttctactcaaatcagggtttggttgtgagaaacttggtggtgggttcacccttctcaactggggtgttggcacctgttgctgtttctgttcaccactttgatgcacatgatggcaatgtttttggctatgacttggacagtggaatgcagttttctaggccctgttatcaatgagaatggcatggtgctttcttctttgtccactgctgaaccacgtgctctgacaccagatgagaagcatgacggaacgatgaatggggaaaacgtagcatctcattcctcaaggtgtgacaaaggtacccaaatgagtccaggagagatagagaatgattcacattcctctccaaaatcttgtgccacttcaattgtggatcaacaacaatgccattcttctaaattagaggtcagagatgtggaagttgacagccaagctacaattgtcaggtggtccaagaggcatgcaaccaaattggccaaaaaagacactctacacagcaaagatttaagagagattagtgcagaagcccaagcatcatgggatattgacgagtcaaacattgacacttccaagttacagagagaggaagccaaaatcattgcgtgggagaatttgcagaaagcaaaagctgaaactgcaatacggaaacttgagatgaaattggaaaagaagagatcatcatcaacggataaaattctaaacaagctaagaagggcacagttgaaagctgagaatatgagaagctcaattcctgtacaacagagccatcaggtttccaagtgcagagtattttcgttctccaaatatgctcagatatggtctccaaccagttgcttcagaagccatgatcagtgatcgaacccatgtaaaatccctcaagtcattgaggtttttttaccagtttataaaagaaaatactacgtctgttttgatgccaacaattccacgtaattggcatgtgttagaaagccttacaccattatttgcacctaggtacctatgtattctgtgtatataaaagcacaatggttgtgattaacttttttttacttcttttataaacattcttttttttttctcgtttaaaaaaaaaaaaaaaaaaaaaaaaaaaaaaaaaccttaacc

SEQ ID NO: 126611 - DNA, 806 bp, Glycine max
  Clone ID: PAT_MRT3847_85336C.1
gtggaacctaattgcacttttcacattatcaattcttttgaggatggtcacgaggttgtagtgaggggttgcagatctcttgattcattaattcctggacctgacccgagtttgaaggaatttgagtggttatctcgttgtcacgagtggcgattgaatatgcaaacgggagaagttaaggagagaggtctctgtggagccaacatagtttatatggattttcctatgatcaatggaaacttcataggtattaggaatagatatgcatacactcaagtagttgatcccattgcaagctctactcaagacgtgccaaaatacggaggtttagcgaagctctactttgaagaatcatgtgcaaagttttccatgagaaacagagagcaacctgaagagcctataagagtggaatgccacatgtttgagaagaacacattttgcagtggggctgcctttgtccccagagatggtggtcttgaagaagatgacggttggatcatagcttttgttcacaatgaagatacaaacatatctgaagttcatataattgacacaaagaagttttctggtgaaacggttgctaaaattacaatgcctcgtagagtaccatatggatttcacggagctttcatgccaatttcatttgagacacagtaggactacagagtgtaaaacaacaaacgcctcaagatctatattggtcatattgctcccctctggtaaatgtaaatgtatatttggaactgaagtgttaacgcctaaagttattcttgaaagactgatatgtacggattgatttgtgctgt

SEQ ID NO: 126612 - DNA, 682 bp, Glycine max
  Clone ID: PAT_MRT3847_85337C.1
cggaattcccactctcgacccacgcgtccgcaaaccccaaccccatttctgcaattccattgaacctttacctttacctcccgcacttctaacttagttctccttccacttgcaccaccaacacctactcaggcacacacacaaagtgctggagcaaacactaacactaacacaacaccaccaacaagaagaagaagaaacattcccagagacccttttgctctgtgaagccaaagttgctatcttttctcaaatggggacccgaatcccttcgcaccagctcagcagcggcctctacgtgtcgggtcgacccgaacaagtaaaagagcgtccgccgacgatgacgtcacgctctgttccgtacaccggcggcgaccccaagaagtccggcgagctcgggaaaatgttggaaatccccggcgtcgagccgaaaccgtcgcgtccgtcgtctgggtcggtgagatccgggccgaactcgggcccggcgggagggaggctgagcgggtcagggcccatgtcgcgaaagtcgtccggttcgggtccgatagcgctgcagcccacgggcctgataacgtcgggcccggtcgggagtcggcggtcgggtcagctggagcagcctgcagcgacggcgggggggaagatggtgtacgggtcggcggtgacgagtttgagcgaggaagtg

SEQ ID NO: 126613 - DNA, 924 bp, Glycine max
  unsure (1)..(924): unsure at all n locations
  Clone ID: PAT_MRT3847_85338C.1
ccggaattaacgcgtcgacccacgcgtccggtggcatccccgccgaagccggcggcgagcccggcctcgcgctgcgcaatcaccgcttcgattcaccgctcagctccgcgtgggagggcgtcacaacgctcgcggagctctttgagcgcgcatgcagggagcaccaggagcgcgttctgctcggcacgcgcgctctggtcgcgcgtgagatggagacctctcccgacggtggaaccttgaagaagcatgaccggggggactaccggtggctcacctacgggaaaccgttcgaatgcgtctcgagattcgcgtacggcctggcgacactcggctttcaccgggaggaacgcgttgctatcttagctgacgccagagaacgatggtggattgcacagaagggtcgctgcaggaggaatgagacggttgtgactatgtatacgcagggagagaggaaggcaggagtccatnnnnnnnnnnnnnnnnnnnnnnnnnnnnnnnnnnnnnnnnnnnnnnnnnnnnnnnnnnnnnnnnnnnnnnnnnnnnnnnnnnnnnnnnnnnnnnnnnnnnnnnnnnnnnnnnnnnnnnnnnnnnnnnnnnnnnnnnnnnnnnnnnnnnnnnnnnnnnnnnnnnnnnnnnnnnnnnnnnnnnnnnnnnnnnnnnnnnnnnnnnnnnnnnnnnnnnnnnnnnnnnnnnnnnnnnnnnnnnnnnnnnnnnnnnnnnnnnnnnnnnnnnnnnnnnnnnnnnnnnnnnnnnnnnnnnnnnnnnnnnnnnnnnnnnnnnnnnnnnnnnnnnnnnnnnnnnnnnnnnnnnnnnnnnnnnnnnnnnnnnnnnnnnnnnnnnnnnnnnnnnnnnnnnnnnnnnnnnnnnnnnnnnnnnnnnnnnnnnnnnnnnnnnnnnnnnnnnnnnnnnnnnnnnnnnnnnnnn

SEQ ID NO: 126614 - DNA, 370 bp, Glycine max
  unsure (1)..(370): unsure at all n locations
  Clone ID: PAT_MRT3847_85339C.1
ctgccttcatgtangagggctcgtgcgttcatgctgcttgagctgctgatggccgcctgcttcaccttctgcctcagtcatcagaacctgaaggagtttgccctgaccaacccagagaagagcaacaccaaagaaacggatagaaaagataccaaagccgatgaggagctggatgccgaagtcctggaggtgttgcacccgacgcatgagtggcatgccctttaaccagagcaggcatgcccttgcagatcccacgtacagctgaatcttcagacttgggaaagagaggcaaaacttcaatatgaggacaagttccgaaataatttgaaaggcaaaaaggcttgatattaacaaccacacctaaacattt

SEQ ID NO: 126615 - DNA, 1205 bp, Glycine max
  Clone ID: PAT_MRT3847_8533C.1
ccacccgtccggccggaaaacaaatattcgccacatccacattccttcagcgacggcgcatgcttccagttcctcttctcaccgtcgtcactgtggattattcttctcttctcactcactcacacacacacacaaccctcttcaaggtgaatgtgaatccacaccactcatggatttgagaggaaatcttaattacaagagaagttctctcactgtcaaaccggtgagtagtgataggaagtttctcattgacttcatcgtcactacttatttgggacctgatgtcaagtctcataatccaagatgttctgttattcgaagactaatcgctggatccccaccctatatctcgagtgatttgggaccttcgtatgttagtgtttctttcttggagagattgtattattatctcctcagagatgcttcccctgacctagtcttggatatcaatatgttccatatgtatctaaaggggaaattagttttgcccacttctgactttattacccaggaatatagtcagcagttcactagctttttccctttggatctgcatcaacagatatggtaccctgatagcttcagagttgttaaaggggttgttttagttgacgatccttctacgtcttgcatcaaagaggaggacttaaatagattcaggtctttaactggtgtcaggactttcaagttgaatctaagtgaatgtcaatgttttcaacttgattgtcgatcaagcaaggaaggtggtgataattgcatgaacaaaatgccagagacttttccaaatgggggatgccaatcagaaaagcttcaacaagagcgcaagaggaagtatactgatggtacatcgctaatgccgaaatttccagatgtcctccctacagaacataatgccaaggtagaaccttccaagaaaaagtgcaaatctgatgggccaacattcatgccccttctccctattcctgatgttgatgactgcaatcgagattcttctcttattttaacagggacagccagaagagggccatttggtccatctgttggtgttgtagacattggtattagtaaagtggcatatctattccgagtttccttgccaggggtcaagaaagatttcagtatgtttctcctctttttatttgctcaggtttcttattctagtctttttattgtcttcgattatcagttggaagggttcttatcct

SEQ ID NO: 126616 - DNA, 404 bp, Glycine max
  Clone ID: PAT_MRT3847_85340C.1
gtacgatttgcggggaaatgcctgtacggattgcttgattcatttcttctgcgagccctgtgccctctgtcaagaatatcgtgagcttcaattccgtggatttcacatgactattggttggcatggaaatgttgagcagagaagtcggggagtagccatgactgttgcaacagctccaccagtcgaacagggcatgaaccgttgaagtgaggatccctaagtatagagtaatgtaataaatgcagttctgtaactaagcaatacgtgtttctacgatgcttctattagacctcaaggacaataatgtttgaagaatgagtcacttatgtctatcaaactttccactaaacttaaattttttttagtagattttggataaactttataaattttaaataaatctt

SEQ ID NO: 126617 - DNA, 750 bp, Glycine max
  unsure (1)..(750): unsure at all n locations
  Clone ID: PAT_MRT3847_85341C.1
aaanaaacttttcttgtttttaaaacctcgcgttttccggaaccggcaattacccgggtgcgacccagccacgcgtccggcatttttccgtcctactagggataagatattttcacgttttttgacagcggggtgtaggattatggacatcatcagggagaatatacacacagacagtgttgtaggtactttgtaaaagttaacaaactgatttgtgattgaattgaataaaattatttttatcctattaatgtataatctattttgttttatttttatttattcaatgtgcaatataatattgtctcttctataagaattgacattttatgataactttattttatcaatacatgtaaacatagacttacttatcaccagtttcatttatctattaacgtatatgatgtgtatagacaaatagttaagggagtgtttggtttggttgttttctgtttttattttcactgaaaacaaaaaacggtgatgaaaatgtgtttggttgaatttctgaaaacatttttagtgaaaatgaaaacagaaaacaaccagaaaatgaaaacaataaattctcgttttgaaagttttcagttgagaacataaatcttatttcgggtaaaataaaattacggtggcaatgaatgtaattttaaacaaatctaaaaatacaaaaagagcagaagtcaatatatcataaattctcagtatttttatttcatgaaaacgaaaaataagaagtcaaaccaaaca

SEQ ID NO: 126618 - DNA, 320 bp, Glycine max
  Clone ID: PAT_MRT3847_85342C.1
aaaaaggccttaacccttcccgggtttttttgggttttttttttttttaaaaaaaacgccttgagttggaaattccttttggggccccccccatttggtatgcttttttgggctggggggaaccgatttttcttttcggggggggggtaaaaggccctattttggaaaccttcccctttggttttaaaatgcccccccgccccttttttttttggaggggcccctttgtttttaaaaacccttaccggcaccttaaaaatttttcccctggggggggatgggcacccccaacccctcggtttttttggcccaaccttggg

SEQ ID NO: 126619 - DNA, 294 bp, Glycine max
  Clone ID: PAT_MRT3847_85343C.1
agataggaattaggatagagagacagaaagggattgaaattgtagtttcaatcaacacattaatttaaattgttaagtggtggaaaaaacaataatataatggaaaaagaaaacatgatcaataagcatccaatagttacaattcaagatagaacaccagaacatgaatgctagacaccaaatacagttcaacaaaaagaacacacaatgatcataactaatcaaatgaattgagcaagaatgttaaaaaagatcgtattagagtcaaaaaggcattcaaatacccagaaagat

SEQ ID NO: 126620 - DNA, 500 bp, Glycine max
  Clone ID: PAT_MRT3847_85344C.1
agaagctacatgttcagtcttcatttatgtcaacatagtctgttttcaacatcataaagcttctgtactactggattctactaatgtatgaaattggccactgctttgcttgaggatgacaattcctagaccataacaatgttaggggtggtaaaggacaactggcttttaaataaacctcttgtacatgcacaaacaatattatgttcacaggacacaagtgattgcataaatttaaaaataagactatttatcttcaatgtacctaaacaaaatgattgccatagacgtgatcgatacaaattatgcaatgcacagaaaaatctggtggtggtttgacttctaagaggaaagaacgccatactttgttgtcgggacaacgatacaaggattacattataccttgatacaatgacatattcaatctcggttatatccatcaacttatccacagtaaccttggataacccatcaacaagtagggacctgcttaattcctc

SEQ ID NO: 126621 - DNA, 446 bp, Glycine max
  Clone ID: PAT_MRT3847_85345C.1
ccaaacccaaaaccatttgtgatttaaatattgggaggggtagtttatcccttccctacaggaaaaaaaaaaggcgaggcgaattgaagtgacaaaacctaaacttaaatcctgatttgatacgacaggaaaatggggggggggatgattttattgatttattttttttgacccaagcctttaaatggaattaggcaaacatgtcggggaggggggggggcttgttcttttccttaaaaaaaaaaggaatggttaactttccaatgacgggaaggtcaatacccagtcccatattggattgggaagtaatgtcccaatctgaagcaatgtgctttgccaagctaaatgatatggtgtgagggcccttgcctggcccatacaggattggtgggtgacttgccttaaatggccctggggaagggattggtcctgatgttatttccctg

SEQ ID NO: 126622 - DNA, 278 bp, Glycine max
  unsure (1)..(278): unsure at all n locations
  Clone ID: PAT_MRT3847_85346C.1
acagagcgagaagcnccccatgggggaggataagagcccgaccatcgccccacgagagagcaaaancnnggnagacaaggccggcagaggcaancacaaaagacccgaccgcgcanangagcagngcaaccncggaaaaagacacacaaaagcngnnnccaaacacagagaaaacaaaacgaagcaacangcggcaagaaccaaagaaacggacgccggccgcgacangagagaaagcngggngnggaggcggacgcgngggcggacgcgagggcaaa

SEQ ID NO: 126623 - DNA, 345 bp, Glycine max
  Clone ID: PAT_MRT3847_85347C.1
ttacgaattcgagctctgtacccggggatcctctagagtcgacctgcagcacggacacggggttgccgaagggaaaaagtcgacaaggtggaagtgctggtggattgcattaacatacacaatctggcagcacagaaataaaatagtcttccaaaatgctacttttgatgaagctaaactgatggatgatgcggtcctttttttttttttatcagcaaaattattaataaaaaccatggagaaggactttggaatgcattttaatcaatggtcatcgaatctcaaagaagggtttagaagctaggagggattgggtgtggatggatttatgtatatattacaatg

SEQ ID NO: 126624 - DNA, 460 bp, Glycine max
  Clone ID: PAT_MRT3847_85348C.1
gttctccatcacctaccacacacttcatttcttgaaagaagaaccggatctggcgggtggggttgagggattcctggaaggggtcggatttttcactttcatgtgaagggatagatgcaaacaagtaccttttgggctttggtttggtgcattgtatacccttcctgagtactgtatcaagaaaactccatgcccttccctaccaaaattgatttgaatggctacattgctgagtaagtattttggccttgtatgtggtcttaagctttatgatgtccggtggactataacgagtttgagagtctgaccttgaatattatgtatatgaatattataaagcacgaagcgctggacataatacaccaggacaagtggtcaatgatggatccagaaacatttacaatgattaagttggaattgttgtgaatgacacaccaaaaaatgtctgtattgtcaatga

SEQ ID NO: 126625 - DNA, 202 bp, Glycine max
  Clone ID: PAT_MRT3847_85349C.1
ataatatgtttggtttgatttcttgttttctgtttttaggaaataaaaatactgaaaatttatgatatattgacttcttatattttttgtatttttaaatttgcttaaaattacattcattgccatttcattttcattttactcaaatgaggttcctgttttcaactgaaaacactgaaaacaaaattttattgttttcatt

SEQ ID NO: 126626 - DNA, 545 bp, Glycine max
  Clone ID: PAT_MRT3847_8534C.1
gttcgaacttgacatttaactattctctagctaaagatgtgatatgcatagcccaacaaatgaatgtgctcaacaacaacaacaaattcaagccattttcacaccccattcaactctcaagcatgaattacttctttctcaaagactttttggcattggattctaagaaaccagtttatgaagagttgaaggcaatccaagatcaggtaaagccgctttagcaagagtagtggggatgcaagtagaggagtcaagtttttgacaattgtgtctcaagatgttaaagtgagagatcttcaaggtcaaattactgatcacttcactttctcgttgacggaagagactgaacttggcaaggcactatggttatctcacaggttaaagatcgagaagattctcatcatcttggatggtgtatgggagaagttggacttggaagctatagggattccattaaatgagaacgacaagagatattgtatcctcctcactacgtgcaaccaaagcaattgcactttaatgaactgccaaagcatgattgaact

SEQ ID NO: 126627 - DNA, 345 bp, Glycine max
  unsure (1)..(345): unsure at all n locations
  Clone ID: PAT_MRT3847_85350C.1
cgacccacgcgtccggccgttgtttcactctctttctctctgagtctcacggtctaagtctctacacatgctttgcttagatacttagatgcaggttgttggtagacagtgttctttgtgtacagaaaatgttctgtatgagagatgtgtattgcaaacagtttgaatgctcagttgaattagtatgctaccaggggggggcttntggctgttaaatgatgtttaaaatttgatacaaggtagaagaaattggaagttatggaagaaatacagtcttagtcagatcattatagatcttgatgattgtcggcaagcagcccagtaagtagggtgccatcaaggaac

SEQ ID NO: 126628 - DNA, 425 bp, Glycine max
  Clone ID: PAT_MRT3847_85351C.1
gagaccaaacgtcttttctttcttatacattctactttagtttgcgagattctatccaaagattttgagaatgtctagctgcgggtgtggaagcagctgcaactgtggcagcacctgcagttgctacaagtgctcttttgactacgttgagaagatcacagatgagactctagttctgggtgttgggccggtgaaggcccaattgaacggggctggaatgggtgttgtggctctaaatggagtcggccggtgtggatctgactgcattagcgactctggctgatgctggtgttatcatgtgtcatgcccttcaaacatacatatctggtattcatgttttgaataaatgtgtgtgtgggtagcgtatgaagtattagaataaagtggtcatggcccgcctttggcaattcaaatgttctaggatt

SEQ ID NO: 126629 - DNA, 446 bp, Glycine max
  unsure (1)..(446): unsure at all n locations
  Clone ID: PAT_MRT3847_85352C.1
tgcacgtactcggtctcggaanttcccgggtacgactccacgtcgtctcgacgtgaaggagcaacgaagcctctcggtgtgttgtaaattncatggaaccgnnaaatgtaagaagacatgtctcaaggaaccctcggtnncttaacactttttcaaggataacatcattggagcaattggctctncagcagctttcagcacatcnnggttctcatnnntcttgaagggcattctaatcctgttccgnntttggaagggaaatactctctcaagccttcaagncccccatgcncnnatggctgnntcttctgtcatgaccgctgtgannatcagctntngttcaaccttgaggaaaaggctgtgtaaacgtcaactttgtgaagggcaattcaaacccttgcaaaaggattaacggtgcctacttttcattttaaaagccccggtgt

SEQ ID NO: 126630 - DNA, 584 bp, Glycine max
  Clone ID: PAT_MRT3847_85353C.1
aatttaaccattaataatcagctaattgagggagccagtctttttgtaaatctgccacccaatcaggccttttctctgatcctctccactgatgccaaacttgctaatgcgacatttcgagatgctcaactttgtaggcgtggaacacttgatcgtacaaaagtaaacggcaaaatagtgttatgcactcgtgaaggaaaaataaaatcagttgctgagggtctggaagctctaaccgcgggcgcaaggggaatgattttgaacaatcagatgcaaaatggaaaaacactttctgctgagcctcatgttttttccactgtgaacacgcctccaagacgtgcaaagtcaaggccccatggtgtcaaaacaactgccattggggacgaggatgaccctttaaaaacgggtgatacaataaaaatgtcccgagcaagaacgttatttggaagaaagccagctccagttatggcatcattttcatctagaggacccaataagattcagccatcaatactcaagcctgatgtaactgcgcctggtgtgaacattcttgctgcctattcagagtttgcaagtgcatctag

SEQ ID NO: 126631 - DNA, 425 bp, Glycine max
  Clone ID: PAT_MRT3847_85354C.1
tacggttgcgagaagacgacagaaggggacccaacttggtgtggtgtatgctatccatcatcatcatctaagatgctgagaaaactcatgaggctgctactgctgctgatgttctttctgtgtttctcatatgtgctctctgcctacgctatttctgcaacaagcacccaatattttgaaggcgatgaagcagaattatcagccctgtcttctttaactaggttggatcatgtggacgggaatggtgcggtggcaccttgtggcaggggtcaaaacctgtatagctggaatcgttattatcttgctccctgctctaacaataagactgaaagaaatgatgagtcttcttttttttttggtcagtttccaattttttcatagcccctatttgattagacatctcaatgttaccttccaatcttttt

SEQ ID NO: 126632 - DNA, 301 bp, Glycine max
  unsure (1)..(301): unsure at all n locations
  Clone ID: PAT_MRT3847_85355C.1
ctccacaaatacgacatacaagttaaatatcctttaacataataatcaccctcttaacataaatcgcacacaagttaatatcctcaaacaaacccaccaagtaagcctccacagcttcctaaancgcaataacancgtgactctggaacctcaaatcgatcttgaagtcttacgcaatttcacgaacaagacgctagaaaggaagcttacggatcagaagctctatactctttgngtattttcgaatctcacgaagaacaacagttccagacgaatagcaatagaacttcttaactgcacc

SEQ ID NO: 126633 - DNA, 820 bp, Glycine max
  unsure (1)..(820): unsure at all n locations
  Clone ID: PAT_MRT3847_85356C.1
cagtatctaactccacacttcgggcagaaatttctcataaaacccgaggggctagcaccagctaacctaattaccggaaccaggaactcggtcgccgcactccgacctgaactttcccctgctttttcggcattctcggctttaggggaggcattgcccttaaaaccgggcttagcccgggggcgggccccggccttgcccccccgcctcgctggctcgccttaccctcgggctgttccctcttccccccccccttttcttctcttggtgggtgggtgcctgttcgcttccctgggggcgcgnnntggcctgtgggcccccggggggtgcgcggtgtgggttgtggggggggcgggggggtggggggggggtgggggggggggtttggggcggcgtggggggcctgggcgtgtgcgcgggcgggcggggggggggggggcccggcgggcggcggggggccggcggggggggtggcgccgggttggcgctntcggtgggggggggggggcggggggggggttggtgcggggggggggtgtgttcgtcgcgctgcgccctccgcgggggggggcgtttctggtgggnngggcgcgtggtggtgcggggttggtgggggggggggtgggntgtntggggctgtgggtgtgggtgggtgggggctggtttgggggtggggggcgcggttgtttgcggtcgggtggggntggggggggggggggggggtgggcggggtggggggggnnnttaggtcggctgttggggggggtgggcgggtggttgttttctcggggggtggggggnggcgggggggggggggggg

SEQ ID NO: 126634 - DNA, 520 bp, Glycine max
  Clone ID: PAT_MRT3847_85357C.1
tgctcgagggctcgaggaggaaaagtcatttcagttccatgatgttttcaatttggataatgagaatagggcagaggatatgccaactttaatagatcgaaaggacaatgtctttatcatttccaatcccaagtcaaagtatccagttcttcaattagacttgagattgatatcagatctcgcagttgtcattggctctgcaacctgtggtggcattgcctttgcttgtgctggacaaccggtgatgactggatatctgctagcacgatcaatcattggacctggaggtttgagttttgttagtgcaatggtccaagttgagacagttgctcaatttggtgtcatctttttgctctttgcattgggcttagagttttcaacaacaaagcttttagttgctcgggcagtggctattcttggaggcctactccaaattttcttatttatgtgcttgtgtggaataacagcttcattatgtggtggtaaatcatctgaaggaatatttgttggtgcattttta

SEQ ID NO: 126635 - DNA, 321 bp, Glycine max
  Clone ID: PAT_MRT3847_85358C.1
aaggaagctagagtaaaagtctgtactcagtttttacagagtattgaaaggaactgtagggaggacagagatgagacatcacagctgaaactggatgactgctttcagacgagagatggttccactgcaagatatgatgatccagctactatgacgcaaagacgtgcatttatggagaagaagactcatgcggattcatcagatgctcatacagctgcgatagtggaagtgaagacaagccatactgaccatgctacggataggattgatatgaaggatgaaagaatcagcgatcctcatgatctggatcgacctgagaag

SEQ ID NO: 126636 - DNA, 484 bp, Glycine max
  Clone ID: PAT_MRT3847_85359C.1
aattcggctcgagacataaatcacaataaaaggacaacccaatgcatgaaactcccagcattgagggggccgtgataggtaagatgcagccacaactgtcagcacagaggtcatttccacaactagaacttgtgaccaccaggttataaggcagcaaccttactattgtgtcaaggcacaccctccaaacaataatcacaatacaccatgagctgattttgtgaccaacacgtgaaagcaccaaatcataaaatgataataggaggttgaaaaatatgaacattatccttagagctgattttaagcatccaaatgatttcataggatgttgcatacaaggattaagctcctctaaagtgaagagttcactttagaagaaaaagtcaagaatttttaaacataaatgagaaaatcaatgactggtattacgagcacatgcataacaaatcatggattttgtaaaatctactctcttaaattctcg

SEQ ID NO: 126637 - DNA, 922 bp, Glycine max
  unsure (1)..(922): unsure at all n locations
  Clone ID: PAT_MRT3847_8535C.1
gcttacaataaagaatgggagaaaagggaattcccgcgtcgacaaccccgtccgagtagattcacatacttcagcagcaaaagcctcttcttcttcttcttcttcttcttcactctcttcacaaatgaaaatactttgctctcttcctccaactctctcatactttcacttttctttgttcatgcaagatccaaagaacgattcaaacacaaggaagccatggtaccaaagagcaattgaggtgactagcctatggaaaagtgtatcaaaatccacagaaattccaacacctaattcttcaactttatggaagagatcatcatcaatgccaaaatcccctcaagtccctactacaccaagtcctaacaacaagaacaagctaagaaaatgtgcctctctaaaggttgcatcatccttcacaagggtttgtctttgtgctccaatctattcctacaacgagattttaagagctgaggtgccacctagaagaagcaatagttatccaagatcaaagccattgcatgcttcacatgagagaactcctagtgctagacttagcactgagggaaggagggtatttaggggcaaatcattgactgatgatgttctaatgaggaggtttgtgattgaggaagaggcaatgatgcaaattagaagaagaaatcaaatggaagttattaggaagaggagtatgatgaggagaaaaaagcttgggcctagtcctcttagtagaatggttatggcaaatgatattggacaattttaatttgattggtccaatttggttagttgtccagtcccattggggaattttgattctccatattaatgcctcacctgtccctttttttttctctttggccttaatttcattcactgaactttttcnnnnnanaaaaaaaaaaaaaaaaaaaaaaaaaaa

SEQ ID NO: 126638 - DNA, 782 bp, Glycine max
  unsure (1)..(782): unsure at all n locations
  Clone ID: PAT_MRT3847_85360C.1
gtctaattcttccttcactgccctcaagtgcgcgttttcaaaaaaattcatcactggtaaatggtagcagttatttagttggctgaccgaaaccatttatagtttctacggagcacaatgttgttccatgaaacttctgcaatcaatcttcttcgaaaattgcaacaaaaatacatacaacggaactcatccaatttcaatggttgcgagagctaacggaattgagtgtgtttgaagtgattatgggtcctatgaggatgctgaataacagaaagaaaggacagcagaagaagttttgttaacctataccgtatttattatatctatatttaccaatttttttcttgccattccatacgatagagcgaatagttcgtagtaggtgtttttaacccccacgcgatcttattatggatggtccaaccagcattatatgattgggaataacatcacaataggggatgatgatgatgatgatgatcgccataactgtctccatactcttgggaaatgttcagagcttcgacggcggtagtttgtgtgaagagctcattatcccctccggttacccctgctccgagtatacgattcaaaccaaggatggtttcttgttaggtcttcagcgtgtgtcttcttcttcttcccttcggcttcggaaccatggagatggaggccctccggttctgcttctgcatggattattcatggcaggtgatgcatggnttctaaatactccggaacaatcacttggcttcatacttgcagatcatggttttgatgtt

SEQ ID NO: 126639 - DNA, 741 bp, Glycine max
  Clone ID: PAT_MRT3847_85361C.1
tgtacttagaatggttaagatgcacattgatgagatgattcttcccatgggcattcatcaactaaacttcaaaagcgaatggggggccagtctcttggtttccttatgtgatacccgcctaagttgcaatgacatgctttcatccataacagggaagaattgttgcttcaatgagtcacgtgtggagttttatcttgaacaagaacctcatccatcatcgtctaaaaacttgaaccaccttttccagatgatccgcaaaggtacctactccaagtatgattatggaaagctaaaaaatctgatagagtacggcaagttcaatccaccaaagttcgatcttagtcgcatacccaaatcattgcctctgtggatggcttacggtggaaatgatgctctggcagatataactgatttccagcacacactcaaggaattgccatccccaccggaagtggtttatcttgaaaactatggtcatgttgacttcattttaagcttgcaagcaaaacaagatctttatgaccctatgattagttttttcaagtcatccggaaaatttagtagtatgtaatgtttgcttccttccggtatgatggatgtaattactgtaatggtctacgggtccatctattactgcacttactgtaaagttgaaatattaatattctgtggagtccaccttgattttctgtatgtatatatgatgacagatatataaagatcggcgtcgcatgacctgtt

SEQ ID NO: 126640 - DNA, 349 bp, Glycine max
  Clone ID: PAT_MRT3847_85362C.1
tacggctgcgagaagagacataagggggcacaaatgagttttatgatattaatgggtaggggctgtttgtttaaattgcatgtcctttatttcttcattgctacaatttttggatcatggtattgccatgcgttcaatatgttttttctctgtatgaacactggctatatgtccattactacggaagtaatatgcgcaagtatgtagggttgttgttgaaacacacaacatcttttgctttttaaccaatcatgaagtgtctgtttaagcaacaaaattatactttcattggcgaacaatctagatcaaactttgatactgttaaccaactatcttttttttatgcctt

SEQ ID NO: 126641 - DNA, 2780 bp, Glycine max
  unsure (1)..(2780): unsure at all n locations
  Clone ID: PAT_MRT3847_85363C.1
gaaaacgggccgacccacgcgtgcggttccatgaaacttctgcaatcaatcttcttcgaaaattgcaacaaaaatacatacaacggaactcatccaatttcaatggttgcgagagctaacggaattgagtgtgtttgaagtgattatgggtcctatgaggatgctgaataacagaaagaaaggacagcagaagaagttttgttaacctataccgtatttattatatctatatttaccaatttttttcttgccattccatacgatagagcgaatagttcgtagtaggtgtttttaacccccacgcgatcttattatggatggtccaaccagcattatatgattgggaataacatcacaataggggatgatgatgatgatgatgatcgccataaccctcgagccgctcgagccgattcggctcgagcgacacgagcgaggcagagagaataataaacaattaaaacagttgtgggttgtcagccgcggtcttgcactcttatttggcagttctgaaaaggacgcgccgggagaggcgcgtggcagattatggatggtcgaacccgcaagcattatatgattggtgtggtgcgtgttgcatcagaggtggacgcaattcagaataacaataaagggtggatgaggatccagaggttcttggccacactggccataactgtctccatactcttgggaaatggaaaccccgttcagtgcttcgacggcggtagccaccaaaaacagcaacacagtttgtgtgaagagctcattatcccctacggttacccctgctccgagcatacgattcaaacgaaggatggtttcttgttaggtcttcaacgtgtctcttcttcttcttctcttcggcttcggaacgatggagaacgaggccctccggttctgcttctgcatggcttattcatggcaggtgatgcatggtttctaaatactccggaccaatcacttggcttcatacttgcagatcatggttttgatgtatgggtaggaaatgtgcgtggaacacggtggagccatgggcatatatctttattagagaagaaaaagcaattttgggattggagttggcaggaattagccctgtatgatgttgcagaaatgatcaattacattaattcagtaacaaactcaaagatatttgtagttgggcattcacaggggacaattatatcttttgctgccttcactcaaccggagatagtagaaaaggttgaggctgcagcccttctttctccaatatcatacttggatcatatcagtgcacctcttgtacttagaatggttaagatgcacattgatcagatgattcttaccatgggcattcatcaactaaacttcaaaagcgaatggggggccagtctcttggtttccttatgtgatacccgcctaagttgcaacgacatgctttcatccataacaggtaagaattgttgcttcaacgagtcacgtgtggagttttatcttgagcaagaacctcacccatcatcctccaaaaacttgaaacaccttttccagatgatccgcaaaggtacctactccaagtatgattatggaaagctaaaaaatctgatagagtacggcaagttcaatccaccaaagttcgaccttagtcgcatacccaaatcattgcctctgtggatggcctatggtggaaatgatgctttggcagatataactgatttccagcacacactcaaggaattgccatccacaccggaagtggtttatcttgaaaactatggtcatgttgacttcattttaagcttgcaagcaaaacaagatctttatgaccctatgattagttttttcaagtcatccggaaaatttagtagtgtgtaaatttccttcattccggtatgatggatgcaatacaatggtctacgtgtttatatattactgcactttctgtaaagtgaaaatattaatattgtgtggagttcaccttgattttctgtatgtaaatatgatgacagatataataaagagtggcgttgcatggcctatttctgcaaaatatctttatgaccctaagattagttttttcaagtcatccggaaaatttagtagtatgtaatgtttgcttccttcgcttcattatctttgatttgggtagcccttaatgacactttctctgtgtcccactagtaaccataatttaatgttgttgctcttatgaatacttatttgttatcatcaaagattttcctcagatcatgtctgataatgatcacaacatttgcatgatgtgtagcagctaactggcctctgaagggacaggagaagaaatattggaaaataaatctgaaatctgaagacaatgttctattgtgtctacattagccaggggaaatgaatttgataatttgtctaaatgtcaaccttaattcttgtttgtttatttttgtggttgataatattgttaacctcttcatttagtgcttggcagcatgcatcgaaataatgcttgttagttgttactaatatgtttccaagagtaggatgatttcctcaaatgggctagtagtatttacaatcttgcaagtagattagctaaagcaagttcggctatattttcttcctttgttggtaatgcatattttgttaccagcatangatatgtggttatgatgtttatgacatgctgtatcttgccaaagaccacacatctgtacaaagattagcactggctagcaactgtcatagtgccatcacttcttggctggtggcgaaccagcanatgggtgcactgaaatgcttttatttat

SEQ ID NO: 126642 - DNA, 1225 bp, Glycine max
  Clone ID: PAT_MRT3847_85364C.1
cagtttgctatatggcaacaaaaatgtcatttcatacatgttttatttacacatatgaaacgaatcaatggttgcaagaaactttgccgtaatacatgaaaagagaaatttgcattggtctttgcagcttaccaagcacaccagcttcagcattattcaatcctgggactttatctcttcatctaagtataaaaataaataggtatacatgcctcacaaaaattatggtgaaaaggacataagatgagtttatacttgagtgctacgtttacatttgtgtctggcaagcttttattaagctatacagttccatgtacagatcggagctcaacctaatggctttgttgtataaaactgccctttgcaaactaataaaggtattggaagaaactaccatgcatcaaagaatcctgaatttcaaatgatcatatttgtaagcatcttcaaaccctgatgatccagtgacagattattgtttattaagcattgagtagcatttgcatgattatgtcattccatgagtcgattggtcctggcaaacaccaatgtagacaatcattctgaactttagcattcttatcttttgcaaatggctggaacttcctgtaaggtccaggatgtccatctggtctcagcagtgaaagaagagttgtgtccaaaagtttcaagttcacccttttggatcctagagaagcagccttctcaaactcatcaagttcaatacttctcatgatggaatctacgtctatcatatgtatctgaccctctttgaagggtacagttctattgcaataccctccactaaaccactccccattctcaaagtggtctggtgtggtggttctgaagagaacagtggctttgtggttagactttgtgaagaacttgaaaacttcttgtagtactttgcggtacgcatagtcgaatcccagctctgttaagttctttccagggcagtagtggccgcccgccgctgttttgttttcatggtagattgcagtcttgagaaaccattttccaccaccaatgacaacataatcaaaattcttatactggttggtccactggtcgagcgtgtccagataaagctgtatctctgaagaggtaactccattaaagtcctcaaatatagctgctttgacaaggaaaggggtccagattactgagagtgtgaagttgtgagaacgaaatttccatatctttgatctatattccttgtcatggt

SEQ ID NO: 126643 - DNA, 199 bp, Glycine max
  Clone ID: PAT_MRT3847_85365C.1
acatcatcattttatgctatactattatacacaacaggaaacttttgtagaaaccaccccttggagggagatgaattacccccaataagacttagacatagaggccccactcagggcaactgaatatcacctgagtggcctattacaaccaacaaaggaaagatgctatcccggagggagatgaaacaagggcgtgggc

SEQ ID NO: 126644 - DNA, 1033 bp, Glycine max
  Clone ID: PAT_MRT3847_85366C.1
atttgatgaagggaaacaaaaagtaccagagagtcggaccatggaatggtttgcagttcagtggcggcaggccgaaaattaacaatcccgtttacctttacaagtttgtctccaacaaggaagagatttattacgaatggactctcaagaatgctagtttactatcaaaattggtagttaaccaaaccgcacaagatcgttctcgttatgtatggtcagagacgactaaatcatgggggttttattcaacaaggccggaagacccgcgtgatctttagcggatttgtggagccaatgaatattgcagccctagtgtattaccaatgtgtgagtgcttaaaagggtacaagcctgagtctcctgaaaaatggaactcaatggacaggacccaaggatgtgtcctcaaacatccattgagttgcaaggatgatgggtttgctccattggactggttgaaagttcctgatactaaaagaacatatgtggatgagagtattgatctagagcaatgcaaaaccaagtgcttgaaagattgttcttgtatggcatatacaaatacaaatataagtggagcaggcagtggttgtgtcatgtggtttggtgagttatttgacatcaaactgtttccagatcgcgaaagtgggcagcgtctatatataaggttgcctccttcagaattagagtctaactggcacaagaagatctctaaaatagtaaatataataaccttcgttgctgcaactttaggcggtatccttgcaatttttttcatctacagaaggaacgttgctgataaggctatgcctttcgtctgctttgtttctcgactggtggctggggaggtccctttgtcctttctgctaaccatcaccctggcctctgtcaattcccttttcaagtgctggtattgggtttttagaggatcctttgaaatcttggttaagtggccctatagctgaactctgttctgtgtctctttgacaaaatttgttatttgtacaatttaaaaatgaaggcgtaaaaagaagttgac

SEQ ID NO: 126645 - DNA, 257 bp, Glycine max
  Clone ID: PAT_MRT3847_85367C.1
gggaatctcacaaactgtagactgtacgcgtcttacccggatgccagccgctgcccatcaccagagattctgcagatcaaacgcaacaacaatagccgcataatgaactcgaaatcaggttatctttaggttggcagaacatcctcttcccttatccaatcaagacatgaccatcttgtctaccatgcaatgagctaacaaaaatttccatccttatttctatgtgcctgacgatgttgtgccttcctcaagattgt

SEQ ID NO: 126646 - DNA, 479 bp, Glycine max
  Clone ID: PAT_MRT3847_85368C.1
ctcgagccgtttgatttcattttcttgcacccaattggattttgatctgaacccagtaagctttttttgatgtcattctactctattaagttaattttgcttgtgtgtagtgtggcggttgtgatggatctgaacttttaagtgttttgcaacatgggtgtgtttgatgtggttgctgcctattgactgcaacttagagtctattttttgattcgttgttgttaatgagtgctactcgttttaatgctaatgatgtttattttgcattgggctggatctgcaagttcattttaactgtgtggttagtgtttttcattaagatggctcatgttgctcgatttaaatccatcgaagtttctgaaatcatatatgtgcgaaaaggtttcattacttgtcagttgtcaacttagatcgtgtttcttttaaggtatgattcggatccatcgttttcactggtttgcttgtgtcacttcactgat

SEQ ID NO: 126647 - DNA, 200 bp, Glycine max
  Clone ID: PAT_MRT3847_85369C.1
cccacgcgttcggtgatttaagagtgatcaataaggaaccctcggaaataccagggaaagtttgttattattactagtttcacttgtggatttatcgtagcataatgttgtacaagaataatttaatatgaacaagatggtgtgtttgttattgaaaaaaaaaaaaaaaaaaaaaaaaaaaaaaaaaaaaaaaaaataaa

SEQ ID NO: 126648 - DNA, 199 bp, Glycine max
  Clone ID: PAT_MRT3847_8536C.1
ctatttttgtaccatattgctcttaaaaatcttggtttggtacagttcataattcaccaaaagttcatataatttaaaaaaacactaaattagtttaaaatgaagcaatttatatctttatgcaaaaacatatgtctgtcttgcaaaggactgtaagcagattacaataaatcctttactttaaaaaaaaaaacaaaaa

SEQ ID NO: 126649 - DNA, 383 bp, Glycine max
  Clone ID: PAT_MRT3847_85370C.1
attataaaattggacaaaaaatttctgcacgcgcaataggctgaataccattatgcattattgttaacatgaaggagaggacagattccaaaaaaaagccatacaactggctaggccaaagtaaataaataattcatatgcttacaaacaaagaataaagggacggacacttaaataatttcatgtgacaaaaaacgcggaaactaggctttcgtggcttttgttgagcaaaggcgaagtgcaaccttgtgctatcaacaacgttttttattggcggaaattctttagaaataacctaataatgatatggacgacgaggggatgcatacatttaaactgtgggaagcgggggatgaaccgtacacataagtggacccggcaat

SEQ ID NO: 126650 - DNA, 406 bp, Glycine max
  Clone ID: PAT_MRT3847_85371C.1
gttgttttttatgtctctgatgcgatgctatatgtcgcagcctttcctgttggcattccaggataggtggtatttatacatcctgtgcacactcatggcctgatatcatatgatccctcaacattgatacccgctgtgtgttcagctcgacatgctgaagaggtacttacagagtcagatagacgccggggcgatactgttcatattgaggctgtgaagaggagcctacaaacaactgctagagaatcaggtgataccaatcgttgtactgcacaaaatgtaggatgtgctgattaacctcgctttacatcagcctatatgggattgattgagcttgatacaaattttggcagtgcatgatcaggtgggcttacacacgaacaaggaagggaacaaggtatatggg

SEQ ID NO: 126651 - DNA, 332 bp, Glycine max
  unsure (1)..(332): unsure at all n locations
  Clone ID: PAT_MRT3847_85372C.1
nnatcgcanacacgcgtacgtangctcggaantcngntcgnggtgagaagnnataagccntgnanngaagnaccgagnngatngntncatagccgntgtgnnnncncnnncgtnttnaanntcnngntctntcncacnnntnctnnaaacacaaannnctncttnggnccncannacatnantatnggcnantgttnnnnggnntncanganatnaangannnanncagnnngagacnnncgaatgaacnggtntaggnanagggtggatgcgancnangatgnnanggttngnnnccgannanananancannagcncagnggatngaaat

SEQ ID NO: 126652 - DNA, 305 bp, Glycine max
  Clone ID: PAT_MRT3847_85373C.1
ggaataaataaatgattaactgtataaattgttggggggcatttaaaggccaccacattactttgtacatttttaaacaatctacttcatgggattattaccagaaacaaagattacagtttttcagttatcaacaaattttttaacaaattattgacaacatattaaataatatcctatgggaccaaattggtaaaaaaaccataaattaaaatttttatctctgccatcacaaggaccatgaacttattgctaaatttcctacataaacaccttaaccgatatatttggtgcaaatctctttc

SEQ ID NO: 126653 - DNA, 786 bp, Glycine max
  Clone ID: PAT_MRT3847_85374C.1
ccacgcgtccgcgcagttctctcttctcttctcactccgcagaagagagagaaatatccaatacctagcgttagcgttagcgtactctcccaatcccaatcccctctctctctctatcccttcttttcttcttcttcttcttctattccctctccctccgctttttctcttcatcgttgtggttcggcgtcgctgaatccgtcacgttgttgtttgtgtcgaatcggacggcgaagattgcatcgcgaggtattatgcagcagagtgatcaaacggtgttgagcttgaggcccggtggtggaagaggcagcaggctcctcgctcctcgattcgactcctcctcttcatccgcttcccctgcttttggctcctttcccgctgatcttcctctcctgcgtccccacggtggagctccctcacccttctctatcaaggctggagatgctcggtttgagggtcgtgagcgtgtgcgatatacaagggaacagcttttactgcttagagagggtgttgagatccttgatgatgttttaaagatcaaacaagatattgaagctgaactttttggtgaagatcaaagctgggcccgctcagaaaacaacccctcacagcaatttcggtattctgagccagataatcgtgactggcgtggacgatctggtcaactttccggtaatgcagatgagagatcttgggataatctcaaggagaacagggagtttggcaatactaataaccgtcaagaccaactgaactctcagtttgcaagggcacaaatctcttcta

SEQ ID NO: 126654 - DNA, 370 bp, Glycine max
  Clone ID: PAT_MRT3847_85375C.1
ggctcgagagtcaatgccactattgaaagaaattacaaggggtgattgatgtctgctaagttgtaaaaaatgggtataataggattggggtgatgagagccggccgatcttgtgagaaatcgactggtgctatgtatgtatatagcggtataatgaagcgaggtgtctgtgatcgcctgctggacagtggtgagaccattaccatgcaccgctgaatggataagcatatagaaccgagggtagaatgtaaaaatcgtctgctttcgttgagcacctgccacgattgaatctactactaccactatgcgtaggatactaatggctctgaagctgactcagatatatattactagcgtgtgggaatatgagc

SEQ ID NO: 126655 - DNA, 253 bp, Glycine max
  Clone ID: PAT_MRT3847_85376C.1
actacgcgtgcgtaaagcattggatacatattgaggtgaagttagtcaagtgctttaaggggagacacatgccacatcatgaggggttttaagatcataacgtgtgatgcgcaacatggggtaagagctgaggtgctatgaacttgcaactatgtggcattcacatactttgaacggtgtaaatggctgctaatgaacacggaggccgcttgtgtgactacgagagcatatgttgaaggtgaagtgtcaagag

SEQ ID NO: 126656 - DNA, 218 bp, Glycine max
  Clone ID: PAT_MRT3847_85377C.1
gttttgatccctcccccaaacgaaacgcaccctctcctctttcggaaccttcgcgggacttctacggctaaattgcccgtggtttgtcgcacttccgatgcgatctccgggcagctcattcagtgacatactgtcctgcggcacagctccgtgttagccagctaagcctgcaactactgtggaatctagtctaatgtagggctcgactagagttttgg

SEQ ID NO: 126657 - DNA, 502 bp, Glycine max
  Clone ID: PAT_MRT3847_85378C.1
aattaattgcaaaatatgttttattctatcattcaatttccaattaatgtaccaaaattatataatcactcaaaaattctagttctagaaaaaaagaacacaagctcgtaataaattcaaagaacaaaaatttggttctcaaaatatggaacgccaccaaacaaacaacaatggggaagcttcttttacttgccttccctgttttcatcctctcattggggcgccaaacgcaagtgcaacaaagaaaactatgaaagccaattcaaattgaaatcaacttgggccaccttaagctttaaatctctaagcatggttttgaaaggttcccataatgcagcagtcttttcatcacacaccacagcgcttaagctctcaagctccgtgattgagtatggcaaatcagtcaatcttgtgcaacctctgcaattgagattttctaaactacgcaactctcccatgttctctgggaacttactaaggcttacgcagtcagagatgtcaa

SEQ ID NO: 126658 - DNA, 281 bp, Glycine max
  Clone ID: PAT_MRT3847_85379C.1
gatctacacggctctgcggattcatccttttcttctgcagagcaaagaaccaaccaacacttgtttcttccgccatggccgatcaacctgaatcatcggacgctaagggcaccaagagagatttcagcaccgcgattttggagcgtaagaaggctctgaatcggcttgtggttgatgaggccgtcaacgatgacaactctgtcgtcgctcttcatcctgataccatggagaaacttcaactctttcgtggtgacaccatcttgatcaaggggaagaaaagg

SEQ ID NO: 126659 - DNA, 366 bp, Glycine max
  Clone ID: PAT_MRT3847_8537C.1
aatctcaaaaacggttttttttaaacccggataatatatggttggattgacatgagattcaattcaacatttaagaatgtgaatttaagggataccaatattcacataaatggattattatccttaacaaaaactttaacccttaaagatgggggggagaaaaaggctttaaatcattcatcaggaaacccagggagatggtttatatgtctggccattggtgtaccatcacttggagagtaaggaaagagagaccttaaatccatattggctatagttggatggagtgttagaggactagcacaatacagatgttttatataagcaagttcttgtgctaactcacttggaagattatccatcaaa

SEQ ID NO: 126660 - DNA, 234 bp, Glycine max
  unsure (1)..(234): unsure at all n locations
  Clone ID: PAT_MRT3847_85380C.1
cctccaaagctcaacagcatcnccaccagcaaanagggaacgttgccganntggnttgtgatcccagtggnttgggacgaagaagaagaaccagtgggtcgntgccttccaagacagcnatggcnncgtgaaaggacgcacaacccaatgtaggccgcantnacaggcaacnagnntnnctcgttctnntncaagaggnnnnattnctggaatngaagtatattattncaaact

SEQ ID NO: 126661 - DNA, 1028 bp, Glycine max
  Clone ID: PAT_MRT3847_85381C.1
ggctcgagctctgctctgcggcttatttggtcacgaaatagggttttgcttgcaactaagatcgataagaggacgaagcggggaaagctaccgttgcgtgcggccacaatgggagggtcgcgagttcaagtcaacaagcctcacaagtcccgcttctcttccaaatcttctcgcaatcttcataaaacctctgtcaaggacagactcgcaatcgcaaaatcagagcgcaatgtcggcaaaggagctcgtgcagctcgaattcagagaaataaaatgatacgagatcaaaaaagagctgctgttttgaaagaaaaacgagaactcagtgggtcgagaagtcctcctcgagtgatagttctcttcgccctctgtgcgtctgtggatttagaatcacttgctgatgatctcttgtcattattatctaaagatacgtgtgtggtgctgtcaggaaccgttgcttcttctgaatataggacaagaataacggtactaaaagcaccccatggtgatctactatcatgcattaccagattgctgccttattattctgactataggacaagaattattaattttgttaagagatgttagtacagagtaaaaataggtttaaacttgtgtaacataacattcttgcaccattcaatagctttatgtagaatgcagtttttattgattcaactgttgaattacgactatctgttatgttgatgattgttagtttgtgtcaaatcttacaaaaattgaaatacaagaagatggtccttattttcatatatgtagaatgcagtttttattttcatagttggtccttattttcatatatttcaatggttcatatatgggtgtgcaatgcttttttggtgtgtgtcattgtaagcactgagtaatgaatttaaatgaaaatttacatagatacatcaaggattgagttaacagttgacttgaaatgaaggtgaggaggagtcaaaacctcactttctctcacagctttattagattcaaaatgttacatatatataggatac

SEQ ID NO: 126662 - DNA, 144 bp, Glycine max
  Clone ID: PAT_MRT3847_85382C.1
acggctgcgagaagacgacagaagggggcagtggagagcgagtgttagcaccaaaaatgtcgcagttgatcttcgtgttcgctgcactaattcctcttctctgcacctctttctcgcaagagagaccctcaaatcggcgcctcc

SEQ ID NO: 126663 - DNA, 300 bp, Glycine max
  Clone ID: PAT_MRT3847_85383C.1
cgggtgactgaggacccgttcaagtgggtttgaactcctggtgaatcatcagtttatctcggtctgaattatgatccaaactccctgttgagtctctggtcggattatgaaacattggttttctgagcattgggcgaaccacagacctttagaggcttatgatgacaatctaagcgaaagataagctcaagctagtttgcgattaaagtgataagatcgtgggacacttggctggataggtaggatctgcgttggtgtgtgcaagaacatgtatagagactcgatgcaggtgaatgacta

SEQ ID NO: 126664 - DNA, 417 bp, Glycine max
  Clone ID: PAT_MRT3847_85384C.1
cccacgcgtccgtacggctgagaaaagacgacagaaggctacggatgcaagaagacgacagaagggagaatatgataagagaaaaaaaaagattctaaagaaatataactaatattctgtataataatcaaaaagaatattaaattcaaataaattttagatagataaaagacttaacaaggaggatttgaaacgcgagatctataaacatatctttccgcggcaccagtagttggtactccatgggtcggggctttgtcatatctcttgatagagatcaatcggctttttgcacatgcatcgatattccctttttatccattatagttattgacacggaaaggggttaagaacattataaatccaattaggtattaaatgtatgtaatcaatatgaaaataatctccttttcttta

SEQ ID NO: 126665 - DNA, 347 bp, Glycine max
  Clone ID: PAT_MRT3847_85385C.1
ggccctgggtgtttatcttatctgtgtttcgtttcaattgcgcgaggagggtttttctatggcttggaggctatgccgaaagcggatcgaataagctcatgtgaacagaatgatcctcacaaagcagtaccgatgcatacactcagctagctgtcaatgtactaaagggcatttgactgacgatgcgatattcgtagtattgcataatggggatatgaatcgcacgctaatcgctactctagcatgtgtgtgcgaatggttcgacgatcttgccaagcgagatctatggaaagaggttggtcaaacatgagctccgaaagtgtggtgtgatctgccatctaatggga

SEQ ID NO: 126666 - DNA, 196 bp, Glycine max
  Clone ID: PAT_MRT3847_85386C.1
gtagatagttgggaaatagcgcgattaattggtacatatatgtcagaagacggctcaggtaatgatctgcatgcgagtgagagcaagtggtagcatagcaaatagcacatcatttcttagacgctcaagctatagcacgatacttatagaggaatcaaggtccgtacaaatcagaggtggcgctctctctcacaca

SEQ ID NO: 126667 - DNA, 298 bp, Glycine max
  Clone ID: PAT_MRT3847_85387C.1
aaccgttgggctgatttatgtgcttgtttatgtgcttcgctatgtgcccccatgtcgtgagaagatgatagacgggttgggtcgggagaagatgatagaggggcatggtcgtcagaagatgatagacgggcatggtcgtcagaagatgatagaagggcatcgtcgtcagatccatgctagaagggcatggtcgccagaagatgatagataggcatcgccgtgagaagatcatagatggccatgcgtcgtcgagaagcatgatagaagggcatagtcgtcacaagatcatagcggggca

SEQ ID NO: 126668 - DNA, 512 bp, Glycine max
  unsure (1)..(512): unsure at all n locations
  Clone ID: PAT_MRT3847_85388C.1
cnncntnancgatcagntgggnnaggtccacaccttngnaancatacnacantnnnanntntatacnccnccctcnngnnaanannnannnngtggcnanncgnnnacgnggncaccgngcnnnncnancncnctngngacncgacantatnnntnnnnnagngacgnnntccacatcaannaacantgtnatnngcnntgtaggncntngagggcncancatgtgagcantngacgcntnctnagngcantcncaccnnanatntgatcngagttaccnacnagtnngngcncacggtggncgnannnagnncnnncacantncgcagtacgttgtgnntcnagagngtacnccgngtnntacgacngntnctatgacnanngngngacagtcgatngctnganantcaactacntctnanancgggacgncagtcggtgctgacnagntcnagcttcannggccatctangncgtncntnntanngccagngngaggatctctgatgctc

SEQ ID NO: 126669 - DNA, 452 bp, Glycine max
  Clone ID: PAT_MRT3847_85389C.1
tctacacctgtgatacccaagcgttatctttttttatgacggtatctcggcaatcctgagtttgcggatcgacacatgagcaagcgtcaccggcgtcatcggggaacgtccgggcgatcctcaattctagcgttccgtttagcagagctcgcgcgaaattcggcacacgagtgtcccgctcagcaattgccgctcagactactacttttggccagattttcggagaactgcaggctcgcaatctacctgccgacgccaccgtttcagggtgtggatctcgtatccatatcaacctctgacttcacctatagccgccgctacctgctcgccgaggccacatggacgctgcgtttacctcattcgaaacttcacgacacggcatcgtgtcaggaggtcactaaagtttgatcttcacgactttctctgagcgtactgcaatggcgcgaccactg

SEQ ID NO: 126670 - DNA, 264 bp, Glycine max
  Clone ID: PAT_MRT3847_8538C.1
cagggaacttctacacaatacaaaacaagggactattggaaattactagtgaatgctctcactacataagaccacacactttgcctacctttaaacaccgatttagatgtcgtcttcaataataccaattatgcttacaattgcaacaacaccatctaaagtgcacactctaaatttaaacgaaatacaaatataacataaccccccttttaaaagaatccaaacttaccaacgattacatactacgcggtacatttaaaatag

SEQ ID NO: 126671 - DNA, 183 bp, Glycine max
  Clone ID: PAT_MRT3847_85390C.1
gaagaaatgatatccataattgataagggggagacaaaaggcatctaggacccccctcagtaaaatcccaacaaagctctgtattagaactgtgtggaactccacaccaatgaaacctcactttacctgttcctatgcattcgggggggcacaaacaaagggatgcacttacccccccccccc

SEQ ID NO: 126672 - DNA, 162 bp, Glycine max
  unsure (1)..(162): unsure at all n locations
  Clone ID: PAT_MRT3847_85391C.1
atataacttatttatataaacctcgtcccttgaatttttaccctttatnaagaatacatacctganttctaaaagaatggttttttcttttcctcaattacgagnngtgagaaatctttattgagtgagatttgcacaatgagaaccctcatcacaattttc

SEQ ID NO: 126673 - DNA, 430 bp, Glycine max
  Clone ID: PAT_MRT3847_85392C.1
ggaactaatgacaaagtgtttgctgatgctcctctggattctaatcattagttccgacaagcaatgaatcgggcgattaaactcatgtaagagaaaaagccatctatccagagaaaatgttccgccgagaataatacagttcattctttcactccacagcatattccacgcaccaaatcagacatcacttcgaaataactttaatcttccgattcattgcttgtcggaactaatgactaaactcctgcggatcattctctttactttcgacattagagccaattagctcgtaacaggcctcacatactcttcaaatcatagaatatacttttcacactactctctttgtttcatttactctatacacccaacttacaaacttgtgttttaacataaaattatcctagattcatagatataaactttattg

SEQ ID NO: 126674 - DNA, 322 bp, Glycine max
  unsure (1)..(322): unsure at all n locations
  Clone ID: PAT_MRT3847_85393C.1
gagaccaaaaaataccggaatgaaaacctttgggctttgctttacacgcatatattgtaatattggcaaactgggcatgggccttagcgacatacatnaaaacaaacactaaccgacagctcaatgtatgctatgcattcaaagcatgtggcaccataactgctttactgagtaactcattgggaagactggtgntctcccgaatctatgcacaggtcattgcttggtacgcaaactacccatgggaggacgtattttctttacgtaagcactaaatttaaaactaaatagtgttgcctgtaaattggaagatggattcctg

SEQ ID NO: 126675 - DNA, 458 bp, Glycine max
  unsure (1)..(458): unsure at all n locations
  Clone ID: PAT_MRT3847_85394C.1
ttaattacaatactcctctctaaatatgataccctcatgatttaaggagtgatctatccgagcccaatgatcattctaccactcctcttagaaatacaattttcttagtctcgtgggagcttacacacgctctcctacagagacacgagccatccgggcntggagcatatgcacacgaacgctgatgacatgaaaactacattggggtttgaccacactaggttttccgttgcatcggcaggcacccctcaataacccaccacagagtgagattgctccaatgattctacaaccgctgccaaaaactaatgccggattcaatcactggccggagcagatattttgtcaagactcacgagcacaccaagagtgttcatttacagcgtgctggctgtgagagaaggcctcccgccgaagaaatttaccggagcatgcggcaccttgcttcgaagcatggg

SEQ ID NO: 126676 - DNA, 572 bp, Glycine max
  unsure (1)..(572): unsure at all n locations
  Clone ID: PAT_MRT3847_85395C.1
aattcggcaccagacgttatttgtctgatgatagaaagggaattagctgccaaagtttttcccttagggatgcttttttgaatctaatcaaaggccttaaccccaggattgtgctcttggttgatgaggattgtgatcttagtgcttcaagtctcacatcaagaataaccacatgtttcaaccatctatggataccctttgatgcattggagacttttttgccaaaagatagttgtcagaggtcagagtttgaatccgacataggccagaagattgagaacatcataggctacgaagggcaccaaagaattgagaggttggaatctggggtgcaaatgtcccaaagaatgaaaaatgtgggctacctcagtgttcctttttgtgatgaaactgttagggaagtaaaaggtttgctagatgagcatgctagtgggtgggggatgaaaagagaagaaggtntgttagttctcacgtggaaaggaaacagctgtgtgtttgcgacagcttgngtcccctgtgaaatattgagggatcatcatatcggtatggatgcaagcctgtcttaaacacac

SEQ ID NO: 126677 - DNA, 113 bp, Glycine max
  unsure (1)..(113): unsure at all n locations
  Clone ID: PAT_MRT3847_85396C.1
agaaatggnnganncaaagggagttgtgaancacgtttnccttagcnaagttcanggacgacgtcactaccagagcggcttgaggagctcatacaaggactatgccaatcttg

SEQ ID NO: 126678 - DNA, 260 bp, Glycine max
  Clone ID: PAT_MRT3847_85397C.1
ccccgggtaacacacccgaggccacaaggggggggcagggggcatcttcacatcggagcggcgcggggcgcccccgcccacgcagaacaagagccacgggagcgacacccgcaccaagggcgcgctccacgagagcaaaaaaggggccgaggagccgccaggaggaggggggcccaagaacggaaccccggaagcccagggagggggcaccggacccctccaccgacaacaaacacgccaacaagcaaaacggggagccc

SEQ ID NO: 126679 - DNA, 806 bp, Glycine max
  unsure (1)..(806): unsure at all n locations
  Clone ID: PAT_MRT3847_85398C.1
ccacgcgtccggtaatctaccgcgacctgaagcccgaaaacgtgttaatcagatcagaaggccacatcatgctcacagacttcgacctttccttaaaatgcgacgattccacatcaacggcacaaatcatctccgatcaaaaccctccccgcacagtcccacgcaacgattcccacgtggaacccacacgtgccacttcttcatgcatgatccccaactgcatagcccccacggcctcatgcttccacccaaaacgcaagaaaaagaagaaacaaacccattttaatgggcccgccttcgtggccgagcccgttaacgtccggtccatgtcgttcgtggggacccacgagtacttggctccggagatcgtgtccggtgagggacacggtagcgccgtggactggtggacgttggggatattcatgttcgaactgttttatggtgtgacaccgttcaagggcatggaccacgagctaaccctggcgaacgtggtggctcgggccctcgagttcccgaaggaaccggcggcttcggcagccatgaaagagcttatctcgcagctgctggttaaggacccggcgaagagactggggtcggtgatgggggcctccgcgatcaagcaccacccgttctttcaaggcgtgaattgggcgttgctgaggtgtaccactcctccatttgttcccccccctagtagtgccaaagctatatatgatgatcatcaaacttgtcctgagattttcattgactgttattaatgcccatgaaatttcattggtaacacccccaaaaacccaaggggggng

SEQ ID NO: 126680 - DNA, 425 bp, Glycine max
  Clone ID: PAT_MRT3847_85399C.1
acttaacctcaatttccaggtaggcgtacgcatgcaaattaataatatcgaccaaaatgatgatttctttactaacatatggattaagaatgtcgagtttctcaaaacttcgtactgtcaatcctttttatactatgctgagacctgtaatatattttcattctaaggtatccattgcaacttctttactgcgagcaatagctaccaaatgcattcccaaagccatgttttaacatatcactgacaaagcaatcaatacaattatactcacccaacatgaagcaagacgtcttgctcacaattctattggaacaaaccataatctatattgtattatctgccaatgaactcctattgctgctaaagtacttaagtcaatgcggatcaaccttcaagattcaccaatcgaactataaaaaataatt

SEQ ID NO: 126681 - DNA, 329 bp, Glycine max
  Clone ID: PAT_MRT3847_8539C.1
ggccgggcccgggttttctccccagttcccaaatttctcattctcccatttcctctcagaaccctcgatcactcccacgcgctcctatatcctctccttcaccgtcgctctctccaacgatcacaacaacatcgtcatcccatggcaaacgccgcatctggtatggcagtccatgatgactgcaagttaaggtttttggagctgaagacaaagaggacacaccgtttcatagtttttaagattgaggagcagcagaagcaggccaccgcggagaagcttggcgagccagcccaaggctagtgaggatttgcttgccagcctccgcgctg

SEQ ID NO: 126682 - DNA, 377 bp, Glycine max
  Clone ID: PAT_MRT3847_853C.1
atttttcgttgtggaacgcgggctaccaattgttgtgtattggctttatcctgttggtcagttaccttcagaagctgtcgctggaaatggtacatgtggtcgcgggcgtggtggattacccaccagtgcttggattagttttgcagataagaatcgttctttatgacatgaacaaaaagatttaaacaacactagggaaaggtatgaatgatgtttttcttactagagatgatccttgtccagaaactttactgtctgttctgttgggcgtatagaatgcaatattgggtcataactcccttaactctatgctgacgcgacttcttgagaactgtgagagtaacaaatatatggttgatgagagttcttttgcattt

SEQ ID NO: 126683 - DNA, 892 bp, Glycine max
  unsure (1)..(892): unsure at all n locations
  Clone ID: PAT_MRT3847_85400C.1
ccctttcgtccggcgcgaagaggggagattcaggtaattagggtttgatggaagaggcgaaagtggaaactccgatgacaacgtggagagacaattgttcgcagagtttgagccctagagcgcgcattgtctccgtcgcctccaacatcgctttccagcctcttcacaaccccgaccctcaagtttggggcgttctcactgccgtctcctacaatgcccgcaaaaggcaccagggaattaacattttattaactgctaatgagcactgcattggtcgattggtagaggatgtgcgtttccagattgattcaaattccgttagtgcaaatcattgtcgaatatacaggatgattgttactaatgaaaatatggagaatgccacatcaatattcttgaaagatgcaagcacaaatggaacttaccttaactgggagagattgaaaaagaatggcgctgctgtgaaagtttgccatggcgatattatatcatttgctgctcctccgcagcatgatctggcatttgcttttgtatttcgagaggcgcttgtgcccagcctcatgccagataatgcagttgctaaacgaaaagcagaggattttgtttccgataacaagagattgaaaggtttaggcatcggtgctcctgagggtcccatatctctagatgattttcgaagtcttcaaagatcaaacatggaattgagaaagcaattggagaatcaggtggttacagttgatactttgcgtantgacaactgtgcagctgttgaatgccatgaaagtgtatgtaatcattggtgaacgagggacaacgcctagattaagccgaggttcccctaaaaatgttttaaacttaatccttagttttagaaataatgtaaaaagggcagatt

SEQ ID NO: 126684 - DNA, 656 bp, Glycine max
  unsure (1)..(656): unsure at all n locations
  Clone ID: PAT_MRT3847_85401C.1
acgtnngcttggtttcgggagagcggccgccctttatgttctttttttttttttttttttttttttttttgttcggcnntttgtcgttttctcggcctgtntgacctcccttgggtcccgccgcgttctgggtttngaggttacccttcttaaatccaaccttctcactgcctctgggctctcttcgttctcggggggggccaccttggaactgttngacctcgctctggggtcgcccgggggctcttttcccacttggctggcccaacaacccgtnnctagggcggaggaccaaagggctggnccccataaggtttctccgggataatttcctacataggcgctgttgctgtgatgcccgggtccgggaggaggggtgtgggtaatggggggtctgagngttatgggctctgttcccttccagtggcagtggcccaattctgctctcgcctcttgtgggtctccctgtggtccccgctngccttgggacgggctattcggctctgggtcccccccctatccggatttcgcgaccgccgccccgacgcgagaccccaacttgtgaaccgcgcgcctgtgtcgcgggccgtcggtggcgtggggtggggggggggggggtggggccggggtggtggggggcggcctgtgttgggggg

SEQ ID NO: 126685 - DNA, 1217 bp, Glycine max
  Clone ID: PAT_MRT3847_85402C.1
cccacgcgtccgattattcagcatcgtaatctttactagttggactaaatgacacgcatcatcgtaatgaagacatggaagtgttattattatgtggccaggaacgacacacgaaacgtgcatttgtctcttttcctgtgtttcttcctcgtttgagtttgtgtttgtgctatcttcttcgctcttcacttttgttgtctaacatggctttggtgaatccgtttctgtgtaccactcgaacttccctccctctgcgagtttcaggtccaccaaaccaaggtcctaccacgttggactctctgctcccaatattcattcaaaacatcatcactaagatcgaacggactccatgtgaggggccactgccgacctaaaggcagctcctttagctgatggactaccagattacgcggtttttgcgggccactccttcaaaaaaatgggaaaatgaacgaattaactgacctgtgactttgtagcaaaccggacaagagcaactcaggtgtggcgccactgcagacatcaaagcagatcacgcggttcttgtgggccccaccagcgaggaggagagaaaaggggactatgactggacacaggaatggtaccctttgtatctcactcagaatgtgcccgaagatgcacctttgggtctcagagtgtttgataaacagctcgtgttgttcaaggatggcaatggccagtttcgctgttacgaagatcgctgcccccacaggttagcgaaactatctgagggacagttgattgatggaaggctcgagtgtctataccatggatggcaatttgaaggggagggaaaatgtgtgaagatacctcagcttccagctgatgccaaaatcccaagggctgcttgtgttaaaacatatgaagtgagggactctcaaggtgttatttgggtgtggatgtccctcaagacacctccaaatgttagtaaactaccttggtttgagaacttcgcaaggccggagtttcaagatatttccacaattcatgaactcccttatgatcactctattcttctggagaacctgatggatcctgctcatatcccaatctcacatgacagaacagattggactgcaaaaagggaggatgctcagccgctgtgttttgaggtgaccgaacgaacccatatagggtttgcaggttggtggggcagagagaaagacggatccatgcctaacttcttgcggtttgag

SEQ ID NO: 126686 - DNA, 644 bp, Glycine max
  unsure (1)..(644): unsure at all n locations
  Clone ID: PAT_MRT3847_85403C.1
cctcacgcgtccgcggacgctcggcttcgtctcgagctgtatttgtgctaccttcttcgctcttcacttttgttgtctaacatggcgttggtgaatccgtttctgtctccccctcgaactcccctctctctgcgagtttcagctccgccaaaccaagcactactacgttggactctctgctcccaatattcattcaaaccatcatcactaagatcgaagcacgccatgtgtggcgccactgccgacatcaaggctgcacctttagctgatggagaagcagatcacgcggttcttgtgggccccgccagcgaggacgagagaaaaggagactatgactggacacaggaatggtaccctttgtatctcactctgaatgtgcccgaagatgcacctttgggtcttagagtgtttgataaacagctcgtcttgttcaaagatggcaatggccagtttcgctgttacgaagatcgctgcccccacaggttagcaaaattatccgaggggcagttgattgatggaaggcttgagtgtttgtaccatggatggcaatttgaaggggaaggcanatgtgtgaagataccccagcttccagctgatgccaaaaatccctcagcagcttgtgttaaacatatgaagtgagggac

SEQ ID NO: 126687 - DNA, 1695 bp, Glycine max
  Clone ID: PAT_MRT3847_85404C.1
ccacgcgtccggtttgtatgttggtgaacaaaattcaaaactgcggatgaatcacagtgagagtatactgatataatgcatgtaatagctgcagttttgaattttattcttagtttgtcagttgatgaacaaaattctttgagacgagcccttaagcagcgcacccctcgcattgaagtagacttgatgaattatctgcaaaacaagaaagagcgacattctaagtcttcctatgatccatctgatgttgtgggagcatcctctgaagagggatatgttggtttgtcaaggaaagctcattatattggaagaaattcggctcgagttcactagatattgatggtggcaggaagtggagttcccaagattctgccctgattaaaggcacgagtggccaagcagttactgatgaaactgaagaacatactgattctaatagtggtgcttttggtttaaaaactaaagagcttgcttacacagccaattcaacgggtcaaaactttggcttacaaactagccatggacatgtggacagtagcattaattttgaaggtctatcatctgatctgaatgttaatggtctgatgtcatcagaacatttaaatattactgaagactttggacatgacaaagaacatcattcagctgaagatgtgaaagtaaactacatgacagacaatgggcctagtattccccagattcttcatatgatatgcagtgggggtgatggaagccctatttcaagcaagcggactgctcttcaacagctagctgaagtgtctatagccaatgatcattctgtttggaccctgtacttcaatcagattttgacagttgtgcttgaggtgctggatgattcagattcctcagtcaaagagcttgctctttcactgatagttgaaatgcttaaaaaccagaaaggtgccatggagaactctgttgagattgtaattgagaagctgcttcatgttacaaaagatatcattcctaaggtctcgaatgaagcagagcactgcctgaccattgttctatctcagtatgatccattcagatgtttaagtgtcattgtccctctgctggttaccgaggatgagaaaacactcgttatttgcataaattgcttaacaaagcttgtggggcggctttctcaggaagaactaatggctcagttaccctcgtttctgcctgcccttttcgaagcttttggtaaccagagtgcagatgttcggaagaccgttgttttctgtctcgtggatatttatatcatgcttgggaaagcattcttgccatatttgcaagggcttaacagcacacagttgaagttggtcaccatttatgcaaatcgaatctcacaagccaggacaggcaaagcgattgatgccgttcaagactagcaggtttattgggaagaaaaaaattgtggctttttgggtgttgtctattcattgttgtgtatttgtatatctgcgtgcatgaatttagatgtgggttccattgtctttccttctccttgggtctctttaaatatataatttttttggtctttcctttttccctggcaatgttggaatttggagagttctgatggtgaaatacgagtaaattgtaatctacatttagtaaacattattgattgtagtaaatggttttcaagaaagtcattgattcatttacatgaatattttttattttgtc

SEQ ID NO: 126688 - DNA, 249 bp, Glycine max
  Clone ID: PAT_MRT3847_85405C.1
ataaactatgaattcgagtctagaggctatagatctattagattcagttgtggaggtttttgcagctattctgtcggataattcctaggaatgaggtaaatggcatatttgaatacatgagaagttatatgagggagttgggaacatgtatttgtgggaatttaccggatgttatgaattctggatacctgggaaatattttaatggtagtatctggattaatttgttagatgatactatggttatctg

SEQ ID NO: 126689 - DNA, 371 bp, Glycine max
  Clone ID: PAT_MRT3847_85406C.1
ttcggctcgagtacggctgcgacaaaacgacaaaaggagccgacagattgtttgttctgtatggggcctactcttgctccgcttggaaaacggtcatgtgcgattgcattatctattctgtttggttgcagcgaatgtaccattcttctcagatggattaccccctgtgtgctgggcactgacttccgaaatcttccctttgcgtctgcgtgcataagcatctgcactagcagcctgggctaataaggactgcaacggacttgaggacatgacttttatttctgagtctgacgcgattagagtggctggaaccttcatgacgctgtctgcaatttcggctcttgccattggcttagtcgtctcacttgcac

SEQ ID NO: 126690 - DNA, 457 bp, Glycine max
  Clone ID: PAT_MRT3847_85407C.1
gccgggggtagtgcgactgcggtagggacgacgttgctccgcgagcttgtcctcctggggatgtgccaacccgacggcttggaccagggtcagaggctggagaacttggacctcgcagcgaatatcggggttcaaacccaagaagaagcaactcaagcggagagatggcggaagaccgactatccgatttgccagagctttaaactgatgcaggtactcactcaccgaacctgtttgggttaccttgaagagaattcccgtagggtcctcatagggtgaatgcgcaaaacgggtctcgatggcctgcaaaagtcctgcccaagtggggaaccggtggttgcacatcatccactggaaccacgctaaggcgggtccttccatggtgaagaaaacaatggttagacgctctagttctggggtggagtgataggcgaaaaactgaatgattttgaacgcc

SEQ ID NO: 126691 - DNA, 279 bp, Glycine max
  unsure (1)..(279): unsure at all n locations
  Clone ID: PAT_MRT3847_85408C.1
cgcagctgtggtcctggcggtgggggcaattgtaaatcgttttcttaaaaccttcattgtttttcccttgtaatatgtgtgctgaaatttcatgcatgaggaaatccacactcatcgtacanacctatggattactctagcccccattttaatcaaaagaatttnaataaatattataaggggggttgtgagagctgcatagctnacagtccatacattacccttcaattcaattggaaggaccgtatttatttcctcattactttcttccactgcaga

SEQ ID NO: 126692 - DNA, 566 bp, Glycine max
  Clone ID: PAT_MRT3847_85409C.1
cacagacagatatcatggctaaggcggtgtgcactctctacggcagtgacgcgacggtatacgggtcgttggtggtcacgcaagctcacgaagacgccaagagtgtaattacgggtgagctcaagggacttccggctggcaaacacgcgctgcacgtgaatgtgtttggggatgtatcgcaaccgggcggggtgtttaacccatttggtaagaaccacggggcacccgaagacgaagagcgtcgtgtgggatcattaggcaatgtgaacgtagcagaggatggcagtgttaaagtgcacgtggaagataagcttgtcaagctcattggtcctcactcgatcattggtcgcagccttgtgatccacgaaggtgaagacgatatgggcaaaggcggggatgaattgtcgttgcaaaatggaaatgctggtgctattaaggcttttggtgtcgtggggatttccagctaaacgccaagaaatgaaggacggaggaagtcatgattcctctggaaacaatcagtttggggctagttgattctttaaaaaaagatcgaggcaaatgctgct

SEQ ID NO: 126693 - DNA, 267 bp, Glycine max
  Clone ID: PAT_MRT3847_8540C.1
ggctcgagtgattgttatcatatttctaacacacgcgggccaaggcaatcggcgggattgtttagacgcgtactgaccggcctgcgtggaagaacaactcacatttgtgcagtttacccaagggatcttcactgccgtcatatttcggcaatccaagcttctgcgctcctggagggggtggcccgcgtattcacagtgttgttgagagcgcaattgtactgtccaaggggctctgggtgatcacggaatcctctcctggcgctgagt

SEQ ID NO: 126694 - DNA, 468 bp, Glycine max
  Clone ID: PAT_MRT3847_85410C.1
agcaagcacactgtctgactgttttacatcgctcacaacggtctaggcatcgctgttaggatatcggagccactcaaggcgcagatacatattttgagctacgccgatttctaccacgtggctggcggtgatgacggtgaggtcacgggtggacctgaagtctcattgcaccctggaagagaggacatgcatgagacatcatcagcagctctcttagtccgatatacagtaacggtgctgaccataaacgagatgtgtttggcacagatatcggtcttaatgaccaagatatagctgctctaattggggattacacgtcttgactctgctcatatggtagtaggactggagtggggggaccttggtacttctatcctttgatttactatatcctattcactaagccgcattggcgttcaaagaggtcttatttgaaaaacactcgggcgttggtgcaaatggttgctt

SEQ ID NO: 126695 - DNA, 577 bp, Glycine max
  Clone ID: PAT_MRT3847_85411C.1
ggctcgagaatctacatggtggagggacttgaagattgtagctcagcaccctcaacagggtcaagtgctgaatagatcgatagtgtggaaggtaggacgtggggacaaatttaaattttgggaggattcttggataggggaagagacccatttactagagaaatatcctaggctacacagtatatctcttcagcaagatcatttcattcagcaaatgggagatgtcaaagattcagggtgggaatgggattttaaatggaggagaccattgttcgacagcgaaatagatttggcggtatcattcttagaagatatccaggggcacagaattcgggccaacagtgctgaccagtgggtatgggtggcagatcctagtggccagtacacggttaggagtgcatacactgtgcttagagaggacttaatgcaggaggaccagtatggtgagttcaaggagttatggaaggtgaaggttccatctaaagtagctgagtttgcgtggaggttacttaaagataggttaccaaccaaagacaacttgaggagaaagcatgttgattacaagaatttacatgcc

SEQ ID NO: 126696 - DNA, 552 bp, Glycine max
  Clone ID: PAT_MRT3847_85412C.1
gaagagggaacaatttaggaaaataacaatgatgttgtgttggtagcgtaaggtggaaaaaagagggtctttccttccctaagctatggctcctgctgggaagctttctgggcttcgtcgagaaggcagtgactggttctgcaatgggggactgccaagtgatataactgtttccgtcgatggtgtcactttccatcttcacaagtttcctcttgtatcaaaatgtggaaaaattgctagagcacatgaagagtccaagaataccaatgagactctgaaaatggtgctggaagaatttcctggtggtcctgacactttcttaattgcagcaaaattctgttatgggtatcgagtggaactgacagccagaaatgtagtatcggtccactgcggtgcagaataccttgaaatgacagatgaatttggagaaggcaacttgttgtcaaaatcagagagttttttccataaaaacacactgcgtaactggaaagattggattctggctctccaagttctgagcctgttctacccagagcagaaaagcttcattag

SEQ ID NO: 126697 - DNA, 293 bp, Glycine max
  Clone ID: PAT_MRT3847_85413C.1
ttgtattggtcagatataaaggcctcggttgctttgtgttatcttagaacgaatatcttttccttcaaattcctcaacaaacactggatcgcttccaaccggcgcctgtagaacctaacagggaaaaggcggaatcaattctcttgtggagcaccgcatttgactacatctctaagaagcctattgctcataggccaccagtcccaagctattaaccggacttaaaggggcccacagacttgggcccagcaaacgagcccataattaagatggcctggctaagtttacaaaac

SEQ ID NO: 126698 - DNA, 636 bp, Glycine max
  Clone ID: PAT_MRT3847_85414C.1
aaaaccataagtgggaaaagggaaatggaggaaaaaaataatgctaagctttttggaaatactttattttaaagagggtgagatagccacaagagatgcaatcaaccaaaagcaagatatgtagtggatccaacccatacccaacaaaccccacattatatatatctttagatcaaattagattattgtgtgcagtaccaaccagaaccaaactttgtgcctttttccctgcagttgcggcgagttttgactatttgccaagggctaaggctgagactttcagagatctgagactgtggaaattaagtgtcacaaatgggtgtcaatgtggggattatttgtgttttgtttctcttggcaacacaggcaataggggttcctgcatttgcaccatggaagaagctgcaattgccatggaagaagccttctaaagggaaagtcattcagaaaaaccaagctctccccattaataccatattcaagctttctgtacatgtgacaaattcttggccttcagatggtaattatgcaagtggaacaattgatctagtaggctgcaactgtatgtagcatctacattcaaaagaaaaaagtttggggcacctatagtggtggacctgctgatcgaggtttctc

SEQ ID NO: 126699 - DNA, 389 bp, Glycine max
  Clone ID: PAT_MRT3847_85415C.1
accaaccatgcggaggacggaatgcaggaaggaatgcaaaaggcactgatggactctgcaagcaacgggcctacctggggggatcactggactacatactttactacatgcggtgcttaggaaggtgcagctgaatctggatcttgatctgcaactcaagatgctaccaagaaggatatcaggatggatttgacacagtactcatcggaggactcctcgtgactatcctcgcgactgttggcgcaataacaagcgcacctacagccgatcctattggacaatatattgcactaaaaggggcaaggactgtctgaagtgcatggtggcttgctatgtaccttgccaatgactttaccacagctcgcaccatatcttgcaatatgttttgt

SEQ ID NO: 126700 - DNA, 590 bp, Glycine max
  unsure (1)..(590): unsure at all n locations
  Clone ID: PAT_MRT3847_85416C.1
aatcttcaatttatttatntatnttaattttgatgacagggtgtttgtgcccttatctgcaagatattgttctataactctgcttcagagactttaatttgtttagtttttgaattcaaattgtgtagagcttcctatcactagttgggttgcaacatggaacacgcgtcgaatatcctgtaggataacgtatctaatactggagtctaggatttatttgtgcagaaacaagatatattagctggagtattttaattcggctgtgttctcactgaggaacatgcgccatcacgctgtacctatgtagcgttacaattaaacctcatgagcattaagatggataaataaactaccttagctggtttaatcaacgtacagaaatcaacgtctgatgatgatggcttgtgtttcaatccaatatcccagctgaattattattattacaagtagaaagaattttatattattaatgaataaaaagtactttttatctgaattgtatgataatcagaacattaaagctctattaactgagaatatatatatatatatatatatatatatatatatagaaaaatatagatatatta

SEQ ID NO: 126701 - DNA, 371 bp, Glycine max
  Clone ID: PAT_MRT3847_85417C.1
cctgaaaacaattctcaaatttactccttagactgaattattattcagaggtgaacatctttttcaccttcatccctataaacaccattattttaaaacaccctttcccaaattacctttatataagcaaccaaaacttaccatcaaaacttctttccaaacctaacttttttttgactattaattaaaacaaaccactcttcttgcctaaataatacttcataaaaaacctttttagtaaccattaacttcttttacaaagcctccacccctcatacaacaacatttatccatttctcttttttataaagcatctcccattgcctaaattaaaatttgacaacctttactttaagctcaactaaactttt

SEQ ID NO: 126702 - DNA, 209 bp, Glycine max
  Clone ID: PAT_MRT3847_85418C.1
agtctgttttttgcttactttttgaacccctcaattaaaaatgcgaccatatagaagtgacagcgacagatctcgaaactaccataaaactgtatgtgcctaattgagacgcgttatagggctatcacgatatggccttgtagacctcgtacatgtaacattgatgaggctcctggattgtctcaacctaagtatgcaagaaaccccat

SEQ ID NO: 126703 - DNA, 311 bp, Glycine max
  Clone ID: PAT_MRT3847_85419C.1
ccccccaacggcacaggaggaaactgtgtcgtcaaaagccagcgacttcaccacggcgcttttcagcaagatgagctagcctgaagctactgcaaagtatgtggaagctatagaaattgtgagtgaaagtttctcacgttctgactgctccaactctggagcagtgctatgggctgatacttaagctaccaattgttgagaaagcaacctgttgaattgacgttgcgccttccaggaggccataggcccaaacagtttgttgcattggcgaataccatcgagcccattgagccagactccaattcgaggct

SEQ ID NO: 126704 - DNA, 184 bp, Glycine max
  unsure (1)..(184): unsure at all n locations
  Clone ID: PAT_MRT3847_8541C.1
anctgtnnagannctagnaatgntcnantngaagnacnggagctnncacaggctgataagaaatatacagctgntcatcncaggccattgacaaacctgcagatgntgggggacgnctggcgtnaagtatgggcaggaagacaggttaagggnagtgaggattccacgaagcnantaacaagca

SEQ ID NO: 126705 - DNA, 326 bp, Glycine max
  Clone ID: PAT_MRT3847_85420C.1
catgaatatgccaaatgctgtactctcaatgtgcagaaatcttgtcggggatctcgcgtatgagggttctaagatgactattccctccattaaatgtacgctctctttctgcataggattggtaaatctggctgaggatgccatcaatttgcaggcttgcccccatagctggagcagttaggacagatccatgcaaaagatgaatagtgcttctgacacgaggaatatcttacagctagtgcaactcatgtgcgtgctgcaacaactctgatcgctgatggctgtccatatctgtatgcaatggtgcgtgatacttgagtgtctac

SEQ ID NO: 126706 - DNA, 287 bp, Glycine max
  unsure (1)..(287): unsure at all n locations
  Clone ID: PAT_MRT3847_85421C.1
gtcgcangcacgcgtacgtnagctcggaattcggctcgagnnnaacggnnnnnccantgnntcctcatgtnttgcacaaagttncngnnatttcaggagtggnagnacttggattgngaanctatngtgcccacgtcttnnagccccaanatcctgntnacaaanatgtttggcncanagcttcgctttaccatttggttcacacagctgcctnagttnccgccccaattacnaaacaccccaatngttttggaggccttctaacagngggtatnttggctactctg

SEQ ID NO: 126707 - DNA, 459 bp, Glycine max
  unsure (1)..(459): unsure at all n locations
  Clone ID: PAT_MRT3847_85422C.1
gttggaantttgggctgattgatgtgcttgtttatgtgcttgcatggtgtgaaagcaccatagagggggctcgaaggtgaggccaagtgcagaacaaagaagagaacggtcagagatagtgcttcaatatgtgcggtgattggagttgttgccggtggcgtcactggtggtgtagctggcgtcgcccacgggatccatgacgtaaccaggcacaaggccttcggatcttctaagacaaggtacacagggtagattatctcgggaagcgtagtcgcacccagtccgccttcagtggtaggaattccgacatgactctatcagcccgcccttccagaccgcgtagctacggcgatgagcccctccctaaccccagttagtaaaaaccgttacgcaattctataccaactccccgggcgccgataccacacaaagcctccccccaacaaaaaatagaaaacc

SEQ ID NO: 126708 - DNA, 166 bp, Glycine max
  Clone ID: PAT_MRT3847_85423C.1
cgatatcgctgctacaagaccagagaaggatactgctgccacaacagcacacgagggtgctgctgctataatacgacagaacggtagtgctacgagtaagactacacaatggtactgctgcgataacatcacgaaatggtactgctgccgagaactacaccgaatg

SEQ ID NO: 126709 - DNA, 755 bp, Glycine max
  unsure (1)..(755): unsure at all n locations
  Clone ID: PAT_MRT3847_85424C.1
agagaacacagatgagctacctggggagcggcaccggaagcgccgcaggtccctgtcctttgatccgagcctgggtctgtgtgagctgagggagatgtgcagcggcggcagcagcagcagtagcagcagcagcagcgagtccacagagacgccctcgcatcaggatcttgacgatggcgtaagtgagcattctggtgattgcctggatcaggattcagtttctgatcagtttagcgtggaatttgaagttgagtctctggactcggaagattacagcctgagtgacgaagggcacgagctctcagatgaggatgatgaggtctatcgggtcacagtctatcagacaggagaaagcgatacagactcttttgaaggagatcctgagatttccttagctgactattggaagtgtacctcatgcaatgaaatgaatcctccccttccatcacactgcaaaagatgctggacccttcgtgagaactggcttccagacgataaggggaaagataaagtggaaatctctgaaaaagccaaactggaaaactcagctcaggcagaagaaggcttggatgtgcctgatggcaaaaagctgacagagaatgatgctaaagagccatgtgctgaggaggacagcgaggagaaggccgaacagacgcccctgtcccaggagagtgacgactattcccaaccatcgacttccagcagcattgtttatagcagccaanaaagcgtgaaagagttgaaggaggaaacgc

SEQ ID NO: 126710 - DNA, 219 bp, Glycine max
  Clone ID: PAT_MRT3847_85425C.1
gaaggccaacagtgaagctctggccctgaacgtgaaccgtgacttcgacacagagatggtggcattcaacttcgttgttattacccaccgttactcgtaagaggtgagtgggctgagcattcaagcccagggttcgcaccatacgttgttgcacaaagttatgagtgcttcctccgtcaatgaggatgaataccctctgagatgatatcgacccaccaa

SEQ ID NO: 126711 - DNA, 318 bp, Glycine max
  Clone ID: PAT_MRT3847_85426C.1
gcagaccactatcacctttgttttcctcggtctactgagaggcactggggctttccccactggcctggtttacaggatcgtcgggggctacacttgttgcaggaattccgttccctaccttgcgctctggtactttggatgccaattctggggcggttcccttcactaactacaacggggaggtgtctcaagatccttgtgcatagccctgaattatgacgcgcttgggtgagtacaacattggagtctccgacggtagtgaacatggcttcattgccgccgagatcatacgccagcccgaatacatgtgcaacacta

SEQ ID NO: 126712 - DNA, 513 bp, Glycine max
  unsure (1)..(513): unsure at all n locations
  Clone ID: PAT_MRT3847_85427C.1
ctaaaacttttcatcgggatccatggatatattattgcctattccgtggcgtcccgccaatcttttgttttggtaagggtcatcagggacaagatactgaatcatctcgtaagttttccatgtttacaatcaatgctttcttgcactgaagcattattgtagggagcggactatgttcccctggtcgttgtggggaataagagtgacctcaagcctgaacagcgccaagtttccttagacgaaggccgacagttaggtgaagagtttcgctgtgcatttacggaagctagtgctcgtcttgatttcaacgttgcgagagctttcgagttgatgattggggaaattgaaaaatcccagaatccatctcaaccaactggtggtaacaaatgtgctttaatgtgacgatcagcctgcaaaatcatagacccccgttttattttattcctcccttttgttcaagtgttggcgtctcctgtatgtagccataccaataatgcctgngatggaattgct

SEQ ID NO: 126713 - DNA, 628 bp, Glycine max
  Clone ID: PAT_MRT3847_85428C.1
ggctcgaggctaactgatgatgctgtgaagatttctatgtctctgttggatgtgggcattgtgccatatgtttacttctgctggtgacttctgcatgttatgactcaaacaccaaaagaagagcctggcaagcttacagactgcattgagaaggctattacatggctcggacctgcgggcagatatttggtgcaagggccggagggtgatggatatcttataaaggaagcatgagaactacttaattcaattgattatcaggtgaagaagccgctgtgcaagttgtccatagacctttgtgtcagcctgaatgcgccgagcagagcacgtagacgaccgtaccctggactgatgctcgagactatataaaaatatccaatccagatctgaaacccagtgggctttgcatgtgaagaaactctcatgtggagctgatgtaaccgcattacatgtctggataaatgactagcctaaggcattggaatgatgggacgaccttgcaccactgcttggagatgatactggacagggaacacactgggttcagacaaggtttggctagtgtatttgaatcacatttgagggaactcaatgttccgttccatcaggctccagataaagctggctg

SEQ ID NO: 126714 - DNA, 1646 bp, Glycine max
  Clone ID: PAT_MRT3847_85429C.1
cggctcgaggaaggatggtaaaactgattagtttccttccatcaaggtcatggagtatataaagcactcacatgcattggtactattggcaatacaagctcatctcttgggaagaaattagtttaagcctttgctagaaatagcaaagtgagttagagggatggtcggtggacacaagaagaagaaaagatgcagtgagtttgcgtccaagaacaaagaccacaaaatggggaatcattgccgatgtatcctggtttgtcaaagtacaggtcaaggtacagccttggatggacaaattacctcatgtcaggaaccaagacatggaacatcaaattccaggacagtggatactaataccgggttatcaaggtgcagcaaaagttgcaggcttagatggacaaattacctaaggccaggaatcaagagagggaacttcaccccccatgaggaagggatgataattcatttgcaagctctactgggtaacaaatgggcagccatagcttcctatcttccacaaagaacagacaatgacataaagaattattggaacacacatctaaagaagaagctgaagaaatttcaagcagctttggatcctcactcagcatcagactcaacagccagtggtcaatttctaccaaagagctttagtgacagaagaagtactttagacatcagcagcaacaacaacaataatcatggctcgtccattaggcttagtcatcatcaatctcagtcctcttccacaacaacatatgcctcaagcactgagaatatctcaagactcttggaaggttggatgagatcttccccaaagcaactcaacaagggatcatcatcccaagatgatgaagatattcagctccaaggcatcaatgatgatgataaaaataacaacaactttgaaagcactactaagctagtgaaccttcatcatcttcagcacaaagtaagaaacaaagatgagcatcaagagggtggtggtggtggcgtagataacatggtttctcatgaagagtttgattctattttgtcttttgagaaccaaaacaatgctgcttgggacaagtccacttgtgattccatgccagaaaagagttctgaagcttctgctgctgctgatcatcatcatcatcatcatcatgatatagctgctgctcatgagaggaacaatgtcaggcaaaaatctgagaatagtagtggtgctcctccattgtcatttcttgagaagtggctcttggatgaaaacgttggtcatcaagtggaggagatgatggagttgtctccgatgttctaaattaacatggaattgggtcaccaatttaatccctttaagtttgggatgtgacattcaaatgatcatatgatattagtcagatgaaagaagagatcaaaggaatgaaattcttttgaaatctgactagggtttaatccattacaatggtggagagattcacagaagctataagggatctctttcaacttgtaacttggaagtctatgaagaatggtttaattatttcaagtaatactatatgcttagtgcatgttgctctctttgtcttgtagaaaaattacaaattaatgttaacttcagctcaaataataatactacaataacagttatattttcaagaattgtc

SEQ ID NO: 126715 - DNA, 434 bp, Glycine max
  Clone ID: PAT_MRT3847_8542C.1
cccacgcgtccgcccacgcgtccggccctgttgaccatgagaattacaagcatgcatctagcggtttcactgtccaccagaatagtggtggagctgtggggattgaaatcagtggattcagtgaggaagaggttccactttcaaaattgcttgaactggtgtttgaagagggacttgaagttgttaattgtctttcaaccaaagtcaatggcagattactccacagtttgcagtgtgaggttgacaattccggcagtgtagatctatctgagctgagaaggaaattttccgatgtcattccatcacttcgttgttctgcgtaactttgtggactggaaattaacacataacacatatatctgccctttctaactggttcgtaatttggttgtgtgagtttgcttgcactgtatatatttggaacccctttgact

SEQ ID NO: 126716 - DNA, 762 bp, Glycine max
  unsure (1)..(762): unsure at all n locations
  Clone ID: PAT_MRT3847_85430C.1
gaaggatggtaaaactcattagtttccttccatcaaggtcatggagtatataaagcactcacatgcattggtactatttgcaatacaagctcatctcttgggaagaaattagtttaagcctcagctagaaaaaggagagtgagttagtgagttgagaggcagaagaaaagaagaagaaaggtggagtgagtgagtgaatagaaaaaaaaaacccaccatggggaggcctccttgctgtgacaaagttggcatcaagaaaggtccatggacacctgaggaggatattatccttgtctcttacatccaagaacatggcccaggaaattggagatcagtgcctacttgaaaagggttatcaaggtgcagcaaaagttgcaggcttagatggacaaattacctaaggccaggaatcaagagagggaacttcaccccccatgaggaagggatgataattcatttgcaagctctactgggtaacaagtaatactctcaaatatatcatactttttccgtcgattttctcaacaaaaagagaatcaatattcaataccatgacatataattaaagttcacatacttttcattgattaattttgaataaaaaaaattataattttagcatatgcctatctatatgatatgcctgaatttgtgaagttgtttgaattttggagcagatgggcagccatagcttcctatcttccacaaagaacagacaatgacatanagaattattggaacacacatcntaagaagaagctg

SEQ ID NO: 126717 - DNA, 390 bp, Glycine max
  Clone ID: PAT_MRT3847_85431C.1
ccacgcgtccgctcgtgtataattttcttcgttttaacttttttataatcaattttttttcactattatcgttactgttgtcattcttgttctcgctttcgaaacaatcccgattgcttcatcactcttcggatctgaagaataaccttctgcgatctcacgaaacagatccaacaccgtgaaatttccgatttagtttttgacactgttgttgcgccctaaatctgagattttcgaaggaacgaaattggaaccctaatataatcacttctccctaaaacttttcccgctatttagatcccgattcgattatcggttggttttgcttgtcgtctggctctgctttctatggctcttggagcgctcttggatgggcgaggatggggaaag

SEQ ID NO: 126718 - DNA, 264 bp, Glycine max
  Clone ID: PAT_MRT3847_85432C.1
ataaaccataaagcctgtgattttgagatgaggactactaatacatgtcaaaatggataagtttaagctaataggaattgtgataaatacaaatgatgttttgtgctttctctgaaaatagtttttatttttctttttaatggccagtaaattctcttgcattcaaacatatacaagaccttacactgtttgcaaactgattgttgtcatagtgcaaccaatggaatgacatcttaccccttttgttttcaaaaaaaaaaaaaa

SEQ ID NO: 126719 - DNA, 397 bp, Glycine max
  Clone ID: PAT_MRT3847_85433C.1
tacggctgcgagaagacgacagaagggttggcatatacagcctcttatcacattgaaaattaatattgacattcatctagatttgcaaattcagtaaccagtgttaagaaaatgtcctggcatacaggagttaaatggaacttaacccttgtacaagaaacgtgatttctgatataaagttagaaagccaattttaaaacatatctagcatcaagcaggtaataactcatcagaaacagcatctaagacggagttaatgtttacatttccaggatataaatgaacataaaaaaatgacccctttcattagtacttgacaatggagaattattgttgaaaggcaggcaagtgagaaatgtcacctttgcatggcaaatcttagttatagcctcaatat

SEQ ID NO: 126720 - DNA, 306 bp, Glycine max
  Clone ID: PAT_MRT3847_85434C.1
ggagcaggagttaattaacatatacttatcctgtgccgtgggatatctcatgttcacaatcttgaacgtctattatgagatcaaagctgaaatagaacaataccctgcttttgatgtccttcgcaaatgctcgatattgactcagaccggttgatggactacactgtgccggcaggtagaggatatgtgaattcatatcaagtttgcgctgttgtaattcttcctttattagtgggtatacacattcatttgttatgtaagataagatgaagtgtcatgatccatagctatctccctaaatgaaga

SEQ ID NO: 126721 - DNA, 416 bp, Glycine max
  Clone ID: PAT_MRT3847_85435C.1
ggaagggaaatgaaaagtgttttacccccttctcctagttttagtccctttttttccaaatttcccttaatgccggttttatttgggaaaaggatgctttttttcaacaagggattggtgattttttcggggaaggggaaagacatttaaaaacaacccctagataatgaactttattttttaaggaaggttgttaaggtttttttttaataatataagggaaggggggggacctaccgctcttttattgttattttgataaatgggaaattccactggcgaccgatgaggaggaatcgctcttgtttttccttgggaattcttaaaaaacccttttagagtttgtctcctccccttttttagcaccaatttttctttttaaaaatatgcgacacaaaacccaattttttttggga

SEQ ID NO: 126722 - DNA, 645 bp, Glycine max
  unsure (1)..(645): unsure at all n locations
  Clone ID: PAT_MRT3847_85436C.1
gntcgacccacgccgnntccgaaaaaaaaaaaaaaaaaaaaaaaaaaaaaaaaaaaaaaaaaaaaaaaaaaaaaaaaaaaaaaaaaaggaaaaaaagaaaaaaagaaacaaaaattaaaaaaccaaaaaaaaaaaaggaaaaaaacatttaattggggcacctttaattaattaaattggccctccgggggcgccccttttaaggggccaacctttggggtccccgactttatccccttggcctttttttccctttcccccatttgggtaattggggggggggcctaaccaattcgcctttggaaaaactccgggtttccccaatgttaatgggttgggcccttctcccctttttttaccttgggagattgggggggtgccccccaccttaccccttccccttgcaggggcctaactgacggggctttgggcttcctccctttccttttcaaccaggccggggggtttgcccggtacccccaaatttggggttttcttttggggtcctattccccgctttttggttttttctcccctttttttttaacaaggttggtggttttctccccgggccttttacctggggggccttttttggggcttttgttttggggttccgggcccttaaccgggaaaatttttttt

SEQ ID NO: 126723 - DNA, 393 bp, Glycine max
  Clone ID: PAT_MRT3847_85437C.1
gcgcccacgcgttctgatctctctgcttctctctctcagactcaaaaccctattgcgggctttggagtcgaccccgattatggccaacagtaacctacctcgaagaatcatcacggaaacgcagcagtggctcagtgagccaacacctggaataagagcgtacccttccgaagacaatatggcgtatttcaatgtgatgatccttggcccaactcagacgccttatgaacggagagttttcaagtcggaattatatttgccagaagaatatccaatggctgctacaaaggttaagcttctgacaaaaatatatcattcaaacattgataagcttagcaagatatgtcttgacattctgaaagattaatcgagtactgccctttacattcgcac

SEQ ID NO: 126724 - DNA, 233 bp, Glycine max
  Clone ID: PAT_MRT3847_85438C.1
cacatgtatggttcattatatatatcatacctgaaaagaatgtcaggggtagggagaaactatcaattataaatatcactgtggagagtgcaagggaaagaaggttattgaggatatgacagtccttgaatttattgacgagcacgggatgtagaataggcacaagattacattcactggcgaagttaaggaggctggggagagtagtattggggatatcgtcattgtcatta

SEQ ID NO: 126725 - DNA, 228 bp, Glycine max
  Clone ID: PAT_MRT3847_85439C.1
ctttaatacatatacatttcttcttactatattccttccaaaccttacccctatattattactctcatacaccacacttatcaaacttatatcacttatctttacacttcttacatctattatcctcacaccaactaactccttctataaaactctcttaatatattaattataaattaatttaaatatactacaaattattataattaacatttcttaatgtaatat

SEQ ID NO: 126726 - DNA, 289 bp, Glycine max
  Clone ID: PAT_MRT3847_8543C.1
ggaagaaccattctaatacattggttcacttacattggtaaaaaaagatgtccacctcctaatggccaatggttatttaattggagaattttggctaatttaaccaccagggcaaccatttaaatagcccttgaccattccaaaatttttaaaaatttccacaaaatttccggctccccaattaattttctggttcccccctttttggggaaatcttttgttcaatttgtccaaattcaaacttttaaaactaaaatgcaaaaaggttgggaattgggccaatttgtta

SEQ ID NO: 126727 - DNA, 1570 bp, Glycine max
  unsure (1)..(1570): unsure at all n locations
  Clone ID: PAT_MRT3847_85440C.1
cctcgagccgaatcggctcgaggttcctggtctttacgaggtacctgaggacatgattacattctaacaccacacattcctgttatttctttctctctgcgttcttcttcaatgcaactctattctgttcggtgacacaacatcactctgaagaacgtcgcacgcaccacccttctctctcttcaacaactcagctctcagaacagatacagtttccactgagtaaatcgcaatgcaggtaactgagacgaggactgttcaagttaagcagctttcagatctagctggtgtgagagagattcacgagttcttctccttttctggagaaatcgagcatgttgagatcctgagtgaagatgggaaatcaaagactgcatatgtgacatttaaagatcccaaagcccttgaaattgcattattgttgtcgggagcaactatagtagaccaggttgtgaagataactccagctgagaactatgtaccaaatcgtgaaatggaggaagtaagggtggtggaaaatgctataaatgttgctccttctgagaattctgagaatgtctccttgagtattgaggaggggaaagccagccccaccaatagaagaatctaccttagtaaagcacaagatgcagttacaagtatgctggcaaaaggttcagcaataagacaagatgcagtgaacaaagctaaagcatttgatgaaaagcatcagttgactgccaatgcatctgcaaaggtcatttctttggacaagagagttggactcacagagaaattgacagtaggcattgctgcagtgaaccagaaagtcaagtctgtggatcagaggcttcaggtttcggataagacaatggcagcaataattgcagctgagaggaagataaataacactggatcagctgtcaaaacaagcagatatgtgactgctggaacagcatggtttaacggtgcttttagcaaggtggcaaaggctggacatgttgcaagtactaaaactagagaaaaatttcatttggctgtttcaaacttgacagcaaaggaaccgtcagtggctgctgcataggccacaatttttggtaatcaagtcatttcatcaggtctttcagaacatgtgtttgaaactatttggtctttcagagcatgcgctgctttctttctgcccttcaacagttagatgcatgtggcaagtgcggtgattcaatttaatcctattttttgtattcttttgtcactctgttgttttagttgttgcttctatatcatttagcacgagtgattttggcttttttcccttttgtgaaaaggaaattataggtgtgatgctactgcatttcttctgtcaaagttcaaaaaaattgtgcgtgtataacttgacatatggttcaaagatttccgtgggaaattatcatcttgcagactacaatttcattgattagctcatgctattcatgattgaaagtgtaaaaaaattaaggaaaaaacttagacgtagttccataattgtttttggggtttgntttccaatcataaattgaagtttcagctcaataatctatgttaatctttaacg

SEQ ID NO: 126728 - DNA, 651 bp, Glycine max
  unsure (1)..(651): unsure at all n locations
  Clone ID: PAT_MRT3847_85441C.1
ctttatctgtggtttcttattcttcttcttcttcttcaatgcaactctattctgttcggtgacacaacatacatcactctgaagaacatagcacgcgtggcccctttctttctctctctctctcttcaacaactctgctctcagaacagatacagtttccactgagtaaatcgcaatgcaggtaactgagacgaggactgttcaagttaagcagctttcagatctagctggtgtaagagagattcacgagttcttctccttttctggagaaatcgagcatgttgagatcctgagtgaagatgggaaatcaaagactgcatatgtgacatttaaagatcccaaagcacttgaaattgcattattattatcgggagcaacaatagtagaccaggttgtgaagataactccagctgagaactatgtaccaaatcgtgagatgcaggaagtaagagtggtggaaaatgctataaatgttgttccttctgagaattctgagaacgtctnctcanatattgaggaggggatagccagccccaccaatagaagaatctaccttagtagagcacaagatgcagttacaaatatgctggcgaaagggttcaggcatagacaagatgcagtgaacaaagctaaagcatttgatgaaaagca

SEQ ID NO: 126729 - DNA, 483 bp, Glycine max
  Clone ID: PAT_MRT3847_85442C.1
aaccacaccacaaaacctaatcctttagttctaatccataaattccaatggaggcccgaaaccagaacccaaaattccgggtgggtgaaatctaaaaaggcaaaaccaaaggggagtgtagttaaggtccaaacaaccaaagggggggggcggttccaaaggttttgcaattttttaacattaaaaaccctggggcctggtaggcaataaacttaatcccctgcctttggcaaacgttgccaattccaataatacggataaacccgttggggtttccaacttaaccctttgaaacttctttcaacacctgaaaagcataggggcaaccaaccttaggcagtttccacatggcccagtagcgtccatggaataatccgggggacctgttgtgttaacggaacacaaacccgtcctccacctcgaattccaggcagggattccttcccttcctaagaaggttttttacttcttttgccaatgggg

SEQ ID NO: 126730 - DNA, 576 bp, Glycine max
  unsure (1)..(576): unsure at all n locations
  Clone ID: PAT_MRT3847_85443C.1
caatctgtttcggccggtcaccgggcttccggcgccgcgatgttgaaagaatcttggacgcattcttgtcctctcaaacctcacaagttgtataagacgcagtacttctcttttttgaagaaaaatctgaaattccaacaactcatgcaagggccggcattataggactaaaggagaactgcatagaactcctattcatctgtttccggataaatagcgcagcatataggccgtttcacaacacgcccgctcccccgaaatacgaaacataatcttgatggtacggcctatcgtgcaggataactaacaggagggtattttggaagactttcctggaagtaaagaattccagccagttgttttggttctgtcaaggatacaactggaagaactgccagcatgggagcagatacatgcctaggctacatcaaaagctggcctcgccaagcctggagtgccctagtgaaaagtgcagcggcaggtggattacctgtatntaatccatctccctacatgccagaatgaatgagtgtgtgatgcattagttattcagtgccgattagccacaataatgga

SEQ ID NO: 126731 - DNA, 1256 bp, Glycine max
  Clone ID: PAT_MRT3847_85444C.1
cacgagaacaagtacgaccacaactacatgtactacattgggagcttgtcggagagtcactcgcagaacttattcttctcctacggcagggcctatggtgggggcggtttcgccataagctacccgttggccaaagctctgagcaaaatgcaggaccgttgtattcagcgctatcctgctctctatggctccgatgatcgaatgcaagcttgcatggctgaactcggtgttccactcactaaggaaactcggttttcaccagtatgatgtgtatgggaacttgtttgggcttcttgcagctcatccagtgactccattggtgtcactgcaccaccttgatgtggctgagcctatcttccctaatgccaccacagtagaagccattagacggctaaccattccgatgaagcttgactcggcatctctcattcaacaatccatttgccatgacagacataggagatggaccatttcagcgtcatggagttttgctgttcagatatttcgcgggatatttacacagcgggagatggaaatgccttcaagaacatttctcaattggtatagaagagcagaccttcaagaacattcttgaattggtatagaagagctgattacactgcatatgcattcaacacacgtccagttagccgaaatccatgccagaagccttttgtgttttacttctcaaaggctaaatacaattctacaatgcaacaaatagtgagtgaatatgaaaggcaccgcgtccctcatcctgattgcaggtggaagatggctaatcctgctgcttttgacaaagtggaggtatacaagaagccagatccgcatctatgggacagagctccgaggagaaactgttgcagagtgaggaagtcaaaggagaaagggaccatggtgatagatgtggatatgtgtagggatggtgaggtaagcgaaacataaaggtgatattaatgttactaataaattacatgtctcgtggagtttcttaaaaagcatatttctttatttattgggtagcccactctgagaaatttttgtaaattttccccgggtttcactgaaaagggttgagagagttgggggaaaggtccatgtataaagagatttgtcatttaaactaaaatgtagaggggatgggcgttgggagaaggataatttgtaatttacgtgctattaaagagaatttttagatgcgtgattaatgcgccactcttctattttctcatgctttaattatgctttcttctcgt

SEQ ID NO: 126732 - DNA, 479 bp, Glycine max
  Clone ID: PAT_MRT3847_85445C.1
gttgaaagagagagagagcgtagggtagcagagaaagagaaaatgaagaagtcttcgggaagcgcagctgacaagaagagggtgcgacggtcctccgccctagatcccacctccgacgcccctccaagggttagggtttctaattcccatctctatttttttattcccaaatctctctctctactctgttgctctcattgttaatctgactcgacgtccattttcgttgcttcggaaatgtctctgatcaaattttcgatttcaattctagggtgggttttgggtttcagtaatgtactgattggaaccgcagaagaactatgagcatgtgtgaaataagttatattattttgtgactgtgatagtgtcaaattttcaggtcaatttttgcattcctccggatagggttttgctgcgaacatagatttttcatttttcattttgggaagcttgaaattgtctgatcttcaagttttatt

SEQ ID NO: 126733 - DNA, 329 bp, Glycine max
  Clone ID: PAT_MRT3847_85446C.1
aaagaacgctcccgaagcgcacggcagctcacatgggtctgcctgttgaaattccagcagctcgctgcgtccctcggctggctctcccacggcctccttttcctcctccgcaccgcccaccgccggatcaccgactccgcgtcgttccgcggcgacacctcgcgcctctaccgcgcgatccgtttctttctcatcacagtcctcctactcctagggttcgagctcgtcgcgtttttcaaaggctggcatttcagccctcccgatccgagcgacgttttgggcgtcatcggcgtcgtttacgccgcggggctcgacgttcgcgccacgta

SEQ ID NO: 126734 - DNA, 254 bp, Glycine max
  unsure (1)..(254): unsure at all n locations
  Clone ID: PAT_MRT3847_85447C.1
ctggttattcaaacagngaacaaggaccncaacaancaaggcagcatcacacgggggcaccgccgacccccgaanccaaacggcaaaggcaaaacacagaagaccccgccaggaaagaaggaaccngaacaaccccaagcacaaggcaagagcgcacaaggcccccgggaggaaaaaaaccagcaanccgggcagcgagggggacccccaaaacaaccaaaaaaccccgaggagacaaaaaaccaaagcaggga

SEQ ID NO: 126735 - DNA, 340 bp, Glycine max
  Clone ID: PAT_MRT3847_85448C.1
cttttaaccgaggcaaaactgggatttatacactatatatacaacatcttatggaccaagagagtactacaccgaaaacgatgcaccagccaaatataacctatacaaacctctaaagaatcaaactatatgatctgctgtgcaaggtttgttagcctgagatgatgagaggtaccttgcctcgcagaacatacaaagttacagtattggatgaataacaattattgcactcgtgaaagataggacgaaactcacatatctgatcaaacaagatgaaactcgcaacagctgcggtggaaaatgctaattgcttctcaaactagttgcaggggatcgaaac

SEQ ID NO: 126736 - DNA, 463 bp, Glycine max
  Clone ID: PAT_MRT3847_85449C.1
cacaaatctatttccattccattccctcagagagagcaagatcacccttctatagagagaaagcacactcacacacacacaaaacaaaactctgcttcttatactaactgttcttctgtgtccacagaaaaaccaagtgaatttaaggctagagctgggatcacagtgaagaacatgatcaacgaagattcctaagagaccatcgtgaagcataatgaggctcttactgacaggattggaaagaatgttgaccttgaacttgttagcactgatattgatccaataccaaatttgcaaagaaaagtaatcgatcagtgcttaaggattggtcaaagaagtgcaatcttaatgcacagagagttaattacacggcttgatccatgattgactctagatctggcgagccaggagctagtactgtgacatacatgcaccataaagagttcttcttgatagcataacc

SEQ ID NO: 126737 - DNA, 367 bp, Glycine max
  Clone ID: PAT_MRT3847_8544C.1
taatatttgtcatttctgccgcatgataattccgcccgcagcgaaagcgttcgctctgctgatccaatcggcctcagcagacgacgtcgttgtgctctctgaagataacttcaacaagggcgtccgctatgacagatccagctctacttgcgctctatgctccttggtgaggacactgtagagagcctgctacacaatatgatgagcttggtttcacatccaagaaacccgaatatcctttacttggccaggcttactgtgatgagcataaaacctcgtgcagcaagtttggagtctctggatacgccacaatccaatggtccttcaaaagaatctctcaacctcaaaggtatgaagggcccccccc

SEQ ID NO: 126738 - DNA, 958 bp, Glycine max
  Clone ID: PAT_MRT3847_85450C.1
cgccgagtaccggccgatttccgggtcgaccggcggcagatatctctaataatacttcttcagccgtccaagtaaagaatgaaccaacctatccaactatggacattaatgctaaaaaatctcgggaactggatgttcaagtagaatctcaaggagcgcaactaaatcagttaccatcatccagttctaatgctgttagtcaagaaacggaaagatcctcacttcacttacaaggccttaataaggagcaacaacagcatctacatttcccttcagcatatggaacagtggtggtaattataaccctttttcgggctcaaccagtagttccacatcatctatcagaccacaaccttttgattcacacatgaggcaaattccacatcagagcatcagtccaaatcaattaggtgggtcaacacagggtttgattggtttgacaaaacttgatcagcaaaattctttcaatgatcccaagagaatgcctggtggatttgtgtcccctgtggcaaacaatacaacatcacaacaatcttcaaattcttggcaaccatcagcaaacaaagaacaaagttcaggctcgttttcatctgttccatatgtaaaaaaggagcctaatgacctgtctaccgagcagcaacacaggcataatttgtctaaattgcacgggctgcattctgttaattctgtgcaaaatgaacagggtagcagtgccaatcaaggcaccctaaaggaggagttttcaggaggctatccagcatccacaagtatgccgcatacaacatctagcttgctgcctctcaattctgcttccccttctgtatctcaacttgaccctagtgccactttaagccctcagatcccatcaaacacgtctgttataaatgcaaggacacctctgaaaaagccttctcctggccagaagaaaccaattgaagcacttggttcttcacctcct

SEQ ID NO: 126739 - DNA, 415 bp, Glycine max
  Clone ID: PAT_MRT3847_85451C.1
ttctgccttttcttaccaattaaagtggcaaaggttgaatattaatgaatcgtatcaccaaggtcagtctaaaattggtgatgcatattgatcattagattatattataaatgtttaatattaaacataaaaaatatcttttctgagctatcatataatgttatctatattctcatgtagcgtaaagttgactcaaaatgtcaataatgtttgttagctagttggatccacaacccacatattgacactttgtttcaagccaatgctttataaggtgtaacttatatatagactttccttttgcatgcttgtctctcaatgttatcctattattaattctaatgtaacttctagacctccttaccaatcaaagtgaccaaggttgaatgttaatgcactattacaaataacggat

SEQ ID NO: 126740 - DNA, 397 bp, Glycine max
  Clone ID: PAT_MRT3847_85452C.1
aaggccagaagcctttttgttttgatgagttgaaaatttgaagttttctagccaaaaacttcaagcggaaatttataacatgaactacatgctcccaaactctatcgttaccaaaatttgtaccccgagaggctttaccgaagcgggaaatttaccccattagacctatacacactaaattcgggggaatcccctttgaagagcaattggaaaacttctgtatttgaaacagaatcctcgcacacatcaaagcaacaaagtttaggagaactccgtttttgcaaaaaagcccagtctgtgattggaaggacaagaacttgtacgggggggcgggaagattgtagtttaaagccaaagagctttcgggccaatttaatccactagccaagagggcact

SEQ ID NO: 126741 - DNA, 325 bp, Glycine max
  Clone ID: PAT_MRT3847_85453C.1
acgaggttccatgtttagaaaattcatttggctttgacagatatgtgtgtactagcccactttctttaaaagatttctctgatgtggtaagctcaaattatggaggctatgaattgaactcgtactagtaatagtatatgatgtcctttcctctgttcaggatgttgtatttctgttgataccattattaaaatattattaggtaatactgttgcattcaagtggtgtctaaccctgcactttacaagtaacgtaagttgttttggtttcaaataatagacgtttggtttgtaggtatggtttaaacatggggaagatgcatctg

SEQ ID NO: 126742 - DNA, 435 bp, Glycine max
  Clone ID: PAT_MRT3847_85454C.1
gtgaatccaaggtcagcctaaaaggtagctataggccaggttcatatccatcacttggaaactgatttgacagatatgcagtccaatttgaattgggagaccaatctccccccttacgtcccagcggctaccgtcaaaggcctgcaccaccatggaggtcggcctcaggtgtaacgcgttgaaaggcagtttgtccaatgtgcttttgggcatgacattcagcgacgatccgttgtcgataagaatcttggccacgatgtggtccaaacacttgatggacacatgtaaggccctattatgcccctggccctcgatgggtatctcctcatcggcgaaggtaaggtaattgttggcagtaatattgttgatgatgccctcgaagctctccacagagatgtcttgggccacatgggcttcattcaagattttaccaat

SEQ ID NO: 126743 - DNA, 331 bp, Glycine max
  Clone ID: PAT_MRT3847_85455C.1
cccacgcgtccgaagaacccagcgtttatgtgaacactctgaatagatatatacagactagttatttaaactggggtaggcctaaccagcagctggatggcataagccctagccttcgaccaactcgctatagagcttgctctcaaacactgaattgccaaggctcgtgcttggattgacaacagctaccctgcacgtgactccgacgacgatgctatttgtagagacacctatgacaactttcacgactgcgtcgattctaaacactgcggcgtacaacctcacgatgctcacactataaccacctgctgcccatgacgtgatctctcac

SEQ ID NO: 126744 - DNA, 394 bp, Glycine max
  Clone ID: PAT_MRT3847_85456C.1
cccacgcgttcgcccacgcgtacgcccacttgtccgcttacgtgttcacgcaattatcggggaaacttgcaaagtgtcacggggtcaaacctcatgaatggacagatcatgtacatgatgatgctactgcgcgcgactttgcatgtgttcttctgtattattgaccgtgtagtcgccaacatgaactctgagttgggtacaaagcgctactgtctaaaaggaacaatggcctgcgtcgtaatgccactagatctcagaatgggagatctacttgttcgcggaatgcataaactccggcctgaagcagggcgtcatattgctcgtcgggcaagagggcatgttcatggagcgcctagagagcgagtactccgttcagctgaggatcaaggtcttc

SEQ ID NO: 126745 - DNA, 236 bp, Glycine max
  Clone ID: PAT_MRT3847_85457C.1
gggcaccctgtcattaattgatccttttgccgcctggaaggctcactgactcggatcactgactcactttactggaacaagcccaattaatctatagatttacattaactgaggaaagccactatactgcttggtaggagggaagctcccaagcggaggtagcgaagagaggcctagagccccacccaagcatgaagcaaccggtattatactgaaccctatacccaaaccgcctg

SEQ ID NO: 126746 - DNA, 365 bp, Glycine max
  Clone ID: PAT_MRT3847_85458C.1
cgcacttggcttgaggattgggctcgagaacaaatgcattcccgaagttttctttgcacctctcttcacagggattcatggggtggaagcttaggctcaacactgccttcacattgaatacgacagctagtggactgattgtggcttgggagcagacgcgaagcacaggttcccttgcgctggactttgaccggacttttaattgacgtgtaaataactgggctatagcaacacgatatgaactccttacagctttgtcgctcctgggttgctccgtgcctgagtacggcctcaagctgaaggctattatatggtaagtcatgaaacacgcgtggatcacgggccagggcaaggccccttgctac

SEQ ID NO: 126747 - DNA, 267 bp, Glycine max
  Clone ID: PAT_MRT3847_85459C.1
cctcatttcactatcggtttcttcaaaaaccgatgttgaaagcaagagtttaacatcagttttaaaaaaccatctttgaaagggacaagttttgcattataattctcgtgtactctcacagtctcactccctctttctctggcgtcctctcattgtttctctatcgcaccctaatcactctctttccgtctttgttgttacaatcatctttcgcgctttccttttatctgttgttgttgtcaaatctgtgtcctacgtcgtcgacgt

SEQ ID NO: 126748 - DNA, 524 bp, Glycine max
  unsure (1)..(524): unsure at all n locations
  Clone ID: PAT_MRT3847_8545C.1
ggctcgaggagccccgcgaggccaaggcaacactcatctgaatttctgaactctcaaaaatggaaacgccaactgtaacgatacctaaaattggaccaaaaccgtcaaagaaattgaagcttcccacaccaaaggagctgatatcacactatgagtctcagggtatggactcgcaagatgcgtccttgaaggtcatcgaggatcttcagaaggcgctgtttggagtaatatcctctggcaaaggtaaacatgacaagctattgactgagtcttctaggaagattgatgcaattagcaatcgactcactgttcttgacatgaagcttgattccaaacctggttatgttgagacttttgcaattgggcttgcctcgggagctgccctgaaagggattggtgcaattgtgcctcatattattgcccctcttttccagatatggaactctgttttcactgccactaaatcttccccccaatgatattgaactntgtaattactagttagttngtagaaatattttttt

SEQ ID NO: 126749 - DNA, 164 bp, Glycine max
  unsure (1)..(164): unsure at all n locations
  Clone ID: PAT_MRT3847_85460C.1
ccggattcgctcgagtgcatttagcttatgttatanaacattattatcatttttttaagaaaatctccttaataagatgccgagccaccagaaatgataaaagggtatagaacatacccaaaaatgcactcgagcctttaacgagcttactttcgcctctttca

SEQ ID NO: 126750 - DNA, 315 bp, Glycine max
  Clone ID: PAT_MRT3847_85461C.1
gccatttgttcgccgacacatccggagattacgaggatgcgtagtcttagaatgtcggtgctgataactcgggaacgaactcaaggaggacgctggtgtaagaacactgaaattccactacatttggagaccagtgcatgggaggacaaaaagctgctgcttggcccagacttcttgaagaattggtatgtagcatcacatgtgaaacactgaacacaactgtaattctttatggactgctagagggacagaaacaggtccggcacattatgtagcacatggtgaccattatggggacaactgtagggaccttgg

SEQ ID NO: 126751 - DNA, 1003 bp, Glycine max
  Clone ID: PAT_MRT3847_85462C.1
atagagcacccagagaccatgcaacaacagcagcagcagaagagtcatggtggacgcaagcaggggcaacaccagcagcaggaggaagaaggtggcagtgtgctcagtggcttcagcaaacatttcttagcacaatccttcaacaccaacgaggacacagctgagaaacttcggtctccagatgacgaaaggaagcagatcgtgacagtggagggaggcctcagcgttatcagccccaagtggcaagaacaagaagacgaggacgaggacgaagaagaagatcaacctcgtcctgatcaccctccacagcgaccaagcaggcccgaacaacaagaaccacgtggaagaggatgtcagactagaaatggggttgaggaaaatatttgcaccatgaagcttcacgagaacattgctcgcccttcacgtgctgacttctacaacccaaaagctggtcgcattagcaccctcaacagtctcaccctcccagccctccgccaattcggactcagtgcccaatatgttgtcctctacaggaatggaatttactctccacattggaacttgaacgcgaacagtgtgatctatgtgactcgagggaaaggaagagttagagtggtgaactgccaagggaatgcagtgttcgacggtgagctaaggaggggacaattgctagtggtgccgcagaactttgtggtggctgagcaagggggagaacaaggattggaatacgtagtgttcaagacacaccacaacgccgtgagcagctacattaaggatgtgtttagggcaatcccttcggaggttctttccaattcttacaaccttggccagagtcaagtgcgtcagctcaagtatcaaggaaactccggccctgtggtcaacccataaataacatcaagcatatatgaaggtgtggtgaggccatcttatattaaatattatcaaaatatattttgcgtaataataaaactatggcctatgtattttaccacccttcgtccca

SEQ ID NO: 126752 - DNA, 317 bp, Glycine max
  Clone ID: PAT_MRT3847_85463C.1
acgagggtgaattggacttccggagatagcaaaagtgatctttgaaaaagccccttttgacaaaggttgcccaaccaaattgttatatatacgtctgaaagaatagttctacatatgatagatgttaagatacatacgaaattcaaaaaaggaaaacacttaaactagggggaggggggggatcatatttttaaccacaacttggccaaacttattggtgtgtgcatcaattatattttatatatcagcgagtgatttgtcttgtgattttctaattaataacatcttcactttgttaacaatgctatcaggtgtga

SEQ ID NO: 126753 - DNA, 2086 bp, Glycine max
  unsure (1)..(2086): unsure at all n locations
  Clone ID: PAT_MRT3847_85464C.1
aattcaccaactccttcaaacttattaacactttccttagttcaatatggggaagcccttcttcactctctctctttcttccctttgcttgctactcttgtcgagtgcatgctttgctattacctccagcaagttcaacgagtgccaactcaacaacctcaacgcgttggaacccgaccaccgcgttgagtccgaaggtggtcttattgaaacatggaactctcaacaccctgagctgcaatgcgccggtgtcactgtttccaaacgcaccctcaaccgcaacggcctccacttgccatcttactcaccttatccccaaatgatcattgtcgttcaagggaagggagcaattggatttgcatttccgggatgtcctgagacgtttgagaagccacaacagcaatcaagcagaagaggctcaaggtcgcagcagcaactacaagacagtcaccagaagattcgtcacttcaatgaaggagacgtactagtgattcctcctggtgttccttactggacctataacactggcgatgaaccagttgttgccatcagtcttcttgacacctccaacttcaacaatcagcttgatcaaaaccccagagtattttaccttgctgggaacccagatatagagcacccagagaccatgcaacaacagcagcagcagaagagtcatggtggacgcaagcaggggcaacaccagcagcaggaggaagaaggtggcagtgtgctcagtggcttcagcaaacatttcttagcacaatccttcaacaccaacgaggacacagctgagaaacttcggtctccagatgacgaaaggaagcagatcgtgacagtggagggaggcctcagcgttatcagccccaagtggcaagaacaagaagacgaagacgaagatgaagacgaagaatatgaacaaactccctcttatcctccacgacgaccaagccatggaaagcatgaagatgacgaggacgaggacgaagaagaagatcaacctcgtcctgatcaccctccacagcgaccaagcaggcccgaacaacaagaaccacgtggaagaggatgtcagactagaaatggggttgaggaaaatatttgcaccatgaagcttcacgagaacattgctcgcccttcacgtgctgacttctacaacccaaaagctggtcgcattagcaccctcaacagtctcaccctcccagccctccgccaattcggactcagtgcccaatatgttgtcctctacaggaatggaatttactctccacattggaacttgaacgcgaacagtgtgatctatgtgactcgagggaaaggaagagttagagtggtgaactgccaagggaatgcagtgttcgacggtgagctaaggaggggacaattgctagtggtgccgcagaactttgtggtggctgagcaagggggagaacaaggattggaatacgtagtgttcaagacacaccacaacgccgtgagcagctacattaaggatgtgtttagggcaatcccttcggaggttctttccaattcttacaaccttggccagagtcaagtgcgtcagctcaagtatcaaggaaactccggccctttggtcaacccataaataacaacaagcatatatgaaggtgtggtgaggccatcttatatgaaataatatcaaaatatattttgtgtaataataaaactatggcctatgtatttaccaccctccgacccagcctatgttaatatctgagtggcgttgtacctttgaatcgccttaataaaatgtcagtcttcaagttttgtctttaaaaaaaaaaaaaaaaaaaaaaaaaaaaaaaaaaaaaaaaaaaaaaaaaaaaaaaacaacaaaaaaaaaaaaaaaaaaaaaaaaaaaaacctgggggggggccccggccccaatttccccttataggggtggaattacccccccctcctggcccgggttttaaaaacgnggggatgggaaaaccctggggtttcccaaattaattggcttggaaaaaaatccccttttcccaggtggggtaaataaaaaaaaggccggcccgatccccctttccaacagttggcgaatcttgaaggg

SEQ ID NO: 126754 - DNA, 442 bp, Glycine max
  Clone ID: PAT_MRT3847_85465C.1
attcggcacgaggtgatagagagagatagagagatagagagagtgagagagagtgagagagagtagagagagcatgagtagagatgagatgagatgagatgagcagtagtgagcagtagtagagatgatgatgatgtgtcgagggctcgtatacgctacattacgctgatgtactgctctggcagtcctttcgtgttcttggcttgtctcatggtagcaatcgttccatggtcctagtatcagcgtctttgcgtcaaagaactgaataccacttgagtatgcttggagcaaagtattcggttgatcagtatgtgttacagatgtgtttttgccgcatctctgcccttggaaggattctctttcttgaattcgagttatgtcgttcttttgctttgtaatttccccttgcttctgtttttccaatgcaatgtcttgtgctcac

SEQ ID NO: 126755 - DNA, 310 bp, Glycine max
  Clone ID: PAT_MRT3847_85466C.1
gctccaactgttacagaggtactcatcactgcactggcttgggtcacaagagaagggcacacagtaaagaattcatatacagatgcttggctgtcagagtcctgtatagaaaatgtgatacgactctaataagtactggatctgccactatattgttgccatgatgagaatctgatcacactgctgatgcctgagctgagcggctccctagaataatgtgagacagtccatcagctccgtgaaatgaaatcagacgacactctctctgataaattatgaagtgctgtatgcaaaagtgatgattaacacc

SEQ ID NO: 126756 - DNA, 1189 bp, Glycine max
  Clone ID: PAT_MRT3847_85467C.1
ctgcgagaagacgacagaagggatatttcaaattactatatgatacgggaattttctgcaccaatctaacacgtacaaactcacgtgtttacatattatttgattgaaatgttaaattttaaaaaataaaaaacacaatcttgacggaattcaaaacaattgcagtattatacctattatcccaacgatcttcttctgcttgagccatggcccttaacatttgcttgagatttttggcactagctgcccttgcatttctcgtcacaatacaaggaactcttggagagacattagaatgcgagaatttgagccacgacacgtgcgcatttgcggtgtcatcggaagggaaacggtgtgtgcttgagaagcgtgtgaagaggacaggggaagaagcttacacgtgcaggacttcggagatagaagttgaaaaacaaattaaggggcatattgaaagtgatgaatgcataaaggcttgtgggttggacagaaaatcctttggaatttcatcggactcacttatggaacgtggctttacacaaaacctttgttcccctcagtgctaccaaagctgccccaacatcgttgacctatacttcaaccttgctgctggtgaaggtgtgtttcttcccaaattgtgtgcagcaaaaggtgcaaatgcacgtcgacaaatggctgagatcaaaagctctggtatcgtggcaccaggaccagtgcactctcttcaatttaccgcaatttctccacaaccttttgatgctgtggagctcgcagatgaacctgcggttgctccattcccgcaatactaagtactagtaattttcttaatgcatgcaagaaataattaaaatgagtgtatttgatacttagtgggtgtttagtttgtaataaggatgttgcgccgcacaccaatatgtagctacgtagggggtttggaatgtgtcattagtttatgtattctgttgtacaaaattttaatgctgaaagtggtctctcagactcttcgcattgaaaatgagtctagctagctagctttcattgtttttgttggttaatatatagtgattgctatttgattggtttgaatagtaatcaactcgaattctttatatacatggttaagaatttaaatttgaaattcaacttttaattcttcatccttatatgaaattcaaggttagtctttcaatta

SEQ ID NO: 126757 - DNA, 549 bp, Glycine max
  Clone ID: PAT_MRT3847_85468C.1
ttttttttttatttttttttttttttttattttttttttttttttttttttttttttttttattttttttttttttttttttttttataattaatttttttttttttttttttaaaagaaaccccatttttattttaaaaaaatgggggggataaaaataatacaaattgtttaaaaaaagggttttttagaatgaaaaaaacacagaagaagaaaaacccccctattttatagggggggggggccatgtaacttattataaaaattttttaaaaaaaaaaaagatttttttttaaaaaaaacatgtggagggacggggttttttttatgcaaaaaaatggaaagaaggctgagggtatatagaacaaaaagggctttttatggctgggaaaaagagaatttttctttataaaaatgggggggaaaaggttaaatttttgtgctggctttgttaatttcaaaggtgtggctaaaaaagatcagacaaggtcttttctcttgttttaacagtataacacttgccgaaagggaaaatcaatacggggggag

SEQ ID NO: 126758 - DNA, 265 bp, Glycine max
  Clone ID: PAT_MRT3847_85469C.1
cagggcacctgattactcattcagtgcatcagagtcgcagcgggagatgcctgtgccacctcctctctcgcccgtgtatctcgaagtagagctaatgtgctttgagaaagagaaggagtcctgggatctgaacactgcggagactcttgacgctgctggagggaagaaagaacatggaaatggctcgtttaaagctactaaatatactggaactaccatgagatatgacaacggcatgaacttcatacaatatgatttctccttt

SEQ ID NO: 126759 - DNA, 402 bp, Glycine max
  Clone ID: PAT_MRT3847_8546C.1
tctcccacgcgtccgccccacaacagttcaggacatgcacttgctacaaaccaacgatgtatagggcatcactctatgtttgctgaacatatttctcacagagattgtgtgatgtctcgaatcatgagaagaaagaacacactctgaacccatggaaggtggtgtaccacaagctgctatatatggctgaacagaatgttcgattatataatggaagaatgcttatattgtatcctgcgctccttatgctggaattggaagcctgctctttggttatgacactgatgatatttttggggctctttcgtgtatcaagcatgaagctatagattgtgctaggaagactaggttacgcgaagtcatatgagagactgcattagcttaagcaattctaggagcttg

SEQ ID NO: 126760 - DNA, 493 bp, Glycine max
  unsure (1)..(493): unsure at all n locations
  Clone ID: PAT_MRT3847_85470C.1
tgtcctttggttttgttgtgtattttanattacaccgcggtagctatcaaaaaccatttagattacaaaaagaacataaacctaatttatacaaacgagttaggttacatggtattagactattagtcaaaagaaaaaatcaattatactacccgagaccaaataaaatatatatcttatgtgagtttaggatagggtaacaaattaaaatagtattgttaaccatatatacttacacaaggattttctgcaatccaatcaggaatgctttattgtggaaaactgatatactgctccctggcctgctctagactcataattgcaagttgtgtccatgcaatccacattttgatgagtggtatcatcttctacgatagtttcatatgaagattgaatcgaaacaaagggacagatctcaaatatgtattttccatctggtactgagtataactccatatatagccaggggtgctgaacagaacagtcccatccg

SEQ ID NO: 126761 - DNA, 421 bp, Glycine max
  Clone ID: PAT_MRT3847_85471C.1
caggctcgtcgccatccaagcccatccccatcagcatctcacgggagacatggcctcgcccactggctccctctacagcaactgctccatggagtccaactctcgccgcggctcttcgtgtgcctatccttcctggcccactggtccttcactggaataccgcaacccatcatcgtatatcagcgacgaggacctcttcggcgaagatttcgaggacgagtactgccccattctcaagaaggcaccagcgccaccacgagttcctcccatggcgcaggccttaccagagctgcctcctctctacgctcaaaagaagccaaagacccagcgcaggcgcaagcaacggaagcagcgccgcacttttgcagcccatgactcccatcaatgagtcgcctgagcagcaagagtaagcaacatcagc

SEQ ID NO: 126762 - DNA, 266 bp, Glycine max
  Clone ID: PAT_MRT3847_85472C.1
tagaataatcttacacataaacaaacacactaaacactcacagtgacaatttacactctcttaccctattttttatccttctctttttcttaaacacacaacccctcctattatcacaaccataactcatatttcatatacattttcaacactatttaacctacactacttacttcattcagtacacttatcactcatcaattatctctatacactaatctatacaacacacaatacatatacactttatgttattcataactctc

SEQ ID NO: 126763 - DNA, 507 bp, Glycine max
  unsure (1)..(507): unsure at all n locations
  Clone ID: PAT_MRT3847_85473C.1
tggaccaactgggaagctctgtctttcagtaagagagagagaatctagagagagagagagagggtttttattttattttaataagattgtgttgtgtttggttctttatttgttgtttactttgaagtggggtgtgtggggagagaaagttgggtttctctcgcttgtatctggaaaaagtctcgattttttcaagtggggtttgagggatttagggtttgggttgttgggtcgtgagcggaatcagcaaccatgaatatgatgcgaaggttgaagagcattgcttctgggaggacttccatttcttcagatcctggaggggattctaactcaaaaagagccaagtttgaaccagaaactgaagtgaaggctgatgagaaaacaaataccactgagacaatctgcacagatcaggaacagcttatagacacctcanaagaaacttccaatgtaggcacatccgatgtatctacagtagctagaactgagaagtcgggttttgaagag

SEQ ID NO: 126764 - DNA, 418 bp, Glycine max
  Clone ID: PAT_MRT3847_85474C.1
tcgcccacgcgtccgaccacgcgtccgggaagagtctcgtcattttgtgagagagaaaaaaaaagcatttcaaatggcccacgggatcgagcccagaaacaaaaaataaagtaaaagtgagagaggagtttgatgttttaagcagggaatccaagtgagagtatgttgaattgatcgtggatgacaaaaaatggaaatcggaggcagaaaactgataagcggagaaacgatggccgctgaatcggtgacgcagtcagcacctccgacgtgatcaagaggaagaatcactttactcgaaaactcgagaatacccttcgcacttgctcttctgtttgacgacgccgtgctcgtctatctcataatcgcattcgtgccctatacatagatagattgggacgcttacatgtcacagattacc

SEQ ID NO: 126765 - DNA, 331 bp, Glycine max
  Clone ID: PAT_MRT3847_85475C.1
ataaactgacacgacagctggttatgacagtgcaaggatattttaacaataaataaaggaagggctttatactattaacatatgcaaattgaactgcaaaggatccagacttgcgagctcgtaaaaattaattttcgatataacagcttgagcttgtaggtaaaagcatattttgctttacgctgttcaggctcttgagtcttattgcagtaacgagatttgtcctggaagataacttctctgaacccaattccgagctgctaactaacccatttgcaactacttttgaaagcatatattataccaagaacacttgtatgctcaaaaattt

SEQ ID NO: 126766 - DNA, 402 bp, Glycine max
  Clone ID: PAT_MRT3847_85476C.1
gtaatccatgacgcgtgacggcacctttgcagcatatacagtctcgaactcaacagacacctgaggatatcgaacgtgttgtcaacatgggtaccatgcacagatccttgcctatggatccttgatcaatttacgggcagggaggtatgcactcaaagcctggaattgcaaatgcatgattgaatgcgggagtgggtagactcacattgcacggatggcctgtaactggcattgatcaaatccggcctggcctgggagcagcaggtcagatgcctctgcttcagagtgcagatcagatgcagctgttgacgtatcaacgacagcaacagatccttgcacaggttcaggcacaagggaatattggctatgcagctgcttatggagatatcgatccacaacgat

SEQ ID NO: 126767 - DNA, 386 bp, Glycine max
  Clone ID: PAT_MRT3847_85477C.1
ggatttttaaccaaggcgttccatgaggtttcaagcaatcaaaaaccatatcatgcaaaattaatatcttggtccatactgcacagatggcgactttgctatgggccagggggttacacaacacggacccttattaaaacccggatgaccgctcttcaaaatgacaacttctacacaaggaatgcaacgctgtatggccctaaatcaaaattgggtttgctgcccctcatggaagcaaaaaaaaactttcgttacctatctgggcccccagcaaaacaatatactacttctaacgccaggaaaaggtgaaaagcgcccaaagattgcttgccttttgaagagagcccccaacacggggggggccaaaagagtccccacattggcca

SEQ ID NO: 126768 - DNA, 246 bp, Glycine max
  Clone ID: PAT_MRT3847_85478C.1
aaaacttatactaatggtgagccataatggtgcagaatggggatattttaaagaacaaatgggttcacaaaatagatgttggccaaactttaagaatcagctgtagaactctttcatcctgacaggggagacttgtgtaattgactccaattgtaaatagcttgccggcgtttgcgctcgagagagcaggtaattccgtggtattggcgaagatactgttgctgcaccaaattcatagttgataag

SEQ ID NO: 126769 - DNA, 608 bp, Glycine max
  Clone ID: PAT_MRT3847_85479C.1
ctaccttttttttttgacattttttttttaaccacaccacccttcatcttcaacttgtgccggatcaaacaatgccagggtgcttgctttaccctgcatcgaccagataaaactcatgcaaacatcatcaactaatacgaggcctctactattataggaacccccacgtgctacttgctcataaataagctcagagaaacaggctgcgcaggcattaaagagacgagaatccactgagaaggccaataaaagggatatgggtatcacactctttatacatagggaaccatcagaggcatgatgacatcacccagaagaatctagtggctgtcaggagtaacaacacgtcagcgggccatacgcgaggccaaaccaggaaagattcttgaatcctgaagcgaccatcaccggcaattgaaagcaaccacgctacggggctatcaagcgaggaacttgaccaaggccatgcctgctcttccactttaagctaaagggcctccacttgaaccctgaggaaggcttgcccagaccctggcgcggtgtttaatcggcatcctctctcctttccccacggcgtaccaagaggtaccccaatcggaagacccacg

SEQ ID NO: 126770 - DNA, 348 bp, Glycine max
  Clone ID: PAT_MRT3847_8547C.1
cggctcgagattttaggtgcgtgggtacactttcggcatcaattcaggtgctgttgaagaacttgaacttgattcatttggactatccatcattccgtcaagtttggtaaggggtggcttctttgtacggtaaatagtacaagtacagaactattgattgcatgcaagttttgtgaatttaactggaaacatgtatcttatgcactggtggaggtttcctactaccagttttcacttgaatagtaacaaaaaaaattaagcaaaaccttattattagaatatatgaaaaatgtctcataatattaatattatatcttggaatatttttgagttattggtgcttatctc

SEQ ID NO: 126771 - DNA, 432 bp, Glycine max
  unsure (1)..(432): unsure at all n locations
  Clone ID: PAT_MRT3847_85480C.1
attggnctacctacctttgaaggaaaaagagaaatcacaaaaactgtctacttccttaacaattaacaagccctaaatcggaatgtcaaaactcataaagcacaactatacatcctcatactacctgttgttatactgcaaaattaagtagcagatgatttgcaaatgaatcttcaaagctaaaaatgccgcaaataagtgctagaaaaggccaaacctataataagatcgcaaggttgttactgtgggttgaaatgcagaggaattcattgccatcttttggattttgttgcatgagaactggactttgagaactgtgatagtttcttcagaaacgtggatctttttaatggctttttttcttcacgggcgggactggtagaatctcgacaagagttgttgatatttggcttaggacaatttttatttcac

SEQ ID NO: 126772 - DNA, 285 bp, Glycine max
  Clone ID: PAT_MRT3847_85481C.1
ggccaggtggggcttatatgaccctattttttccggggatcaaatcatgagggttgggggattgaaaaagttggatggggcccaccttcttaattttaatccattgattccaacttctaccaaccaagtttttttggtctgggatgcctatggggcaatcaaggtttcccatgcctccctttttcttggctttgggtattagttttaatatcctggtttcctataggtgttctttattttttctatttttcccttattatttttcttggacaatatttttttttt

SEQ ID NO: 126773 - DNA, 573 bp, Glycine max
  Clone ID: PAT_MRT3847_85482C.1
tcaactgaaatgactaaaatcttcacagtggaggaactaagtcaggccaccaacaatttcgatgaaagcatggtcttaggccaaggtggccagggaacagtttacaaaggaatattatctgacaatagaattgtagcaataaaaatgtccagaattggtaacccaaaccaagttgagcatttcatcaatgagatgatattgttttctcaaatcaaccatagaaatgtggtgaaactattgggatgttgtttagagacagaagttcccttgcttgtttatgaatttgttcccaatggtactgtttacgagcatcttcacaatcaaggtcaatctttaagacttacatggaaaacaagattgcaaatagcaacagaaactgccagggccctggcatacttgcattctgctaccacttaagattttaagattattttcaatgatgcagagaggaatataattcttacaattttagattatatattttccttatataattggactttgtatctaaagttgctacttttaaatctctgactggggtgaatttctattttcctacttattaattgcgga

SEQ ID NO: 126774 - DNA, 401 bp, Glycine max
  Clone ID: PAT_MRT3847_85483C.1
gtttcgcgtggggcaaagccggatgctgaacccccagagtgttggtctctctgacttcagctctcaggaggacaccttcactctggacattagctgtctgtacacccatatggagacgatgaggatactctaaagaccttcaaaacactcgtgtatgatatgcttatgtggatccacccccaatacactgtcaaaccattagccatacacctctaggacataagtagcttggcagtgtggaagagaattcagcagaaactgtgcgcactagtagcgttaatgagagaagcttccagtgccttgagaaagacaaactattgcgttaagctaacgaggtacccaggaagctggaagaacacactgttattaatcgttcagcagccaccaacaggttcacctgg

SEQ ID NO: 126775 - DNA, 252 bp, Glycine max
  Clone ID: PAT_MRT3847_85484C.1
agcacaccgataactttccagtcccgattgtagcatgggtaaggagattataaatttctatagataaccacgaagagatggctaaacctccccttactaccatggatataaacctccaagtgaagaatgcggatgaatgagcactactatcacgctgtacttggggagccaactctcagagatcagggtgtcaaataattaatgttacacagaatatgtggggaacaaaaccaacccactatactaataact

SEQ ID NO: 126776 - DNA, 296 bp, Glycine max
  Clone ID: PAT_MRT3847_85485C.1
cgacaaaacgacatattcatatatataatagcatctggtcgccacaggggaggtgactattgctacaacgacagcattaacatcatctcaggttaatttgcaactacacttactggtgtatttcaattaatttaaacggcgcacttacctccaaagatcccaaacatgttacccagttagccagatttctgtttacaccaacataagatgcaatttccacctcttaataacaacggcaccatcaccaacaactatcaatctcacagtcagaacccttactgggtgaatgaatttat

SEQ ID NO: 126777 - DNA, 254 bp, Glycine max
  Clone ID: PAT_MRT3847_85486C.1
tttttctctctcccttagtcaaagggattcatcgttcttcttcccaggttatttagaaaagcaaaatggtgaagatttgctgcattggtgctggatatgtggggggtcctactatggcagtcatggcacctatgatgcgaaccattgaggggacaagaacaactcttaccaaaaataataaagaatcagactgactgcctcatcactcgactgatatggctttgcacttgatccttgatctatactatgccaca

SEQ ID NO: 126778 - DNA, 524 bp, Glycine max
  Clone ID: PAT_MRT3847_85487C.1
tttcatgaccacattgaatctagtgatggttttgatagaaagagcgaagagcgatctggtatttttggattgcaggatgtggagtctggatctgcagttcaatcatcttcctctaaaagtgaacataaccttggtaaagctgttgaaaatgttaaccaagaaattacctcacctagctcaggtaattgctgctcattttttaatatcatctgaaaatttgaattcagtatgatggtaaatggacctgtctgtttatcctatccatccaacttacagcatttatcttgatattcgtctatcaacagggtaaaagtaaaactcaacttttttctggctacgtttatctcaaatattacttacaaacaagaaagccgtatagttaaaaaatgctgagtcattggtgaagttgcatggtatgtgatccgatattcttgcgtatgtaatgtcaaaggattatggcacaatgtttttgacgttttactcaaaccacaatccggattggggagggaaatttaattccctct

SEQ ID NO: 126779 - DNA, 637 bp, Glycine max
  Clone ID: PAT_MRT3847_85488C.1
gaaaaaaaaaaaaactatttctatctttggaaccaaatagatccttagatgttaagattgggatgcatggatgaagctccggatctgctcttcttgtaaatgtcaactccacgggaggtgttgttgaggataatttagtaatttagcctaatattctcgttccgttctgttccaaatggcatcactctcccccaccgcacccggcgtcccacccttccctccgcccaccgccgcccgccgcgccgcttcaagacgattccaagcctcgcctcgcctggacccggaacccgaccctgaacccccttctccttcttctttgtcggcgtcattggtggtcaccgacgagcggacgcggagaatagcgagggagctggagaagctgaaggcgcgggagcggaaggagatgaggaacagaaaggtagcgtcgcagaaagcggtgtcggtgattctgtggagagaggcgacgaaggccatgattgataagagcggtggtggtaggaagaagaaggggcccatcaactccaagaagcttcttcccagaactgttcttgaagcgctgcatgaaagagtcacggctctgcgttgggaatccgctctcaaggtttttgaactactgcatgaacagatctggtacaac

SEQ ID NO: 126780 - DNA, 473 bp, Glycine max
  Clone ID: PAT_MRT3847_85489C.1
ggctcgagtgtacttattttttctttgagattcagtgtggttcatgcgatgaatccctttcattccaaccaggttcgtataaccccttggatgagccaagccctttgggtttgcgtcttatgaagagtccttctcttacggatgtgattcatatgatgctctcccaacatgaggaatccaaatagaaagatcataaggctgcttgttattcttcttctgctgctgctgctgctggtgctgctgctgcggattctaaactcacggccttcaattgtactggaaccattttgaaaattgggacttgggagaataagtctagatatgaaggagacttgctggcaaagtgttacttggcaaagcataagctggtgtgggaaggccttgatggttgtcttcagaataagatagcaatgccatggtctgatatcatggctatcaaggcttactaccctgaggatggaccaggcacgctc

SEQ ID NO: 126781 - DNA, 339 bp, Glycine max
  Clone ID: PAT_MRT3847_8548C.1
attgtacaactgctatttttctgtcacataaattccaaaaaataatttcccaaacgaaagccgtaaaatttaaatttgggggacaaagaaaaaaactctaacttggaagggggaaacttttccttaatataccaagccatggtgcggcggtatacgagagtcggtgacatgaacacacaacaatcatcatggatttacaaacagggggaaaaggaagggctatccaaaggattgttgcaccagatggaagccataacccttcctccttttatacaggggccacggggggggcccattgccaatcggggggggtgtttttttcccgccgccttccggggg

SEQ ID NO: 126782 - DNA, 1048 bp, Glycine max
  Clone ID: PAT_MRT3847_85490C.1
cccacgcgtccgcccacgggtccacaaaacatcagtcatctccttcacaggaaccctaaatctgaaactaccttgactccgctcagccacggctgagaaaatagctcgtcttcacgatccagcgattccgctctccaacgggactgcgcagggtgaagaatcgagaggccagccgccggtgaagaatcgcgcgattcgtctggaaatcgcgattccagcacgattcatgcccgatacagagatttaaccacgattcaggaacaaaaacgagacaacctccgattcgtattggtagcatctggaatcgtatcgaatcgtgcgatacgtatcctgaatcgtacgatactaactaccatgctagagagccttattgcataacgaagtttgtttccttaaaggaatcctttttttcctcctactttgagttgcaattgcattttatgggttttggtttttctgtgagtatccctgttgatcaagaatgcaattctttggggtgtctgagattagtccttcacctcctgcgtagacagcatcaggaaacgatgaagatatgaagtatgttttcaatgggaagaggaaaaagaagaatatgaagaggaaaacctatgggtcagatgatggcaagtttgtagaccggccttctcgaccaagaaagaaaacagaggatggacttaccatctacaccgaagaggagttaggtattagtaatgcagatgctggaaatacccctctctgcccatttgattgctcttgttgcttttgatggtagctgtataatgttatatgcacttaattccttgctgtggtgattgacagtgttgtgattgtcacttacagtcttggatttgtaagctagggacatagcttttcctttattacatttatagttgggcctaaaaaaacttgaaaaatcatgttaaaagcttgaattctttagatctagatatgattcatcaggtgatttcaggtagaattttgcagcaattgatctgcctcccatgtaacacaattgtttaagcattacactcatgccagcatttttgag

SEQ ID NO: 126783 - DNA, 2270 bp, Glycine max
  Clone ID: PAT_MRT3847_85491C.1
attaatgatattaaacattggcattcctaagcgcccgccattgccaaagagaagagtgcgaaacaagaagaagaaaatttctcatttctcgttctgaaaatcggagttcaacgctattattatatttgtggtatcttctatctgattcagcatcatggttcagctaatgaggtctgatacggataatcactgtctgaaaaaggtgaagttggaggttcaagatgaaatcccccctcttcacactcacaagcgacccaaattggaatctccccctaagtgtggtgcaagcgatgaatccatttcaatcccaccagcttcatacaatcccttggatgagccaagccctttgggtttgcgtctcaggaagagtccctcccttttggatttgattcagatgaggctctcgcaacaagaggaatccaaaaagaaagatcaaaaggcttcttcttcttcttctgttgctgctgctgctgctgctgctgctgattctaaacttaaggcctccaattttcctggaaccattttgaaaattgggaattgggagtataagtctagatatgaaggagacttggtggcgaagtgttactttgcgaagcataagctggtatgggaagtccttgatggttgtcttaagaataagattgaaatcccatggtctgatatcatggctatcaaggctaactaccctgatgatggaccaggtacgctcgaagtagtgcttgcaagaagacccttgttttttagggagatcaatccacagccgaggaagcataccttatggcaggcaacatcggactttactggtggacaagccggcataaacaggcgacattttctgcagtgtccacaaggattgctaggcaagcattttgagaagctcattcagtgtgatccccgtctcaactatctaagccagcaggcggatttggtgttggattctccgtattttgaacctggaacaacttcaattcacgaccacattgaatctagtgacggctttgatagaaaaagcgaagagcgatctggtatttttggattgcaggatgtggagtcaggatctgcagttcaatcatcttcctcaaaaagtgaacataaccttggtaaagctgttgaaaatgtttcccaagaaattacctcacctagctcagtgatgaacatccatgcaatgaaagatttcaggagtagaggagctgaaacattgaagtttcttagtaatttggaccagatcaaattgcctggacttcacccttctatgtcaatggacgatttggttagccacattggacattgcatttcagaacagatgggatctgacaatccaaatttcgctggtgacaaccagtatagcagatctattctggaagaatttactcagtacttgttcaatgactctcaacatgcaactacctccgatgaacagcgtgtcatgtcaaaggtaaactcactctactgccttctgcagaaggatccttctacagcagaagacatgaccaaaaatggcaatagtctgggagatgcaaatgccttgtcaagggtgaactcactatactccccttctgcagaatgcagaagacgcaatggccagaaatggcaatggtctgagagatgcagatgtgatgtcaagggtgaactcgctgtactgtcttctgcagaaggatccttatacagcagaagacacaaacacaatgacaagaaatggcaatggtcttgatgcagatgagggtggaaaagttggtgtgagtaactctaacatcactgaattgtcacaaccatgcaaaactaaagtgtctgatttggaagttcaagcggatgatgcttctggctgcaagcagggggggactggtatgtccaggaaggaatcagctggcgatttgcttcttaatcttccaagggtggcatctctgcctcagtttttgtttaacatgtccgaggattctgttaataaagttagatagatagtaaccatctttcaaaacttgcaagaaacacaaaagctatattatcaacaatgtgaatattgtatatctgcagttttacttgcgtgggattcagaaatttacattgatgatgaatcccgacagacagacatgacgggacactttatattttcagctaagcaaaaaataagtgggaatataaataaataaaatccatggaacgcgtgtgacaaaatccttcgttggcttctttattataaagtcttaacatgctgtagcataaaattgtaacaggccagcagatgaaaataatgtcgactgtgatctttattt

SEQ ID NO: 126784 - DNA, 942 bp, Glycine max
  Clone ID: PAT_MRT3847_85492C.1
accagttttcctggaaccattttgaaaattgggaattgggagtataagtctagatatgaaggagacttggtggcgaagtgttactttgcgaagcataagctggtatgggaagtccttgatggttgtcttaagaataagattgaaatcccatggtctgatatcatggctatcaaggctaactaccctgatgatggaccagcttgcaagaagacccttgttttttagggagatcaatccacagccgaggaagcataccttatggcaggcaacatcggactttactggtggacaagccggcataaacaggcgacattttctgcagtgtccacaaggattgctaggcaagcattttgagaagctcattcagtgtgatccccgtctcaactatctaagccagcaggcggatttggtgttggattctccgtattttgaacctggaacaacttcaattcacgaccacattgaatctagtgacggctttgatagaaaaagcgaagagcgatctggtatttttggattgcaggatgtggagtcaggatctgcagttcaatcatcttcctcaaaaagtgaacataaccttggtaaagctgttgaaaatgtttcccaagaaattacctcacctagctcaggtaattgctgctcattttttttatatcatctgaaaatttgaattcagtatgatggtaaatgcacctgtttgtttatcctacccatccaacttacagcatttgtcttgacattcgtctatcaacagggtataagtaaaacccaacttttttacactatttactgcctacgtttatctcaaatattacttagaaacatgaaagccatagttaaaaaatgctgagtcattggtgaagttgcatcatatgtgatccgatattcttgcgtattataatgtcaagggattatggcaaaatgtcttggacgttttaactc

SEQ ID NO: 126785 - DNA, 2272 bp, Glycine max
  Clone ID: PAT_MRT3847_85493C.1
gaagtgacagtcagccactgaagaaagacaagagaagaaacattggttttcctaagcgcccgccattgccaaagaggatagtgcgaaacaagaagaacaaaatttcccatttctcgttctgaaaatcggagttaaacactattattatatttgtgatttgtgatatcttctatctgattcagcatcatggttcagctaatgaggtctgatacggataatcactgtttgaaaaaggtgaagttggaggttcaagatgaaatcccccctcttcacacccacaagcgacccaaattggaatctccacccaagcagtgtggttcaagcgatgaatccctttcaatcccaccagcttcgtataaccccttggatgagccaagccctttgggtttgcgtctcaggaagagtccttcccttttggatttgattcagatgaggctctcccaacaagaggaatccaaaaagaaagatcaaaaggcttcttcttcttcttcttctgctgctgctgctgctgctgctgctgctgcggattctaaactcaaggcctccaattttcctggaaccattttgaaaattgggacttgggagtataagtctagatatgaaggagacttggtggcaaagtgttactttgcaaagcataagctggtgtgggaagtccttgatggttgtcttaagaataagattgaaatcccatggtctgatatcatggctatcaaggctaactaccctgaggatggaccaggcacgctcgaagtagtgctggccagaagacccttgttttttagggagatcaatccacaaccaaggaaacatactttgtggcaggcaacatcagactttactggtggacaagccagcataaacaggcgacattttctgcagtgtccacaaggattgctaggcaagcattttgagaagctcattcagtgtgatccacgtctcaactatctaagccagcatccggatttggtgttggattctccatattttgaacctggaacaacttcagttcacgaccacattgaatctagtgatggttttgatagaaagagcgaagagcgatctggtatttttggattgcaggatgtggagtctggatctgcagttcaatcatcttcctctaaaagtgaacataaccttggtaaagctgttgaaaatgttaaccaagaaattacctcacctagctcagtgatgaacatccatgcaatggaagatttcagaagtagaggagctgaaacattgaagtttctcagtaatttggatcagatcaaattgcctggacttcacccatcaatgtccatggacgatttggtaagccacattggacattgcatttcagaacagatgggatccgacaatccgagtttggctggtgacagccagtatagtagatctattctggaagaattttctcagtacttgttcaatgactctcaacatgcaactacctctgatgaacagcgtgtgatgtcaagggtgaactcactttactgccttctgcagaaggatccttcttcagcagaagacataaacacaatgacaaaaaatggcaatagtctgagagatgcaaatgctttgtcaagggtgaactcactatactcccttctgcagcatgcagaagacacaatgaccagaaatggcaatggtctgagagatgcagatgtgatgtcaagggtgaactcgctatactgtcttctgcagaaggatccttctacagcagaagacacagacacaatgaccagaaatggcaatggtcttgatgcagatgagggtggaaaagttggtgtcagtaactctaacaccactgaattgtcagcatgcaaaattaaagtgcctgatttggaagttcaaccggatgatgcttctggctgcaagcagggggttagtggtatgtccaggaaggaatcagctggcgatttgcttcttaatcttccaaggatcgcatctctgcctcagtttttgtttaacatgtccgaggattctgttaataaagttagatagtaaccatctttcaattaaaacttgcaagaaacacaaaagctactatattatatagtcttcaacagtgaatattgtatatctgcagtttcaattgcgtgggattcagaaatttacattgatgatgaatcccgacagacatgacgggacactttatattttcagctgaacaaaaaaataagtgggagtataaataaaatctatgtaacgcgtgacaaaatccgttgttggcttctttattataaatataaagtcttgataagtgagttatagc

SEQ ID NO: 126786 - DNA, 364 bp, Glycine max
  Clone ID: PAT_MRT3847_85494C.1
ggccccaagggggggaaaaacagccaattttccttttttgggattaaacccccacaggacacaactttttttcaacatgggaaaaccaaaaccaataaacaggccgggaataaaattccaacacccctgacaaaagaaggggggcatcaactaacaagggcaaactcgggaaaaataacccaaaaaagaacaaattttacccggggggaaagagaacacgggagggagccttgtttaaaggtctacataaaaaggggccctttaaaaactttttcttttaaaaaagggccccaagacaggagaacaaaaaattttaaaaacacgaggctttgacttccacactccaaccttgaaccttatcctt

SEQ ID NO: 126787 - DNA, 289 bp, Glycine max
  Clone ID: PAT_MRT3847_85495C.1
ataaatgatctcccctcacccctttttttttttttacaaaaacaattcgccatttaaatatcacccgggccataactaataacccttacctcaaccccaaaaccgtacacacctcaattatttatttttttttattaactactctccatctattactttccacatcatattgttcccattgaaacaaaaacttaatctacttatttttaactttaaaaactacattatggtcttcatacataacactctaatattcttttctttttctcacccccccctttctaaaatt

SEQ ID NO: 126788 - DNA, 444 bp, Glycine max
  Clone ID: PAT_MRT3847_85496C.1
catcgtctagctatctcgatcgaactgtccaaggtcgctgtcacgcgtaagacccactacacagacatgaggtcagaacagctattcgcagcgcaggcggctgcttggcgagagagaagtgaactgaaggaagctgggcaaaatacgtggcagaggggcgccgcatgatggccccattaaggtggagcacaccggggtgggcaacccgaagcgtgccggctagtagagaagtgaagaataggcgttccaattgtaggtcgtagggtaaccggctaatagggagaacaaaaaaagagagaagcaaacaaacacaagtagagaatattgagaatgaaaaaatgacaaatgatgatacatgaaaaaccccccgttcttgatgaccaaatgcggtaattcccaaaggaaggttccattccgattgctccctcgattacatgggtttga

SEQ ID NO: 126789 - DNA, 345 bp, Glycine max
  Clone ID: PAT_MRT3847_85497C.1
aaaaaaaaaaaaaaaaaaaaaaaaaaaaaaaaaaaaaaaaaaaaaaaaaaaaaaaaaaaaaaaaaaaaaaaaaaaaagttatggtggaggccgaaaattattttacttgaccctggaagttagtccgggatcccgtgccccttggcggtatacatttagggggggggccccccttttttgcctttccccccggggtattctttccggtcccgtttctcgagggtttccccttttccccatcggcgttctatttaaagctggggctttcccgggcacaacgtttttccccttgtaatttttttacccctcaaaatttccctggccctgtcggcccggttccctatt

SEQ ID NO: 126790 - DNA, 207 bp, Glycine max
  Clone ID: PAT_MRT3847_85498C.1
gtcttagggtgtcaaactagtatcattgctatatcaacacctacatatgggttacagcttctgtcccaatcattaacacagtagataaaccgagcctgccttagagctttcataacttcggcgcgcaacatgatggtgcaaaactgtacaacttatgcggtccttgaggccgcatactaccatacattagaagctagcggtctggtg

SEQ ID NO: 126791 - DNA, 593 bp, Glycine max
  unsure (1)..(593): unsure at all n locations
  Clone ID: PAT_MRT3847_85499C.1
cttcctggtcttgttctatctgagacgacaattatggcctctaaagcactgctattgctgactatgagtgtgctaccgcaacagtggtggtgcacattcatgccaccaaataaccctttatgcgtcaactgacctctctaacgagacccttgccatgctctttgtgaaacgtcacaaaacaactaatttgccgatgctgacataaggttcaaatgtgagacgatgtgtaccaaatgtgtatacaaattcaagaaccggtacatgtgaatatgctagaacatataccatgaacagatgatgaagatcgagaatgtaaagtatgcactgtctggattgaaaacaatcctcaacctcaatgaattgaagaaacttgactgcgttactaaacaacttgtattctaacatcatacgacgagattgcatacaattataactgctgctatgacatgagctacatgactaangatgtagctattgattgtcatgaagacctcaaacaatacaactagataaacaatgaaaattaaatacataattaatttcgagcatactgttattattaatctactgtccctatgggctctatagtgcgt

SEQ ID NO: 126792 - DNA, 1483 bp, Glycine max
  Clone ID: PAT_MRT3847_8549C.1
agaaactttcgatagcatttgccgaatgttttgttttttcaaaatgtttgacatcagtttctcaaaaatttcataaagctgaagatgacgatcaaaattcttcaccaactaaatcatctgacatattcacacttcattggagatttggtcttcaaggcctttgtgaattgatcgttatgcttcaagaaagcagttgctgggaagtttcttgcttgatgcttgattgtttacttggagtacccgatagtttttgcctggatggtgtggtaggcataatatgttccacaataaagaatgtttcttgcagtgcaccaagaatatcttggcgtttgcagattgataagtggttatcttctttaatctctagaggcatctataacagtcaagaaagtgaggtttctctgatagatctattttgtactctgctagcccatgcttaaccggagcaacgtattgtagcagttaagcatttaggaatacttcttggccaatgtacaaatggagaaagagctgtgatgaattttaaaatttgcactgacttcattcaaaataagttagttttatccattcctgattatgttctttctcgtctggtttctagtacttgggatgaagttgttgtgctggcatcatctgatttgtcattacaactaaggattcatgcaatggcacttctttcaaattacattccatttgctgagcgccatcatttgcaatcttttcttgtggcagctgatagcatttgctgtttgtgtaatgcgcaaccatcgcaagatggtcctatcctgcaactttcattagcacttattgcttatgcctgcttgtactcaccagctgaagatatttctttgattcctcaaaatttatgggaaaatgttgaaactttagggtcaacaaaacatgatggcaagcttggagacctcgaaaagaggacttgtcaagtcctgtgtagattgagggatgaaggagatgaggccaaagaggccctgaaagaagtactttctaagaattctcccttgctgtatgacccggactttgctaatacacgtgaatctgttgtccaggtccttggcaacttaacagcagttcactcatactttgatttattcacaaggaaaatcgaccaagatgatatggagcttgaggaggctgagttggagctagacattattcagaaggaacatgcattaccaggacgaatggatgattccaaagattggaatcagattccaggtcttccttgtaagtactttctgcctaaaaaaggatgtctcaaggcttcagcaaatcagagagtgcattcgttccctagaaaagtccaaacttaaagaagatatcatagctcgtaggcaaaagaaactacttatgagacatgcccgtcaaaaacatttggaagaagcagctttacgggaagcagatcttctgcaagaacttgatagggagagaacagctgaaatggaaaaagagctggaagacaagattg

SEQ ID NO: 126793 - DNA, 506 bp, Glycine max
  unsure (1)..(506): unsure at all n locations
  Clone ID: PAT_MRT3847_854C.1
ccacgcgtccgcctttcttgaatcgttcttaactgctagaggggatatcagagaagttgattggcctcccattaatagtaagtacgagttttttttttctttaagattcttgtttatgttttggaggaatacatatgaatatggttcgatttttaaatgaactaatgaattgaaaggagagagagcgaattcagatttcttttttgggctttgtggcattatttccaagctttttcctggtatgaaatatttttgctattttcttcaattttgttagggtttatggggacatggaggaacatttcggtttttctggtttttaatattgatcatgaaaatttgatttcttttcctccagtttctataaccatctcagaatgctcaatgtttctgaaatatgtttgagattcaatttggtatctcgaaatatttcaaaaaacggtgttagtctgtataaaattgatgtgattttagttctcatcacagactanaaacttatgtttgat

SEQ ID NO: 126794 - DNA, 606 bp, Glycine max
  Clone ID: PAT_MRT3847_85500C.1
aaaatactaacccatcgatagttaaatctgatgggaatgatcatgtaacagtagctcacgtactcaccattaaaataaaataccccgtcgaagtttcacgtgacttaggacagaccgtataagaactctagataaaatgacgtggatagctcggctcattaacacacttaacacttgacctgctttaaggcctatgcaaagtccaggaatgatggatcaacatcgccgtccttgttgtaggcaaagaccaggcaagcatcatgacccatgctctcaccaacaaaaaataggaaatctttaatcttagagagcagggctttacttgctacctacatgggcttattaaacaactgctagctgctctgcatcaaacttgagagtcaaacccttgataaacctcttaatgaaggttacagaactggttcttatagaatgccggttgcttctgaagcctgaatgggacaacaatgtcaacacccttaacagctgcatgatacactccctcatcttctccttcactctcaggagaagggttagaaccaatggctacattaactataactcgtggctcgaccaaataatttcggaccgaaacctgcaagcgta

SEQ ID NO: 126795 - DNA, 593 bp, Glycine max
  Clone ID: PAT_MRT3847_85501C.1
tacgaattcgagctctgtacccggggatcctctagagtcgacctgcagagttgcatggttatcttgaacgttgttatgttggcgcagatgaatggcacatgttagtcgtaaggattgaaaccgaggatgaggtgctgatccacgatatgttactaagcagagggatgaacgagtacagtgggtcaaggaccaaaaggttagtgtaagtatagtgaatcttgaattttaatactggataacctttaaagggctgatgtgtatgagatgggcattataataaaactgtatgtcaatctgttgaggatattacattgcttacacatatgcacttgaatataatatcttatgcgctgacaaaaaaaagcatgaatgcttactaattgcatacatgtctaagacctctattacttgctagtattcctgtagagagcatccaagaaccgtcgtacaaacaatgataacttgaacaatcgcaacatcattacatacaaatgcgtgaaatacttctgttcatatgtgctgccaacactataaatctgctctatatccgatcgtcctgcgcccggtcacttataatatctgatctctgatca

SEQ ID NO: 126796 - DNA, 367 bp, Glycine max
  Clone ID: PAT_MRT3847_85502C.1
tggcggttcctgcaattggtcaaatcccgaaattatcatgtaccttgctgcgaattgcgcacaccattctttgctttccttcgaaactctacgaaatcccactaccgcgctctctatctctcataaaggcgccaacgtttatttcgcgtaactgctctgcacctaaaacttatatctccattctacaacttcatttattggaactggaactctaccctttcaaagctgttaaattttcgattcgcgatggacaaatacgagctcgtcaaggatataagatctgggaatttatgggaggccaggctcatgcgttacaaagacacacaagagcttggtgtcatgaaatacattgaacggtgtcacaaga

SEQ ID NO: 126797 - DNA, 690 bp, Glycine max
  Clone ID: PAT_MRT3847_85503C.1
atgattttgatttagataatactttatatttttttaccgcagggcgttacgaatatagaaacaaaggtgttgacatgtttcttgaatcattgggacgtcggccttaatcaaaaactgaaagcatccaattcttcaacgactattgtcgctttcattattatgccagctgctacaaattcttatgctgttgaagctttaaaaggacaagctgtcattaaacaattacaagaaactgtaaacattattactgataggattggacaaagaatatttgaaaaggctgcaagatattctggtggtgaaattgaagatgcagttatcgatcctagagaattattaacgaatgaagacaaggtactattgaaacgtcgtgtcatagcactcagacgtggaaatcttccaccaatagtaacgcacaatatggtcgacgataacggagatctgataatgatgcaattacgttacttgaagctttttaatcatcgagaagatcgtgtaaaaatcgtgttccatcccgaatttttgagttcaaacaatccattgattgggttagaatatgatgaagtggtacgtgggatgtcacctggggcgtgtttcctagctattatgagccatggggttacacgccagcagaatgcaccgtcatgggattgccggcgataacaacgaattttgtaagttttgggatgt

SEQ ID NO: 126798 - DNA, 259 bp, Glycine max
  Clone ID: PAT_MRT3847_85504C.1
ctatttcaaatatctctctctgccttgaatcaattctttcttttttcactgctctctaacctaatgggacagggtcactaagcaaggggggaggggagaataataattctcttcattcacatcatttttctgatctggctcttcacactctttgaccccggtcaaaattctgacccttttttctctctctatcaatgctttgcatcaagccatgtacagaaaaaccccggcgtccatctggggctaccctccttctgga

SEQ ID NO: 126799 - DNA, 511 bp, Glycine max
  Clone ID: PAT_MRT3847_85505C.1
ttggggggggggggggggggggggggggggggggggggggaaattccccacaaggcaaaggcacagtaaaggtttaaccaagtccgaagggactgacaagaacgtgctgctaaggatgacttactagccccaaatgaataacgctcgcaacaaaaccaaaatgcaaggaataaagcacgattatgccagtagtatggggttgggttggaaatatgcttacatagagagagaatagcgtaaaaacctgtgcacagcagcatccactcactagctacccagagagcctgatagacgtgaggaccgaaccatggagaaaaaaacattagcaaagcaaagtacagcaaggaactgcggcccaagcctactctaagaacgcccttaacccaagaccctattttacatttggccagttaacaagtatctgtacgtcaaggactcagtgcaaacaagggcttgcccgacgaggtaatacttgtaagcccaggaacaattggaaaattaccttaccgca

SEQ ID NO: 126800 - DNA, 231 bp, Glycine max
  Clone ID: PAT_MRT3847_85506C.1
ccccgcgcccggttgcctctcttttttctttctcccagggtttacgctagtgacacgcttcaacatttttccatggaattcagatatgctgccgcccaagatcgaaggagaccgccggcgacgccgccgccgcaccctctttccaccggcgcctacgtcttcgacaggccattacgagggtatgaggtcccatcagggagggcatcccagcagcgcgtgcggctcctagag

SEQ ID NO: 126801 - DNA, 384 bp, Glycine max
  Clone ID: PAT_MRT3847_85507C.1
atacaacatgaaatttcctatgtcaacagaaattcagataatcaaacattactaacgtgttcggttgcacgttgtcgatgtgactttccatctttaaccagaagctaatagttatagctttcacgtttttgggcaaaattgacgagattcttaatttttgacgagtttccaaacatgcactacattggaacattaacataactttcacacttgttgtgtacatttactggttttcatccttttcaccaaccatataacgattttgagtggcactcaggccagatgagtgaagttgctttctcttcttaacaagacgtgatgcagttttcctatcatcttgagcttcctcataatcaggcttgagagctagagcacggtcaaagg

SEQ ID NO: 126802 - DNA, 243 bp, Glycine max
  Clone ID: PAT_MRT3847_85508C.1
cacatgcattgttgtgatcattataacgttttgcaagtccaccaaaacctatgatggactcaacaatgtacaatctatggaagaccccctaaccatataaaaataaagtgaacaaatttggcttgaatgtgttctacttcccctttcccttcattaccacactcttatttccttctattgatatgacacatatgatatctctgtataaagcttgcgtataaaatataaaattatcatcgagtc

SEQ ID NO: 126803 - DNA, 411 bp, Glycine max
  Clone ID: PAT_MRT3847_85509C.1
aaaaaacaatcttataaaacataatttccccccccccgaaaaaaaaaaaaagccaaaggaattccccaaattaaaaaaaaaaaaagaccttggtttattgaaaaactgaaaattaaaaataaaatcccccagcttttttaaagcccgcattatagcccgctttataatcaggggcttcagaaaccatttttccaaaaaacatgccccccaggggcccaccaagcaatccggctcccaatcccattccaaatttgtttttttttggtttttgagcccggggggggtccccaaatccaggcgggggggggtttccaaaacccggtggaggggggggaaatcccgcaccaccaccctgggggggggacccaaatccctggggggggggggttccaccatacccccggggggggg

SEQ ID NO: 126804 - DNA, 649 bp, Glycine max
  Clone ID: PAT_MRT3847_8550C.1
ctgaacctgcaacaggtaaacccttgccggcgacactttatcacacaagcaatttagaatcatgattccaacaatatcacacacatgaaacctaacacctcaaaattcaccaccaatctaaaccttgcaattgcaacaaagacacataaatcagttgcatcaaacaaagcaatcccgatcggtttggacgcaattacattcatgtgaaacctagcgagtgaaagcataaagaacgaacaagactagatgaggagtgcaaaggggataataatcacaagcagaacgacaacgacgtaaatgtgtattcgtaggcgagggttctgatcaagatctgcgtggaattgatgagctcgagcatgagaagtcgcatccggcaacggagccgacgccggagaggagcttgccgacacaaagggtggtgcggttgacatgcgcaaagacttgttcgacagcggcaggtagtggaggaagaggtgatgcgagagaggccaatggctgcttgagagcaagggcgacgaggttcttggcggtgtggcagacgccgtatcagagttgaggctaggattcactatcacgtctaaggtcgtgatgcggtgactcaacgggatggggctgctggggagagtgaggagtttggcgacgcaactat

SEQ ID NO: 126805 - DNA, 597 bp, Glycine max
  Clone ID: PAT_MRT3847_85510C.1
ggctcgagagattttccaagtgctctgaaggagtggaactcttggaaaagaaatttgatttaaagctggaagatattgcatcaaaagaaaagcatctaacttcagatttagatggttttttttatgaaaatcggaaacatatggagcaagctcaagtcttgttgaatcagatgcaaatggagatgatggtagaaactcagaaccttgaattagaagttgagaaactcagtctgaaactttcagcagcgcatgatgagaaagagagaatagcttccaatgctatgcttgaagtatccacattacgtgctgataaagccaaactggaatctgcttttgaagaagctcaatctaaagtgagtttggctaagaaagaggttgatatgatacagtctcaatatgaacaaaagctggaagacctaacaacacagcttgccgaatacaaaattaaaatggaaatgctgatgactgaacatgaaaagttgctgaagctggtggaagactacaaatcaagagagctaaaattcaaaagtactataaatgcccttgaataaagctaacagtcactgaatatgaaagaccacaagtcatggatgaatc

SEQ ID NO: 126806 - DNA, 974 bp, Glycine max
  Clone ID: PAT_MRT3847_85511C.1
gggcttgggttcccacgcgtccggacaataagagaattgtttgaatttattgtcgatgcatccattactgatgatgccgtggatagttacctagaagaggtgcaacaaaaaattttggcgagagatgtgtctgctgaggatgagattgcagactctgtatttgtgcagtcctatattccgaagacactagaggatgtgaagaatgctgaggaggatgtacaacggataacaagtgggaaggacaccaaagatttatactatcagaccattactggacttaaacatgctctgtcattaacacagacttcacagcaaaaaacccaacagcagaaatcaagtcccacaaaggattcaccggttatttctgatgataaatctaacctcttagaggatgatgccgagggtcaatctggcaaggatgaagacgatgaaagtgattctgaagaggattcatgctcagaaagtgaagtagaggatcctgcggatataaaagctgctagaaaagaggctaggaaagagaataagaagaaggtgaaggaggagaaaagagaagcacgtaaaactaaagttcctaaggctgttaagaaaagaaagaaaaagttggctaaagcgaaaaagaccagatagatagttgtagttatatgtaattggccgagttgagtttccctagtagtgtggatttaagatacaaccaaattcaccaaatatttttttaaaaaaatagcaattttgttcactcttactatcttgggagtatcttctacaaggagaggttagaaaacacggtttctgttacctatgtctgcattgccagcttttctttacactcttgctgtttctattaagttgagtggaagtgtgtaatggaaataatttcaatacctacatgcacttccttcgtttagtttttactaagctttcaaattttgttggtttcttctgggaaaaaaaatgccgcagtattacttttctaa

SEQ ID NO: 126807 - DNA, 2154 bp, Glycine max
  Clone ID: PAT_MRT3847_85512C.1
cggaattcccggctcgacccacgcgtccgcggcggaccgaggaagctgttagttgtgttagcaacagcacacacacagcgatggaaaacgacgacgagcacaagctccataatcacacggaacaagtacaagaacaagaacaagaaaaaatgaagaagaagaaagatgaggtttggagttcttcggattctgaaatcggtgaagcgttggactggttggattcaagggaggaagatgaaggctcctccttttccctcactttgtggcgccccaacgctcacggcggtcaccaccaccattcctccactctccaacctctcgccaatcgcaaccagaagttctcccatcacattcgtgcttcacccttggaggaatgggaagggaggatgaatgttggcatgtctaattctgtgaccacagcaattcgtggaagtgttcgagacatggccattgggaagactaaaactactgagaaagcagaccgggctactgttgagcaggcaattgatcctagaactcgcatggttttcggctcgatgctgaacagaggtgtctttcatgatatcaatggatgcatttcaactggaaaggaagcaaatgtttatcatgcaactaaatctgatactcaagaacttgcaattaaagtatacaaaacatctgttctggtatttaaggatagagatagatatgtgcaaggagacttccggtttcgaaatggatactgcaagcataatcccaggaaaatggtaaaaacatgggctgagaaagaaatgagaaatcttatgaggcttaaggcagcaggaattaggtttcctacgccatatcttctgaggctacatgttctggttatggaatttataggaaaatctggttgggctgcgcctcgtcttaaagatgcagctttatctttagacaagttgcgggaaggctatgttgagattattattgcaatgcggacattgtatcagaaatgcaaattggtgcatggggcggacattgtatcagaaatgcaaattggtgcacggtgatctcagtgaatataatatactttattttgagggtcacttgtacattattgatgtttctcaagctgttgatcctgaacatcctcatgcccttgattttctgcgtgaagattgcgttcatgtgtctgacttctttaaaaagcatggtgtatgcagtcatgacaataagagaattgtttgaatttattgtcgatgcatccattactgatgatgccgtggatagttacttggaagagatgcaacatgaaattttgacgaggggagatatatctgcagacgatgagattgcagactctgtatttgtgcagtcctatattccgaagacactagaggatgtgaagaatgctgaggaggatgtacaacggataacaagtgggaaggacaccaaagatttatactatcagaccattactggacttaaacatgctctgtcattaacacagccttcccagcaaaaaaacccaacagaaatcaagtcccacaaaggattcaccggctgtttctgatgataaatctaaactcttagaggatgatgctgagggtcaatctgacgaggatgaagatgatgaaagcaattctgaagaggattcaccctcagaaagtgaagtagatgatcctgcagataaaaaagctgctagaaaagaggctaggaaagagaataagaagaaggtgaaggaggagaaaagagaagcacgtaaaactaaagtccctaaggctgttaagaagagaaagaaaaagttggctaaagcaaaaaagaccagatagatagtagttatatataatgtggctgagtattgagtttccctggtagtgtggattttagatacaacctaatacagcaaatatatatatatatatatatatatatatatatatatataaaaacaagagcaattttgttcactcatattatcttgagagtatctgttataaggagaggttactaagcacaagacaacattgttaccggcctatagtttcttggcattccacacagttcctgttacatatgtctgcattacctttctgtctttacactttgttgtttctattcagttgaatggaagtgtgtaatggaaataatttcaacacctacatacacttccttcgtttggttttattagatttc

SEQ ID NO: 126808 - DNA, 521 bp, Glycine max
  Clone ID: PAT_MRT3847_85513C.1
cacgcatgcgcgcgctcgtaatctggctctagcgcttgaggcttgacgctgcaatactccacacatgaaagacaataccgcctttaccgcaccactctacatcactcgacgcatgttattctgaacccacttattcctaccatgacgggctatctagcacagacctcgtgcgtcctactttcggacattgctctccgactgtctctaactgcgccctgcacggattgccctatggatatcgtggtcaccgttgcctctctctccactatggggcccacactgagacgcgctctgatcaaagcctcttgaacagtctcatggatgagctttgagccgtgcgcaaacgccgtgacaagcacgtctccgccgccgatgccaaccgcatgggattgatgaacgaagagctcgctgaagatagacttgtgaaccattcattgcacagagggatgctttcggaattcaacaatgactctgatccagtattgctagcagtggctcatagacctgatggcaagaagaac

SEQ ID NO: 126809 - DNA, 431 bp, Glycine max
  Clone ID: PAT_MRT3847_85514C.1
ctcttctctccctctttaaattctggatctggattttgagttctgatcctaactcttgaagctgaagaacctgaggctaattgaactctaacgtgccaaaaaaaattgagttgcatgttttgctgctttaaactttgttgaagacagaatttgcaatttctctttggaattttggtcttaatttttttaggccatctcggtcaccaaggtaattgtgaagataaaatgagtattgtggatagtcatgctgtcaagtactctcgaggggagacaaggatgaacccagaaatggattcaaatattggtcaacattgtcatcaacaaaattctcgactaatgagatacccgtcttccccaacctcatttgttacaagccctttttgacaacaatcaacaacaacaattggttatttcaaatgggggaattcttt

SEQ ID NO: 126810 - DNA, 509 bp, Glycine max
  Clone ID: PAT_MRT3847_85515C.1
cataattgtttttcacatcgcaaaatatttaaatattccaaatgacattagaaagttgtcgaagggatagatcaaaagacatttaagtccagtatcaacataactgcctcattacatttccacgttgtttttcattttcagtcatcaaaaacatcatgaaaaagaatcctaaaatgaattaagtaacaaagttacagcacactttaaccatgtaattgctatccaacgagccaagttctttatctcaggttcctgctaccatcgataatatccagatgtatcccttgaaccgattatctcaatcatgcaggagacagtttagaagcaataaacaaactggttgtaattcaaacccaaccaccagccatcgaaacagttggaaaataatattatgaaatgtatttctcctgctgctcttgaagtaacctggctgatgatttggcatccaagtatagcgtacaaacttcctcaagatccgccttgccaatgttgcctcggccattcatttt

SEQ ID NO: 126811 - DNA, 778 bp, Glycine max
  unsure (1)..(778): unsure at all n locations
  Clone ID: PAT_MRT3847_85516C.1
aaagtacttagtnntaactcttaacatgtacaaggcaattactttcaacacctctcaaattgtttcttacacccaattttaatataatttaaaattgcattctgaaaataatgccttttcggaatgataggatttacattctaaaaaagtctttctggattgtaatttacattttggaataatagatgtttcggatgcatgctcaaaagagtgcaggaagcaaaattaaaaatgcacggagcaacttcccatgtaggagatgtacccacatatttagataaatattaaaataacagaaattccaaaatattaatgaaatacattgcagggaaaaaaatagtacttgaccaggagcaggagtagcaaatgaaaatgaaccatggtaagacttggaataaacaaaatggaattagtgatttatattttgttgactgatcagacaaaatgccagaaactgagaatggtatgaatgaacagtggatatgagtatgcgtgcaaatgtaagaaacactaaacacaataaaccaagcaaatgctggacgtagctaggtaagtatataaaacaagatctatttgtttattgaggcaacagaaaaagcaaaaagttagaaaataacagaatgttctctctatgtctcctttcttttgtgtagatgtgtatgtatgtgtacgtggtagtggtgcaacaactctatctatctctnnngaaaacaaccagcaattgtctaatcaatgattctatctttggnntnnnctgaagntttnaacttctcttatt

SEQ ID NO: 126812 - DNA, 388 bp, Glycine max
  Clone ID: PAT_MRT3847_85517C.1
gttgtttaacacacaagaattttttgatggaaatttttcagtggattcttggttaccaatatttgagaattgtctatatactgtcagttaattacctgcagaagctgactatggaaatgttacatgtgagagtggacgcggtggacacccaccagtgcttggattaaactgcaactccaataggttctatgaatgaacacatggatttgcatataacttgggagaggggagaaaataggtttttttactacagctgatgcttctccaggagatttactggctgagcgcttgggcgttcagaactgaattgtggggtctaacgccactgattctatgttcgcgcgagtatgtgagagctgtaagagtcataaatgtttggttgatgagt

SEQ ID NO: 126813 - DNA, 545 bp, Glycine max
  Clone ID: PAT_MRT3847_85518C.1
ggctcgagtcttactcgatccatggatcgttgtatggcttctgcgtggaacacatatatagatctgggaatattattgccgtaaggtgcagaggcacaacctgcgttcttcgtgctcggggattctcttgcggataatgttatccacaagctttttggcatctacagctcgggcacatgctcctacttatggcattgatttcccatccggtagacccactgcccgtctgtctaatggctactacatacctgacttcatcagtctgtcacttggggcctaatccacattgtcttatttagatcccgagctctacagtcaacgactgcttggtggtgccaactgtgcttctgatggcattgcaattctcactgacactggactccagtttggcatcataatcctaatatatccacagttggagtactggccagaataccagtagagcgttagtgctatgatctgacctgagcagactgaacgcttaataaatggagcattattcctcagtactattgcaggcaacgactatgtgaataactattact

SEQ ID NO: 126814 - DNA, 2855 bp, Glycine max
  Clone ID: PAT_MRT3847_85519C.1
ggctcgagttcttcgattgttgctgaaaatgagttctatatctctcccgttattgtagttgtatttttgtatttgatgcttacaattcacttatcttggttgcatgttaacagatttttcagaattatgaggatattctagtgaggaaccagctctactcaacatacaaggaactgtttggatagagtgaatgctgtcacttctgtactttttttgatgcacaaggatgctaaattgcaaccgattatgtctttattcaaggaagatattgataacggctggttcgctgcttgtcactcctggcatggaataaagaagaaactgatttgcacaataaggatgctactggacaaagggtattgcatgcctttgaagttgatgtgtctatgagctctaatggtttttcttatatcataaagaatttgaaggatctagtgccagtattaataaatagtttcctggaatttattttattgttcatgctatgaaaagtcttgaagggaactcttttgcttgtatgatatccattcttcatagcatatatcttatagtcaggtctattgcttatgggactgataggattcagaatccccaagttctcggtgaagacctgatgcagctgtatgggatgttaacatctcttctacattcttgaagaaattatttcctcgtttccccctcaacccggttgatcatctttctgaaaaggattgtgataggttgtttgacttgaacatgatcgttgccaaaatattttttgaattaaatgaatggacgagtcttcctcctaatttgttggagacatttctagaattttttgaaaatgctttgcttgggaagttctgcagggctacacagtctggtaaggctgtctgggaagagtgtttagttcagctcctttcatttattcctaaatttctttcacgtggggcaagctcttggacatcacgtcttcttcaggcttttacccagacatttagggaaagcaagccaggttccttgctgaaattggcctgtgtttctgctattgaagatatgctaactcctattgaaagcatgctttccatagagacaagcaatccagaaaatttagaacttcaagatgctttactcgcatggattagagagctccctctgttgcttatccagcttggagataaacacccaacctgctcccaggttgtgttacgccttcaacttcgtattggacaatgttctttgttgaattcatcacttgtttgtatgtatgacaacacacagtactcattgctagatttttattgtacatgtcaaggaggacagatatgttatggtccttttctcaggcttcctagagaatctcaagagctctctttatgttccctttactatttctcttatttggacctgcctattttaaagtcaatagcttgttgttgcctaagtgcagatctagatccctatgtgttatttaggatcatagaggttctccattcagcctatagagatggacatataaaaattgcagattacttgagtgttttcatcaccttggtcttgcgtttcaaagtttcccctgaaatcggttctgctggttttaagagtgatccactctgccaaactttgaagtcaatgacaactgttctttgctcatacatggcacagatgggtgacaattctcttgttctgcagatagtagagaaagtggtaattgatcagataccacaaatgccttctttggataatagttgctctctcctgagaatgcttgttacagtggattccaagcccacaagactttctgaacaaagcattatcattctaggccagcatctttctgaatatctgatggatgctgtgcagtgcattccagaagatggtgatgaacaggggactccctccattcaattaagtactcagcattattatctcctaccttgttttttcttgtttgatcggtgccataaacttatgaatcttgtgttgaagagaatgggatcagctataactgaaagtagtttgtcaccaatatctgataaatgcactcaacatacaaggaactgtttggatagagtgaatgctgtcacttctgtactttttttgatgcacaaggatgctaaattgcaaccgattatgtctttattcaaggaagatattgataacgtcatacataaagttttttctttaaagacatcagggcggatcagtacgacaattgaagaaaggcatgaaatacaatgtgcatttgaacgactgaaaatcttaacgggataacaattgtcaagaaggatgttctgaattgagaaactggttcatgatatttgcaggcatcgttggcatagaagggagttttttttgtcaaattgacagacagaggacatggactgagctctggggtgtaatttgatctctctccatatgtgtgtgccctttttgtcttagattgcttccgagttgtaactttttctctctaacttgcggcgaagtctggatcaaaactggtaaactttgttagggtaaactcggcatcagttttattactatcagagcatacttggcattggcatcctcatctactaacctacttctcccaagtttaatttgcaagcagttttgaggcctgcctgcagcaggcactttatttcactttggagaaatctaaattttgcatgcagcctcagttttgtttcactgtgtttctattagctagcctcgtgatgagcgtcaatggcttagacacagtagatattatagttttcgtgttaattttctttcctatacaagtatacaacaatagtgttaagactaaagatttctgaccaaaattttgatgatagtataactttatgagattatttaaagtaatttaacaaaaa

SEQ ID NO: 126815 - DNA, 190 bp, Glycine max
  Clone ID: PAT_MRT3847_8551C.1
gaagaatcaatataaagcatcagtcgtggcggtgttaggtaggcggtactatggcggcgcctgaatcccctctctggtacgtcggtgtcggtaggcaatccgttagttttcgcgtgatgaagcaaatggggttggaagaaggagaaggtcttggaaaagataagcagggggtcgaaggatcacgttcggg

SEQ ID NO: 126816 - DNA, 2186 bp, Glycine max
  Clone ID: PAT_MRT3847_85520C.1
tggtccttattcttcttgccagctcctttagagttgcaattccatcctttcagtgttttaattttctccatgccaaaaattccttaattttaatagatcaatttactgacccatcacaaacaaattttcacactacaataacaatcaacccgcaaacaaacccttcgaccaaatgttacattgtacgtgttaaataatactcggggacagtatattggaaacatatggaaaaataataaacaaagaaacacgctactatttttttgctcttaattaattcctagtttttatgttttcatttttgtaatcctttagacctaaatgggagcctcatgaagaacaagaaagcatgcatacacctggtcgatatgcccaagctgggggcaagcgagcatatttttccattcctggttgctcatcatacggatgctccactaatttgagcaggctgcgaacctctccaaaatcacctatttctgcagcatcaattgcagtctggcagagatagttcctcagtatatatttaggattcactgaatccatcgagatcttcctttcgtcatcaggtatcccactggtagagacctcatgtatataagctttcaaccaactggtccatgcttccttacgctctttaccaatatctaacagtacagactttagtgggactaacagctcatcatctggaatgtttatgtctgctttaacatttgaaagcgtacgaaagaagtttgtgtaatcaactttgtcaacagccatattgctaagaagtttattaatcatctgcttattatacttagggaggccaagctttttggtcattgtaacctgataatcatccataaatctcgttccatatctttccatagcatagttggcctctttttcatttattaaatgagcagcttgtagtgttgttgtgaactgtgcaatattccacaaaccaatgtcaggctggtttgcaaaacagtatcttcgacctggaagatctgtagtatttggggtaaatttaggatcaaaagcatccaaaaatccaaatgggccataatctattgtaagacccaaaatgctcatgttatccgtgttcagcacgccatgagtgaaaccaaccccctgccatctagcaatcagggaagcagtacgctcagcaatctccaccacccatgctgcatacttatttgaagtgagatctacaacagaatgatcttcatcaccagtgcagaaagataagctatcactcttgctcatattttgaatatgaggaaagtggtgcctgatagcatagtctgccaaaacacgaacaaggcctaggtcctcatcacttctggaggcatgtatttggtatgacccaaaccgcagaaaagattgggcaactctgcaaacaattgcgccaggttcttcctttggattgccgtcataaaacatgtcacgggtgacgaggttgccggtggtaacaagagaaagtgcacgagttgttggtataccaaggtggtgcattgcctcactgcaaaggaactccctgacgctgctgcggaggacggcaaggccatcggcaaagcgactgtaaggagtcttgccagctcctttaagttgaagttcccacctttcagagttagaattcagtatctcccctagagtcattgccctgccatcacccagctgcccagcccacataccaaattgatgcccgccatagcactgagcataaggcgctccaactaaaggtgtggcaccagagaagaaaaggggaaaatctggcctctgaatgtcaagtaggtcttgggagaaggctacaagttggggattgtgtacttgaacagaaggagagacttgggtgtaacaagcatgcagaacctcacggggaaaggagtcgcggcggggatcgccgggcaattctctgacgaaggaatggtcccatttcagatcttccagattcaggccagaagactgatccatggatgagcggcatgcaatcggagggcagaaatggaaaatcctctttctggcggtggcgcgtgggagagggagagagaaatggaaacgggtgagaatggagactcccatctcataagaatggagactcccatctcatatctcatatctcatatcatatcttccttcgggtcaaccgctccgctagcctgggatgccgtccccaaaatccaattaattattttctatagtcc

SEQ ID NO: 126817 - DNA, 383 bp, Glycine max
  Clone ID: PAT_MRT3847_85521C.1
ggggtaaagccctttttaaaaccataaaaacccaaaattaccccccaacctttttcaaaaaaaaaaaaacaagcaaccgctaaaaggcccaaaaacccttggaaaaagtttttccccttttttttaaaaaaccccaattttgggctgaaaagaatttcatattgcccacacaatataacccttggcggggggggtccgaaccccaacaagtaaacttttggggccggcccattcgttgtctttaccccccaaaaaaaagggcccaaatcttcatccctccacgggggggggctaaaacccgccattgggactttaacccctccaccggtggggggggaacaaaaaaaaaggttggggggggattggggacttgaaaattaaca

SEQ ID NO: 126818 - DNA, 537 bp, Glycine max
  unsure (1)..(537): unsure at all n locations
  Clone ID: PAT_MRT3847_85522C.1
ggctcgagctccctctcccacgcgccaccgccagaaagaggattttccatttctgccctccgattgcatgccgctcatccatggatcagtcttctggcctgaatctggaagatctgaaatgggaccattccttcgtcagagaattgcccggcgatccccgccgcgactcctttccccgtgaggttctgcatgcttgttacacccaagtctctccttctgttcaagtacacaatccccaacttgtagccttctcccaaccagttgccgacctacttgatctcgaccataaagagttgccttatgctcagtgctatggcgggcatcaatttggtatgtgggctgggcagctgggtgatggcagggcaatgactctaggggagatactgaattctaactctgaaaggtgggaacttcaacttaaaggagctggcaagactccttacggtcgctttgccgatggccttgccgtcctccgcagnagcgtcagggagttcctttgcagtgaggcaatgcaccaccttggtataccaactactc

SEQ ID NO: 126819 - DNA, 242 bp, Glycine max
  unsure (1)..(242): unsure at all n locations
  Clone ID: PAT_MRT3847_85523C.1
tacctgtcaattcccacgcctcaatnttnnnggcttcattgtcaaccatacccatcactatggctaccgctgcagagggtgtcttgcccaagggtgatcgccattcaganaagtctgtgccgcattcgtcaaacgatgtcgcaaagcagagcggtgttcctgaggagggcctgcaaaggaacnctctcgagcnggcacnnncanttcgttgnaatcggtgggnactgtcggtactggtgtct

SEQ ID NO: 126820 - DNA, 583 bp, Glycine max
  Clone ID: PAT_MRT3847_85524C.1
ccacgcgtccgatttctctctccctctcccacgcgccaccgccagaaagaggattttccatttctgccctccgattgcatgccgctcatccatggatcagtcttctggcctgaatctggaagatctgaaatgggaccattccttcgtcagagaattgcccggcgatccccgccgcgactcctttccccgtgaggttctgcatgcttgttacacccaagtctctccttctgttcaagtacacaatccccaacttgtagccttctcccaaccaggtgccgacctacttgatctcgaccataaagagtgagtctgtcccataccttatatatcttcaaatacctacctttcattcttgctttttgactttcagatttcagaggccagattttccccttttcttctctggtgccacacctttagttggagcggtgccttatgctcagtgctatggcgggcatcaatttggtatgtgggctgggcagctgggtgatggcagggcaatgactctaggggagatactgaattctaactctgaaaggtgggaacttcaacttaaaggagctggcaagactccttacagtcg

SEQ ID NO: 126821 - DNA, 262 bp, Glycine max
  Clone ID: PAT_MRT3847_85525C.1
cggctatactgtaaactatcaggatcagagtcgatctgatcagaaataaaggactagatgtatgggacacgatcagattcctattgaggatagaatctcagtgtaatcgtcgacaatcaagaggacgatctgaatcatcagcggcagatgacgagagcaagttctggtcagcgatacccatagcggttcaacgctgcggagtctcatgaggggtttgatggatcctctcgagctagatcactcacatgcagattcgcccagt

SEQ ID NO: 126822 - DNA, 117 bp, Glycine max
  Clone ID: PAT_MRT3847_85526C.1
tccagtcataccactttgcaagacattgaagatggtccagcatatgcccaattttctgtgactgtaaatgaaaatctgctcacaactaatgagaaggtatttctttgcttggaactc

SEQ ID NO: 126823 - DNA, 430 bp, Glycine max
  Clone ID: PAT_MRT3847_85527C.1
gctgggcgcctggggtgccggaccggaacggccgggccgacccaggcgacccgttctgccacggggacggcttcgacttctaaagccatgatccaatggttctgttcttcttcggttgagtatgacgtgtgagggagcttgcgcggagaagacacacggagcaggttcaccggttacctttttgaagctgtgaacagagaaggcttccgggcctgcaaggatgatcacgatatcatgaaaggggagtccatagcgccagagctcatacgagccattgaagggtctcagagcgtgcttgtggtctgtgccaaggactatgctttctcaacttggcgcctgcgtgaactagcacatatgtggaattgcttacaaccatctgccagacatcttgtgccgattttctatgatgtggacccatcacaagcgccaa

SEQ ID NO: 126824 - DNA, 511 bp, Glycine max
  Clone ID: PAT_MRT3847_85528C.1
gtttatctcattcacacattcacagttatactctctctctctttgtcgcttggatcactgatctcatctcaattttcaggtacttctctactctctttctcatgtttctactttattcccactgtatgtatgattcaccttttggccaattaaaccatgcttcattttggacttttgtagagatggtatcttatattctactcaattgatcaagcattgaccttatgattctgtgtatcttccatgttgattactgggaaatccattgacaaaaagtaattagattaaaaaaaaatagtactacccttatatggaatgatgagttttgctgcattttttggagcatggagatctaaagtttgtattttgaatgatatgtttgtacccaatgctaatgcaattgattcagcatgttacagtgttttcgtttgtaaataattgatcggattgtaaattgtgactctttgttgaccttgatttgtggtgatctgattgatcatgctcaagctac

SEQ ID NO: 126825 - DNA, 766 bp, Glycine max
  unsure (1)..(766): unsure at all n locations
  Clone ID: PAT_MRT3847_85529C.1
ccacgcgtccgccaaattgaatattactttagtgatgctaatttagtgaaagacgcatttttaaggtctaaaatggacgaacagggttgggttcctgttactttgatagcagactttcctcgagtaagttatttgtgcttggtctagcaatacttcctgcatattttatgtagagccttttaatgttatacttattggttgtatgctttagtaaatctttgacttgcagtagtaattatctagcattttttgttgcttttttaagattgtttccgttgaagatttttcgttacacaacttatttggcatctatgatttggtacacttttgcatgctaatgactactttgctatatctcttatcaggaaagacatatttctcactttgaagttgattattttacttattccatctttatgaaagtaatgctgctgctgatggccggcagaanatgaggaagttggacctttttttcccctaataatatgaattttaacatactntttttgtgcatctttatntgatgttaatcctagacatagaagtttgatatnttgttgtttgtaactggtttgagttgtaattcttttcaaatattacttttgcaagttctttggatacttttttagtaattcatggtattgaaatttccaggttgaataccactatgantttgggtgcgtacgatgtatagtactgtttaggatggcctgtgcttncagctagcttagatagtcaagttgactcttatctaatttagttttgg

SEQ ID NO: 126826 - DNA, 266 bp, Glycine max
  Clone ID: PAT_MRT3847_8552C.1
tgttcacgaatcactgtagcgagttataaaataggggttgatatggcaagtttgataataaattgggaagcttttagcttgtggtttggcacggttcttttgaccccccagataagtcttccaaattgggggtaagtggtaattaaagtctccttcaatgacagggggagccttttgcacttccctcgggggagtcctccccttaatgggtcattttttcctttaaggtaatctcctcaactgtcaatcctggtactcaaatatat

SEQ ID NO: 126827 - DNA, 472 bp, Glycine max
  Clone ID: PAT_MRT3847_85530C.1
tgccagagtcctgtcacaacaacccaaccggcaaccgccgcaacaaaatattattcgtatttgaattggtcggaaggagatattattattattattgggccgggcgacacagtcaaagaagtaataataaccagggaaaaaattagtcctaattcgcagggcacggagaatagtaagcaggggtaatgcgttgtaattataaggcaaagtatagtccaggctagggcggtcgaagggagtatcagaggaagtaatttagttaaattcggagctaatgcgaattcagtaataaccgaacacacccccaaagcacccgagggaaaacacttacgccacttagtaaccataccaatactagagcccggctcaaaggtgtattagacccgctaggttataatttgcagcgacaaattcgcagaagtaaacctatagcttatcatcagtactataggcaggtaaacaatcgctacac

SEQ ID NO: 126828 - DNA, 259 bp, Glycine max
  unsure (1)..(259): unsure at all n locations
  Clone ID: PAT_MRT3847_85531C.1
ctgctgccgaaacccttcccnatcctanggtangnnagtaatcngtggttgngaatggnggngnaggcgannggtnngaangaggaggtggttaccagnnagtacaccattaacctccacaagcncctcccatggctgcacatttaagaagaaagctcctaaagctattaagganataaggactttgcccaaaaggcctggggaccatgctgtgcgggtgntgtgagttgaaccantttgttggagccaggnatcngnt

SEQ ID NO: 126829 - DNA, 308 bp, Glycine max
  Clone ID: PAT_MRT3847_85532C.1
gttactctgatgttttcctttacatttttaggctggactccatattttcaagaacaggtctatagcggttccgggacacttttttgggaaattatgaagtcttttaatttaacatataaaacatacccacttaactccaactttattaactttgaattttaaattttttccaagtggaaaggtggtccacccaaaattccttggtcctttaaaaaaaaaaaaactttttttttgttttaaggaaaattaaggtttactgttaaagggtcttttgggttttttaaaatttggggtggggatttaatttt

SEQ ID NO: 126830 - DNA, 1200 bp, Glycine max
  Clone ID: PAT_MRT3847_85533C.1
gcatttcactccccaaactccagagtcccaccgataattctctttcccatactctctctgtgttcttctgttctctctgtttcttcagattttctccctcctcagcgcctgtgaagtttgattgcttcattctttgaagtgaatttgacaattaagtaaattggttgagaagggttcattcctcttcattggaagaataaaacaaatattgcaggtggattttttctgatggcaactaatgaaaatcttccaccaaatgtaataaagcaactagccaaggaattaaaaaatattgatgaatcacctcctgaggggattaaagttgtggtaaatgatgatgatttttcaataatatatgctgacattgaaggcccagctggaactccttatgataatggagttttccgcatgaagttgttattgtctcgtgatttccctcactctcctcctaaagggtttttccttacaaagattttccatccaaatattgcaaccaatggagagatttgtgtcaacacacttaaaaaggattggaaccctaaccttgggttgcgtcatgttctcattgttgttaggtgtctactaattgagccatttccagaatcagctctaaatgaacaggctgggaaactgctgcttgaaaattatgaggagtatgccagacatgccagactttacacaggaatccatgcaaaaccaaagtccaaattcaaaactggagctatatctgaatctacaactgctctgaatgttgatcagagtaacacctcagttcttaatgctgaagtcaaaactgcaccatcgggtgcgacattgccattgcaatcaccattggccccctcaactaacaacacaacaagaggaaacaagcaggaacaggctgtggttggagctgagccagctgttaacagttcttgtgccacatccatggttcatgctgctgcaccaatgaaggcaggtggagtagcaaaagctcaggctgacaagaagaagattgatgcccggaaaagaagtttgaaaagattgtaatgaagttgttcaataattgaacttatatcatttgtggggtaattttgtttattgaaataatagagaaaggggaaatgtggttggggtgtatgggaagatcaaagatgggttcaaatgaataatacttttgttgggactaaatgaatgaaattaaactgttgtatgtgctct

SEQ ID NO: 126831 - DNA, 377 bp, Glycine max
  Clone ID: PAT_MRT3847_85534C.1
ccgagtagcaaactagttttccttgtaatatagagcatggaagggaatgagaagcagaaaaaagtgaccatacaattttcctaactactttaatgaatcccctcaaatgatccattgtatcaccctaaggtaaaattcatatccacaaaaatgccaaaagttggcctgatatttatcaacagttccaagaccataatgatcaaattctacaaacttctgtggaagggaaagaaatataattgggggtttgaaacactaaaacgtatgaacagactatgcttctgattgtatttgcctgccagattgaagggcatcttgcagggactccacagcaccatcatagttcaagaagcccataaaccaaaattcatgattgt

SEQ ID NO: 126832 - DNA, 588 bp, Glycine max
  Clone ID: PAT_MRT3847_85535C.1
acttcaaaaactaatatattatttagggcaacaacatcacacaaagggaaaataatgtacagtacgaaaacgctgataacaaaaaaaaaaaaaaaaaaaacctcacagcaataatcactttaaaaacaaaaacatgtataactgggcttaataaaaagggaaaggtttttggttaaaggaaaaggggtactttttttgaaacaacaaggccaaaaacctcgctaatatttacatttaggggataaggcaacttccaatcaaaccaataaaaaaaactagcaggcccatactcaataaaagcaattccaaaattcatcccaggacatccttttttcccaaaaccaaagggaaaaaactgaaagtttttttgacctttaaaatcaacttgactattttaaaatctttttgggaggaacttttaaggccgttcccaaaatctaggatctttttgcattgcccatgcattgataaaaaccattgtttttgctggaatataaaaccctttcagttttacattaaacattgttactctaggaggcaaaagaggagtaggcaaatgtaaccttagcgtttctttgactacacatt

SEQ ID NO: 126833 - DNA, 636 bp, Glycine max
  unsure (1)..(636): unsure at all n locations
  Clone ID: PAT_MRT3847_85536C.1
aggaagttaagctactttaggttgacaaagttcaagacaaacttgttagatgggaatcttccttcattgtcagaaatatcacttctgataccccacaggatggtgtactccaaggaaatgatgatcagaagagttatggctcacggttcaataatgcacaattctgattggaatgttaatttgatgaagcaaatatctatcagtggactatgtaacaacttaggtggagcaagaattatgcaggggtccatatcaagaatggtattgaaggaaataatatatgaaaagctgatgcaggatactatgtgatagttcatttatcaagttttggaaatatttgctgacttggtctggtgcaatgagaagaacaatacacgtgccgaaggagatcaacgaccctgaagatatctgaggatgaatgttctgtcgaagttgctgagatttggttccagtgaatacatgactgctgaactttgatttgcagtgctatacaatttagtttgtcacattagcatccagccatcttttagcttttctatttttgctgagaactaaaaagttgttgcagaagcaatagttccttacacattntttctttcagtggcatgatagtggtgaaataatngnctactcatc

SEQ ID NO: 126834 - DNA, 420 bp, Glycine max
  Clone ID: PAT_MRT3847_85537C.1
tttttagaaaagaaaaatgacttatattaacatcatgatattgatgtagtgcacacaaagtgatgcccgaatacaaactgaaccaactcatgactattattattttcacaagtcctgactattgttacaactccctgcttgtgcataaaagattaaaatggaaggttaaatattcgaaactcccagtctcccgccattgtcagatataagagggtcaaaaactcatgtacaaagtcacggacttactccggtgattggagaggctttactaacgggccaaaatataataatgaaaattctatccaatgccaataatcaatattctagattaaaaaattgtcttgtagccagaattcttgcatccatatactatattcaacgggcaggcctaacctaaaatttggaatctaaaattgaata

SEQ ID NO: 126835 - DNA, 549 bp, Glycine max
  Clone ID: PAT_MRT3847_85538C.1
tttttttatacaaaagattaatttttcccgttcatttcctcttcacaattaaatgtgtatcaatcttgacatgagtaattggaacatttgtttctaaaaagattaaaatgactagcaaatgaatcatcagctatcctgtctcaagcacaaggccttctccagcattcttgcttcagtcagactgcactgaatctgtgacgggaggtatacaatctatcttgtaccgtagcacctttttgaaaaaggttgaatatgtgttgtcccagatcagtttatagcttccagccattaacgtgcagaagttcccttggtcagactcgtaacggcggtaaggtaacatcagagttttttcccccgtaggacttagaaactccaaactaaatccaatatccatatttatagtgccttgcaccaatgaaaaatcccaagcaatgtatgagtttacagcatcaacagagagtaaaacctcgtaagttttcccggctggaacatttatctctttgtagtcatcatttttccttgcttccaatgcaccagcaacctctgctg

SEQ ID NO: 126836 - DNA, 1828 bp, Glycine max
  Clone ID: PAT_MRT3847_85539C.1
ccacgcgtccggttctatactgccgccgacttagacctgaccttggcttggagtaaacagaatagaagagaatattccaaagcaaaagaagagaagagaggttgattgatccgatccggttccggttccgattccgattccgatcccgatggcttctacagagggtctagtgcccataactagggcctttctggcctcttattacgacaaacacccttttactcctctttctgctcatgtctccacgctttcttctcagattcgttcaatggctaatgattttctcactcagcatcctcctatccaaggagagagcatcttaataaatgaagctgaccagcaacctccgcacaaaatggatgagaacatgtggaagaatcgagagtacattgaagaaacaatttttttacttcagagttctaattggccagaggcgctgaagcagcagtccacagctgacagtgttgaatttgccattacgcttgggaaactgaaagataaacttcatattacattgaaggctttggaatctttccaaactaaaaatgctgaacatgtatttaacacagttatgacatatttgcctcaagattttcgaggaacactaattagacaacaacgggaacgctcagagaggaataaacaagcagaggttgacactttggtaaattctggtggtagcatacatgatcgatatgctttgctgtggaaacagcaaatggacaggagaaggcaattagctcagcttggttctgcaacaggagtctataaaacacttgtgaagtaccttgttggggttcctcaggtattgcttgattttactcggcagataaatgacgacgatgggccaatggaggaacagcgtcatcgctatggaccacccttgtacagcctcacctcaatgattctttctattcaactcttcctttcattatcatgggcacgatatgatgctaacaatttaaaaatggaacaaatcaccgtcttggaacaagctgttgatgtctataccatggagttggaaaggtttttgacatttatcagtgaggtctttgcaaatgcacctttctttatttcagcagaggttgctggtgcattggaagcaaggaaaaatgatgactacaaagagataaatgttccagctgggaaaacttatgaggttttactctctgttgatgctgtaaactcatacattgcgtgggatttttcattggtacaaggcaagataaatatggatattggatttagtttggagtttgtaagtcctactggggaaaaaactctgatgttaccttacggccgttatgagtctgaccaagggaacttctgcacgttaatggctggaagctataaactgatctgggacaacacatattcaacgtttttcaaaaaggtgctaaggtacaagatagattgtatacctcccgtcaccgagtcagtgcagtctgactgaagcaagtatatgctagtcatttgttcattttaatcttattaaaaacaaatgttccaattactcatgtcaagattgatacacatttatttgtgaagaggaaaggaactgggaaaaattaatcttttatataaaaatgttattgttataaaaaaaaaaaaactaataaagaaaaaaaaaaaaaaaaaaaaaaaacaaaaaaagaaaaaaaaaaaaaaaaaaaaaaacttacaacaaaaaaaaagggggcggcatttctcaaagtcctcagattcaaaaaggggggccctcctaagggaaccaattttaaggcgcccgcgttgcaaaattaaagctttttttttggggccccaaattgcaatgcccgggccgggggtt

SEQ ID NO: 126837 - DNA, 805 bp, Glycine max
  unsure (1)..(805): unsure at all n locations
  Clone ID: PAT_MRT3847_8553C.1
attctaatttatatagcaagctagctaggttgaacttcgtttgcatctgattaattcgttctctttgccaagatgcctacactctttgagatgacaattacctaagaccgtgcctcaattaccttccctggaggagtaaatgctgtctgatctacaaggtcaatgccgatatcccggacatcgattaaattcccctcgaataagatgcgtctcttcttccccggaaagtagctgcgaggacggtgtgtacccatgccttagtacatatttgcagaaggatccaacccattcaccttgtccttcgtctctgtgaagccatgtagatcttctgcatgactctctgtggcaaaacattaaccttattagtggaaagttatgatgcattggacaactgctgggctacaatgcgggatgagtactcattccccccataccagcaaagagtattcttcgccgcgaaagcaacttgtggagggaaggaccctcgccgtgtacagcttgcaaaaggaatcaccccttcacctcgtcatcctgctcctgggagtgatgcagatcttcataaagaccctctgcggataaattataaccctacaattggagagctccgacaccatcgacaacgtaaaggctaagatctcaggacaaggagggtatccccccagaccagtagaggctgatcttcgccggcaagcagctcgaggacggacgtacccttgctgactacaacatccagaaggagtcaactctccacttgntgttgcgtcttcgtggtggtatgcagatcttcgtcaagacccttacgggt

SEQ ID NO: 126838 - DNA, 711 bp, Glycine max
  Clone ID: PAT_MRT3847_85540C.1
ctgtaatcaatttaagattagacaccataagagacagttctgcaatcaagctaacataatagtaactgacaactacccatagcatgttctacaaaatcagctaattaaaggattcacagaacaaaataacaacaaagggagataggttaaaagctttcatggggtaggaagctttttatagagttttcataactgtacaatcttatgttagttcaagcacaagatggtttactgatctaacaaacattccttagagtctggcttcagcagcagaatttacaataccaatatttctagtgtgctgcagtgatggatccacaaaagactgtttatgaaacattggtttctgtgtgccaaagtattgtctgcaagagtagtcagtttggtaaatgttatctaaacagacacttgacaattggatgcagttcttgggattttgatcagcagagtctgatgggatggtgtcagtgagtgtttttattgcaaattcaatgcatggatccatccatgacatgtcaagtgtcttttcagaagatggtcctgcattctcattcttggcctttgaatcagttttgtcatcaccggcatgttcttttggatagcaaggttctctagagatgataacacacggtcacctaatccatcattgcttttcttatcatcgcctttgccactggcgagggtgggagcagaagttttggaatgctggct

SEQ ID NO: 126839 - DNA, 1186 bp, Glycine max
  unsure (1)..(1186): unsure at all n locations
  Clone ID: PAT_MRT3847_85541C.1
cttgggggttttttttttnttttttttttttttttaaaaaactctaaaaacctattttaaaaaaaaattacatgatcaaagactcaattcaaaaataataatttagaaacctacatgaatgtgggaaaactttgtatcatttttgccttcatcatcatcaaagggaaagtataagaattttggcttattctataccttaaggaatgcaattctaagaaccaagtccaaccagctaccactttgatgtcacacgatgggaagattctacaatcaacttaagattagacaccataagagacacagttctacaatcaagctaacatgatagtaactaacaaccacccatagcatgttctacaaaatacataggatcagctaattaaagtatcacagaacaacataacaacaaaaggagataggttaaaggtttcatggggtgggaagcttttttagttttcctaactgtacaatctttatgttagttcaggcacaagatggtttactgatctaacaaacattccttctagtatctttcaccacagtgagagagtctggatccagcagaatttccaatacctatatttctggtgtgctgcagtgatggatccacaaaagactgtttattaaacattggtttctgtgtgtcaaagtattggctgcaagagtagtcagttttgtatatgttatctaaactgacacttgacaaggccatctcactgtgttggctatttgatgagctgagttgctgttggaggcagttcttgggattttgatcagcagagtctgatgggatggtgccagtgagagtttttatagcaaattcaatgcatggatccatccatgatgacatgtcaagtgtcttttcagaagatggtcctgcattctcattcttggcctttaaatcagttttggcatcaccagcatgttcttgtggaatagcaaggttctctagagatgataactcatggtcacctaatccatcattgcttttcttatcatcgcctttgccactggcgagggtgggagcagaagttttggaatgctggctgtttcttaagttggaagaagtttgcgagtttttggaggcttcaaatgttactccagtgagagtttgaattgcaaatgcaatacatgggtctgttaggaacgctcgaaggggaaagtcaagggtgtaatcggacgcggg

SEQ ID NO: 126840 - DNA, 213 bp, Glycine max
  Clone ID: PAT_MRT3847_85542C.1
ggctcgagatgaatgctacagcctatcataggtgaacaaagagtgatccatccacaagtggatcaccgatccctctactcacagaaatgctactctaattgacactgtctatctagagagcttgtccgatccatgacccatagcgccagcaactgcaagatgtgttttgccaagagagggggaaaagaatccatgggaacaaaacgctcctct

SEQ ID NO: 126841 - DNA, 688 bp, Glycine max
  unsure (1)..(688): unsure at all n locations
  Clone ID: PAT_MRT3847_85543C.1
aaaggatctcaatcgaccttgggaagaccctatgccagagtcaggtgaaaggcatcttgcccaggagcttaggggtgttggtttatcagcctatgatatgccggaatggaagaaggatgcctatgggaaaaccattacctttgggcaaaggtcaaagctttctattcaggagcagaggcagagtttgccaatttacaagttaaaaaaggaattgattcaggctgtgcatgataatcaggtcttggtggttattggagaaactggttcaggtaagactactcaagtcacacagtatcttgctgaagcgggctacaccacaagaggcaaaattggatgtactcaaccccgtagggtggctgcaatgtcagttgcaaagagagtcgcagaagagtttggttgtcgattgggagaggaagttggttatgccattcggtttgaggattgcactggaccagataccgttatcaagtacatgacggatggtatgcttcttagggaaataatggttgatgagaatctgtcacagtattctgttataatgcttgatgaagcccatgaaagaacatacatactgatgttctttntggactgctgaagcagctagtgaagcgtagacctgaattaagattgattgtcacatctgctactctgaatgccgagaaatttcaggatatttctttaactgcac

SEQ ID NO: 126842 - DNA, 287 bp, Glycine max
  Clone ID: PAT_MRT3847_85544C.1
ctgctgcactttggcttctgctgcgctttcaggtccagagggcagccgtagccatacgagtgccacatccacacactcaatgcactcgacccagatcaccgtatcgagtcagaaggagggctcatagatacatggaaccctaacagcaagccattccaatgtgccggggttgccctctgtcgctgagaccctcaacctgtacgaccttcggagaccttcctacgccaacagtgcccaggaaatctacatccaacaacgtgacggtatttttcgcatgatatacccgg

SEQ ID NO: 126843 - DNA, 1248 bp, Glycine max
  Clone ID: PAT_MRT3847_85545C.1
ccacgcgtccgcatttttccgttctaaaattcaaaaacccaatcccaatctctccctccttatttaaatccctcaaatttctccttcaaaccacaacaatgccgtcgataccagaagaacgactcctgactccgaacccagaccggttctgcatgttcccaatccaataccctcaaatctgggaaatgtataagaaagccgaggcctccttctggacggcggaggaggtggacctctcgcaggacctccgccactgggccaccctcagcgacggcgagcgccacttcatcacccacgtcctcgccttcttcgccgcctccgacggcatcgtcctagaaaacctcgccggccgcttcaccaaagaaatccaactcccggaggcccgcgctttctacggcttccaaatcgccatcgaaaatatccactccgaaatgtacagcctcctcttagaaacctacatcaaagactccacagaaaaaaatcgtctgtttcgcgccataaacaccatcccatgcatcaccaaaaaagcccagtgggccctccgctggatcgatgcctcagaatccttcgcggagcgcccacgcgtccgcgcttgcgtcgagggaatattcttctccggaagcttctgcgcgatattttggctcaagaagcgtgggttaatgccggggctcaccttctccaacgaactcatctcgcgagatgaggggcttcactgcgacttcgcgtgtctcttgtactcgcttctcaggaagaagcttagtgaggagcgcgtgagggagattgtgcgtgacgcggtggagattgagagggagtttgtgtgcgacgcgcttccgtgtgcgttggtggggatgaacggggagttgatgagtcggtatattgagtttgttgcggatcggttgctggatgcgcttgggtgtgggaaggtgtacggtgctcagaatccctttgattggatggagcttatttcgcttcaggggaaaactaacttctttgagaagcgcgttggggagtaccagaaggcttctgttatgtctagcttgaatggtaatggaggggcgcatgtcttcaagatggatgaggatttttaatttttttaggatgctctactaattattactattttttaatcactgtcgtaaggttgctttcatgtttttaacttcattcaatgtaacgtggctttttctgttcattgaaaaatataatccggtttacagtaacgtacttgaattgaagaattgattagat

SEQ ID NO: 126844 - DNA, 1196 bp, Glycine max
  Clone ID: PAT_MRT3847_85546C.1
ccacgcgtccgcacattgccacttcttaattgtccgattttctatggcttccaacaaactccttgccaccattttggtgctttctctcctcttttactcaacattcactcatgccaattgcccaccacccactccaactccatctccatctccgaagcccacaccacccacaccaccaactccaaaaccaacacctcccactccaaagcccacgccaccaactccaaaaccaacaccacccactccaaagcccacaccacccacacccacacccacaccacccacacccaaggctggttgtcctccaccttctcctccgaagcccacaccacccacaccaccaactccaaagcccacaccaccaactccaaaaccaacaccacccacacccacacccacacccacaccacccacaccacccacacccaaggctggttgtcctcctccttctcctccttcaccaccatcaaacaaagcctcatgccccaaggacacattaaagctaggtgcttgtgctgatctcttaggacttgttaacattattgttggaactcctccttcgagccagtgttgtgcattgatcaagggtttggcggatttggaagctgcactttgcctatgcaccgcaattaagagcaatgtgcttggaatcaacttgaacgtacctgtgacgctcagcgtgatccttagtgcttgtcaaaagactgtccctcctggtttccaatgtccctcctaagatattaatcaaattaggtcgagttatctctcatcgtctcgatctgccgtcagagaaatgtttagatatgcacttaacatgaaattgattgagtgcctacgtaagcatttctttggcaatttgcagagtgttatatatgtttttttttatgtattactgtagttgttgtttttttgttgggggtttatatcgttgttaatgctagtgcacgtacatgttctaaataatgttgtattgttttgcttcgttaaattatgaattgggcaagcttgtttgccttaatttgtcttctagcttgtatgtatcatgaaatattgtctaattttatcattatgtccatattcgtggtgatcttgtattgtgcaccgtcaaattatgaattgggcaagcttgtttgccttactttgtcttctagcttgtatgtaccatgaaacattgtcttatttgatcattatgtcca

SEQ ID NO: 126845 - DNA, 175 bp, Glycine max
  Clone ID: PAT_MRT3847_85547C.1
cttcataattgcttcttgctttggtcgatccatttggtgatcactgatcaggggttgggggtggtggtaggaaaaaatgatttccaccccttggttttttgaggacccctttaggagggattcattctttgggcattccaagctacctttttttccggttttaccaaaaatggtt

SEQ ID NO: 126846 - DNA, 441 bp, Glycine max
  Clone ID: PAT_MRT3847_85548C.1
cacatacgggctgcaagtttttccgacgttccatattacgccgaccgaaagagtggttgctgtataacggtaaacagagacatctccctagacagtggtgcagcccgctgatccacacccgatgtagatgctaaggtatccatatctacaaccccgctgtagatctcggctgtaccattcacagacactgttgctcctaccgatcctatactagcaagaaagatgcgacctatcctgatggagatcgtgaacgatgacccaaccaaaaacccagctaatcaacctccttatcaagatagatatgccatactggaaccagggccctccaactctcttgctattgcaagcacaggatattccaaggatgctgacacaggaggacacgacgttgcgctgtgggagggtacatctgtgccttccacaaaaccggacgttactggc

SEQ ID NO: 126847 - DNA, 329 bp, Glycine max
  Clone ID: PAT_MRT3847_85549C.1
ggatattcatataactgagattcaggtgccctgggaggggtacaaatacaacataaacttcaccaaacaggacaaggaaaaaaaaatgaaaaataacacagtattaccatacaaaatgtgagaattgatgccagaacggacttcaaatgtattaacttattcaatgatttatctcatcttcctgcaactttttcacgttgttttacctacacgggggattaataaaccccacaccaattacagtgggggctgtatatatatctcccaggggttacagataatgataattttttatggcatgacctgaaaagggagcagtcgctaaatga

SEQ ID NO: 126848 - DNA, 397 bp, Glycine max
  unsure (1)..(397): unsure at all n locations
  Clone ID: PAT_MRT3847_8554C.1
gccatgtgtgtgcatttttttcaactttgatcatttgagaattacacttcaaagttcagacctcttatgaggcacaaaattttgtgctcccactctccttctccctccattcttcttctcctaccttcaagctcttatccatggcttcttatggtggtgagcttcttcttgactcatcttctccttgaagtggatcnctcaatcatctttcaccttgtccattccactgccattaatcttcaagaagcaaaggactccattgatgaagaagatccaaggcctacaagcttcacttggagctacatcatgttccccccccccctgaaaatgatttgacctcaaatgccaaggttcttgaaactctagggatttttcctcaacacctaaaaaaaaaaaa

SEQ ID NO: 126849 - DNA, 929 bp, Glycine max
  Clone ID: PAT_MRT3847_85550C.1
tggaattccatgaacctaataataataaagagccatagatgcgaaaccagagaaagccctagaagcagaacagaagagaaaagagaaaacaaagaagagagagatgggaactccagagacgtcaagggaaccatgtccagaccgcatcctggacgacataggcggcgcgttcggcatgggcgcggtgggtgggtccgccttccacttcctcaagggcctctacaacgcaccaaggggcgcgcgtgtcgtcgccgcgtcacaagcggtacgcctcaacgcgccgcgcgtgggcggaagcttcgccgtgtggggcggcctcttctccagcttcgactgcaccatggtctacctccgccagaaggaggacccctggaactccatcttcgccggcgccgccaccggcggcttcctctccatgcgccagggcctccccgccgccgcccgctccgctgcgttcggcggcgtccttctcgctctcatcgagggcgccggcatcatgctcaacaagttcctcagcgcgcagcagccgatgccgatgattgtcgatgagcctcttccgcctaacgggctaccgggccagccggttgcttcggcgccggacgctgcctcgcaatcgtcgtggttaggtggttggttcggcgatgggaagaaggatgaggcggcggcggaggctaccggaggaagcgagaccaaggttttagagagctttgatgcgcctcctgtgcccaatttcgagtacaagtgaaattggttaagaattaaagataatttatttttggggtttagggttttagttttctttttagggttgggaggttctttttgaatctttcttctcagtgattgactattattgtatcagcaagtatagtttcgatttgccttgttttctgttttcttatgatatatcatatatgctaatgcaagag

SEQ ID NO: 126850 - DNA, 1192 bp, Glycine max
  Clone ID: PAT_MRT3847_85551C.1
accctacaccctccttcctcacgtaaccaacgccaccagcaccaatccaatgccctcttttctctctctcatagtctcattttcccattcgttcactcgagccgctaacacacactgtctctgatcctgcattattgttgacaacatggccacggagcttctccaaattgatccccctcagctcacttttacctttgaattgaagaaacagagttcctgcttggttcatctcatcaacaacaactcttctcaccatgtcgccttcaaggtcaaaaccacgtcgcccaagaaatactgcgtcagaccaactgtcggcatcgtcaagccacacggaacatgtgatttcaccgttactatgcaggctcagcgcacagccccacctgatctgcactgcaaagacaagttcctcgttcaaagcgcggttgtcccaaaaggaacaaccgaggatgaaatctcctctgacctgtttgtcaaagatagtggaaggcttgttgatgagaagaagctaagggtggtcctcattaactcaccttcttcccctgtaaatggagatctcaagcaggatccacccagtcaaatgcttccctctcttacagctgaaaaaggtatggaagcagctcaggatatggaggaggatggagctgataagggaacttttccaagtacaaggagtgttgagaaggtgggggacatgaagcaagtaaatgatgctgtgaatttgagttttgctactaaggattccgaggaattgaagtcaaggttgagtataatggatgcaaagctaagagaggctgaaggaaccatcatgaagttgaatgaagagaggcgcaggaacatccgagaaaaagatttgctgaagcaagagttggagatgttgaagaagaaaattaagatgaaaagagctcaggagggattcccgttactgtttgtctgtgtggtttcgattgtcagtatggcagtcggatattatattcatccataagggggaattgagtatagtcacagatgttccaaaatcatggtgttctccttaatgattcgatagaggacaattcgttgttaattcttatggttacactcgacgaatgttaatatgtgatacgttggaaccttcctttctgaaatgcttgtaaaatcaactacatctattaagaagagaatcataatatgcagccaactgatatttggagcc

SEQ ID NO: 126851 - DNA, 2550 bp, Glycine max
  Clone ID: PAT_MRT3847_85552C.1
ttcaggagccgcaagaaattggtgattcatttttctttgtgaattgcattgcaatgtaagtcttcttcttttccttttcctttttccctttccgtctttggaatgtttggaggtttccgttatgcattagattcgattcgtcaaaccagaaagcatattgcatagatgaaagttattggacagcagttcaacccactgtactcccacgcggtgtaccacgcttccgcaaccttcttctaatttcagattaaattgttaatttatttttctttgtgaagtgtattgcaatgatctgggttcattgattggctttgcgaggagagcttgggtgctactctgaacgcaaattttcaagatagctatgggtgttgtatatttttttgtgaagaagaattagtgagcataatgttttctgaaagattgggggcagacgaatctcattgtcaagatttacagagtttgagtgtgtcaaagcgacttgtgaggagtgttagccagaagtggaggaagaagagtaacaggaattctggggaagaagctgacgatgtaaatggagtttctttaagatgcttaaatctgtatggacgaggtgggggctgcaaggtaggtgctgacactggtgatgattttggcgattcaagcagtagaaggagatctagtgccagtgacgaaggaaagggatataagccgatttgtggcccagaagaaactgctgtggattgcttttcatatggggtgaaggacaggttctggaggagacacaaccgaaagaattctgagcttgaagaattgtttacaaacaatagaatgcatatttttcttcctgatgatattcttgaaatgtgtttggttaggcttccactgacaagtctcatgaatgcccgtcttgtgtgtaaaaaatggaggtcgttgaccaccacgcctaggttcctccatatgagaagggagggttcatatcaaagtccatggttgtttctgttcggggctgttaaagatggattttgttctggtgagataccatgcgctggatgtgtctttgaatcaatggcacaggatagatgctcattttctcagaggaaggttcttgttctctgttgctggtatacaggatgatatcttcattgttggaggatgttctagcttgactaactttgggaaagtggataggagctcattcaatacacacaaaggggtgcttgcatttagtcccttgacaaaatcttggcgtaaaatgccatccatgaaatatgctagatcaaatcctatattaggagtctctgaggtcagtttggattttccaacttgtcaaagtcatcaaagtcggcaggatagacgttttccaagatcaaggattggtggggtttcagacgtctatgaggatccccacaagctttcaatgagacgccattgcagacctgcttttaatgagactgaagctttgtctctgcccagtcgaaagacatacaaattccttaggcaaaaaagtgagcattcaagctcaaagggcagtaaaagatttttgttgatagctgttggaggtctgggatcttgggatgagcctctggactctggagaaatatatgattctgtgtcaaataaatggactgaaatcccaagattacctttcgattttggggttgctcgttctggaattgtttgtggcaggatgttttatgtttattctgaaacagacaagcttgcagcatatgacatagaacggggtatctggattgcaattcaagccactccaatcccacctcgtgtacatgggtactaccccaaacttgtatcttctgatggtcgccttttcatgctctcagtgtcctggtgtgaaggggatggtcagattgggagacgaaacaaggctgttagaaaattatgggagttggatctcatgtatcttacctggactgaagcctcagcgcatccagatgccccaatggactggaatgctgtttttgtgtcggataaaagcctgatttttggggtggagatgttcaaaataattggtcgggtattgggttttttcaccgtctgtgatgtgtctgatatggcaaactggaaccatatttcaagggatcatgttactcatgagctggacgtttcttcttgcttgaccaaatctgtggcagtgctacacctttgaaatcctttgtgcatgtatgctaaacaacagaatcttagatcttccctctatgttttgaggtgcaacatgaccggtaagtcctgctgtatatttgctgcatataattgtaatgggcaaatcttctgaacacgattctcagtttctgtgcttctcatgtaccttttatttaattcatttctcaccaatcataaaagttgaattccacaccgactttgcacttatattaggtttttgtattataactagtagcactaatcagcctccttgtgtatttggcatatggctatacgtgtatgcaatacaagtgacattgtctcaattctgaagaagacactcccagaggcagggaattggctcaatgaaaacgagtatataatgtgtgattaggtgcattttgcaccctt

SEQ ID NO: 126852 - DNA, 229 bp, Glycine max
  Clone ID: PAT_MRT3847_85553C.1
aaataattgaatttcgaagtgggtgtgcactgagcagattcatgtgttgtaaagcttatattttatttgccagcaactctgaattgttattctgtgcttccattgagctaagcctttccaattgctgaaagtgacggttgcctttggatagaagttgatagacatacaaattcatgcatggcaaggatattacattgactacaaactcatgaagaagcgagtcaagcag

SEQ ID NO: 126853 - DNA, 268 bp, Glycine max
  Clone ID: PAT_MRT3847_85554C.1
cttgattctttccaaatctggaatcatgcgtgctttaggtgaaggtgttcgtgtgcagacaaaaaagaagaggaaaataagagaaaaatacattttgtgacaactataatcaactgatatttgaatactaattaacagtgttaattttaaactaacagaataccaacttgaataattttaaaaagataaagaacttttcaaaaataaagacataaagtgaaaaagaaaaaaaaaactaaatagttcatttggccattctaaaattatt

SEQ ID NO: 126854 - DNA, 203 bp, Glycine max
  Clone ID: PAT_MRT3847_85555C.1
aagcacgcgtcgtagctggaccttaggcggccgcccatttggattattttttttttgcaaccgcaaaaagcatgatgcttatctttatcaaagtatacatgagatggcctgtgataagactttatttaaaaactacccataccgaagatacctagactccattcttgaaaccctcctactttgggcgggctcgaggaataccc

SEQ ID NO: 126855 - DNA, 264 bp, Glycine max
  Clone ID: PAT_MRT3847_85556C.1
ttcgtttttttaaagcgacagcgcacggtgatctaaggcggggctcaaatctcctacgtttcctgcactgcaataagcaggcccttacacgataaacaatcagtttgaaacccgctgacaggtatgccttcattgaatgtggcgaatatgggtatctgaaagaggaccatgtcctgctttataatgtgactgatcaagaaggttgtctaagatgtcatacccaatatgctccaggatacttaaccaaatgcagggaatgctgaa

SEQ ID NO: 126856 - DNA, 659 bp, Glycine max
  Clone ID: PAT_MRT3847_85557C.1
tgctaatgaggttaatctagttgaatggctcaaaacgatggtggggacacggagagctgaagaagtagtggactcaagccttcaagttaaaccaccactgcgtgctttgaagcgcactcttttggttgcacttaggtgcatagatcctgatgctgacaagaggcccaaaatgagtcaagttgtgaggatgcttgaagctgacgaatatccacttcgagaggatagaaggaaaagaaagagtggcactgccagcatggaaattgaaaccgtgaaggatatttctggtccatctgatgctgaaaagatgggaatttctgaaagccacgttgaagaataggattgacaaccccatgacttagcctgcaagtacaattcccgttatacacacgttatatatatagtaacttatctataccatattgaaatatctccaactttgtgaccttaagaaaattttgtttcatctgaggatagaatcagatcagagtgagcttttgttttgttttgtttttgtttttaattgaatggttgccattgaagatatgatacactagctagccttgcaaagagggtagaatcagtatgggtggtgtgagtattagtgttgtacagatgctttggggcctatccttcttacatgattgttgattttctttctt

SEQ ID NO: 126857 - DNA, 227 bp, Glycine max
  unsure (1)..(227): unsure at all n locations
  Clone ID: PAT_MRT3847_85558C.1
ctcgagccgattcggctcgagctcgagccgagatgatagggacgagggacgggaaaaccatgaggaagcagacaatcctgagaaagagaagatagaacactctgcaacagaacaccctacgcatcccccccgggctgagaccccaagaaaacccacaaccccgacaagggtgactgatgagctcaaactgaccgaccaatcatcaccaaaaccnaangctaagccgc

SEQ ID NO: 126858 - DNA, 211 bp, Glycine max
  Clone ID: PAT_MRT3847_85559C.1
gtatattccaacgaggaaccaacatctgctgcttaaccaatacgatgggagaaggacactctactgatgagacatactccacttcaaaggttaatgctgaaatctgcgtttacttcttggatattcaagataccaacaatcttttatgacatcaataggctccactagagctcctccttactactttaatcaccaacaaactaaacattac

SEQ ID NO: 126859 - DNA, 756 bp, Glycine max
  Clone ID: PAT_MRT3847_8555C.1
cggtcttcttgggtctggggcagccggaggcagggaggcataagaagataattggaagattgaagaaggagtgattgtaatctggaaggatgaggagtactattgttttacgattgggaagacgtgcgcgtattccattccaacgagcattagcaacgcagagtaacaataataacactctggtgtttatccctctccctcgctgcctcagcgcaacgcggtcgtttcactttcagcgcaattcaccgtttggattctccagcgggcatgggcaacgcaggagcatgttcatccaaacgcagcccacgccaaatccctcgtctctcatgttttatcccggcaagcccgtcatggaagttggaagctccgacttcccaaaccctcgttctgcaatgaactctcccctcgccaaatcgctcttcgcaatcgacggcgttactcgcgttttctttggatctgatttcgttaccgttacgaaatcggaagaggctgcgtgggaattcctcaagcctgaagtcttcgccgccattatggatttctactcctccgctcagcctctctttttagattctcaagccgccgcggccatggatacagctattcaccaagatgattctgaaacagttgcaatgatcaaggaattgttagagactcgaattcgacctgcagtgcaagatgatggcggtgacattgaatatagaggttctgacctagatactggaatagtaaaacttagaatggcaggggcatgcagtg

SEQ ID NO: 126860 - DNA, 219 bp, Glycine max
  Clone ID: PAT_MRT3847_85560C.1
cctatggtggcttttttacttttactggcgctcggctaaaacgagcgcgccaaatgtgggtttacactgggaatgccctacgcggtccttccacaagcccgataggcccgctgagcaacgcatatccacagcaacaagcacgtgctcctgcatgccaagggcatgaactcccgtcccgccgaccattccacaagagacgcactcacttcacttctgaac

SEQ ID NO: 126861 - DNA, 482 bp, Glycine max
  Clone ID: PAT_MRT3847_85561C.1
aaaggaccaagaactcatgcttgattattgcctaagagaggaaagaccacatacgttatccccccaacctccctttgccatataacacggggctttgtaagctagaaacccacccacacctgctagccttgttgtgcacacaaaatcttcgaactaactataatgctctactaaattccctatgacatgaagacatttcctctagggcacttcataggacaacatccctacccacacttatgggacccttcttcggcggctactatgaacaagccgatacggattccaacgattcctagccttaggactaaaccatatcctatacaggccatgtagtcccatgaagaaggatgcctgcatgaatacagacatggctgagccagcctataaactatacagacattctgcatagataactaacccagttgcaccaacacataagagtgatgtacatcaccactgattatcctcatgagaatgct

SEQ ID NO: 126862 - DNA, 185 bp, Glycine max
  Clone ID: PAT_MRT3847_85562C.1
tctcgagccgcaatctggctacgagcgctctacacgcgatgcagacgcagatgagacgacgcagccatggggcgaagacccgcgaggtgttatatgcaaattaagaacaaaccataccccaagtcacggttttgccgtggtgttcctgatcccaagatcaggctttacgatgttcgtatgcagaa

SEQ ID NO: 126863 - DNA, 2919 bp, Glycine max
  Clone ID: PAT_MRT3847_85563C.1
ggctcgagttaggctactgcaatggaatgaacaaaaagcagtcaaaatccaaactttgagtggtcatattttggagacaatttcgagtgcaaggttcttattgtttcaatatagtgttgtgtataagctgcatcttactggaaacaatacatcacttgcggggattgccacctggactggttcctatttcagaaccttactttgatggtgagttgcctgaggtggagcttattgttgtagacacaagcaagtttgatgatgcaacgactccagaacctgaacatactaataaggaagacaagtctgaactttacaagccaaaagtttctacctggggtgtcattcgtagacctggcaatatttcaaaaacatttggtggtggaagagttatatgcccaggagaggttctagagagcaaagaagaaaaagttgttaaagaagcacgcacaaagcagctacttgctgcctacaacaacaaaactggattaaatgttgatccaaagctgaaatctgagtgcgaggagctaagcatatttagtgatatccaaatattacaaccattctttccttcttttattcatggctttcctttttatgcacattgttgggcgttttttctgtcatagctattgctcgttgtattcattgagccacaacccctaagtaacttgtattagaacaagttgttaagtttaagaaacctattaacaactcccttggatatctttctctcaaaaacaaaaagcttatttataccctccatggttctcttcttagcttttcgaatccccgtttggtgtcgaagacgtcttaccaacctggaaaaagttactatactatagatccttatataggtcatgctagctagacaactattaaatacaactgcaaacttgattgcattggctgcaagtaaataaagcgggatagccaaataagttattaaagtgtatacagaaaaatggtaggaatctcattcatctatacaaaaattaaagctcgatttccctgattctcctgttgagaactttaatattaaggtacaacggtacaagattaggctgtgggaaatgaagcagcaggattgccgtttgctactgtccccaaaactgcattgccctctgcagcggcctggtcttcatttgaatggcgaacaaactcctcaggggtcatgtgagaaccatggcatgcacagacaattctgacttggttagtgctgtatttataagtaacaccagaaattgtccttgctatttggacctgaacctgaggtggatacccatggcatatttgggtaacaaccacatgcaccaaatttcacatctacagcaagacctggcttaatatttgaaaattcaataattgcaccttgcatcctgttgatttttctgatacatctttggccctaaggtttgtgcttcttgctttcacatcttcaggttgtgaggaggagccttcttcattgacacgcttctgtaccatctcctttggttcgttctaacggccttccttcataaggcatggcctcggatatattgtttgagattacttgtagtgcagctgagttaattggacctctgccaacaaaggaagggtgtaactgttgaggacgagaaaccaaaccccatgagttgtccttctccaacataggaagctgaacaggtgaatatccaaacatcacaggcaaactcccattactcacagattgggctcctgagcgttcaccagtggcagcagtaggcatcacatgcatcactccaggtatctgagggcttggtaccccaactgagctggactcttttactgaagggtaaggtacattcaacatatttacaggttgaacagaaaaggaagcaccataggtcatgccggcatgcttaaaatctttttctgatgacccagtaaacctcttctgcccactaaagtcagtagcatttgagtcagcacttccacgaatctctttggctgcatcggaagaagcactaactctaataaatcctttggaaccatcactgtggtgtgagatgggcctggaggtggagttctcagtctcagagtcagccacatcttcattttctgcagtcgaaccctcctctgttatagatatatgagaggctctagccctgtcatgtaaatcggcatgaacatcactgtcatgcttcttttgatcacgtatctcatcaaaaggcatttttcgcttatttgctgcctctgaccttttatcttcctcaatttcaacaggtttattactgtttgcaaccagaaaccctctcccgtttaaattcaaagaagcattgtcttctttggcctttgaaaggtcactaaagaagttctcctcaggctttggggaatcagttcttcgagtcccagtaatagattcaggcttctgaggaacgttatcaaacatgctcttaaagtcatccaccattttgccacccctaccaacttcttcagccctagtatctgaggagctaccattcttacccttgggtttggctgatgagcctccaaaagataaacccaagctgagctcaagcccactctcatcctccatattgtaatctgagcctatcaaaattcaaaactgatcaaactacttgcttgccttatcttccatgctactccctactcattagcccaccttttcaccataagtaaccatcctcagatatctcacccccgaatcctgatccaaatcttccctctcagtctcactctctccgagcaagctcttttttttttttcctcttcaatttggaaactttagtgtcccaaagggttccttgaagattaagaaaagatgggtaaggctccgatcggagatccaaagcttaccctggaattgggaagaggaatgataaaaaaaccctaggtcaggtctgcatctctcggcggacgcgtgggagtagtatagaaaat

SEQ ID NO: 126864 - DNA, 599 bp, Glycine max
  Clone ID: PAT_MRT3847_85564C.1
gtcgtttaaataagcaatcataaattgtataagaacggctaagtcaattgtcttaatggtgaaattgtacaagaactagttcttaagtttaagaactccataagtaactcccttggagatgctctaagaaaagctcagagaattgctctaaggactaggtcatcctcaccttttgaagtccaattcggtgcataacacgtccttagcaatctggaaacattcctatactactgatctttggacagatgatcctagctgggccattattaaatacaactgcaaacttgattgcattggctacaaagtaaataaagcgggatagccaaataccaagttattaaagtgtatacagaaaaatggtaggaatctcattcatctatacaaaaatcaaagctcgatttccctgactctcctgttgagaactttaatattaacgtacaacgatacaagattagctgtgggaagaggcagcaggattgccgtttgctactgtccccaaaactgtattcccctctgcagctgcctggtcttcatttgaatggcgaacacactcctcaggggtcatgtgagaaccatggcatgcacatacaattctgact

SEQ ID NO: 126865 - DNA, 350 bp, Glycine max
  Clone ID: PAT_MRT3847_85565C.1
ttctttcatgcggaaactcctgaggggatcatgttgggatttaatttgtgtcactggatggtcggacaccccaatgccagatgtggaggaaccaatcggtggggtgatctactgtcaagattgtggaccgagggcctattgagagcaagagtcagatagcacttcactgataaattggagggtgggaaaacagtgttggccacagggggttttcctgagagtacaaggattgcattggtctgtgctgtgaggagctgtttcagggggcgctccagttatgatattgccaccatctgctcttaaaatggtgagatatggagttggggttgtacaaaagcaaggactttgga

SEQ ID NO: 126866 - DNA, 385 bp, Glycine max
  Clone ID: PAT_MRT3847_85566C.1
aacaaaggaatttaataatcatttggaaaaacctgtcttgaaggtgtacattattacatgaggagtgccaacagagcatgagctgaatattcgattcaaagcaactgcgtctagatacctgaatgcatatctctagattcagtaccacggctagctatgataagctgcgcctcgacaggtaatatatgaatatgattagctaagcctcgctagagccttataggtatcgtattatgggaacaggtacacaactgtgcgatttggacgtgtgcagctatgatgatcgagctgactgattgtaaacactgtctgggcgcattcacatgttagtcaaccagttagcacgcctcctcaccctctgcatgccagttgctatcttctagcc

SEQ ID NO: 126867 - DNA, 541 bp, Glycine max
  unsure (1)..(541): unsure at all n locations
  Clone ID: PAT_MRT3847_85567C.1
cttgatgatattatcgatcacatcgagaaatcgagatgaggatgatacaaaggatgatatttggttcgatacgagtgcccacgatggtatctcctttcgatcttacttctgcacttcttcacttcgtacacggctgattctggcccgcttcagcccgattgtccatatccaatgtgatccttctgcgtcgcttctcgacgaaggtatacacgacgcccgttgcgttatctaatgacgagacgggttggccacgtgaagagggttctcgcgttcgagcggagtatccagactgccttctcctcccgacccttggtacccagcatacggatcatcatatcttccgtaaccctgtccatacccctgatccgcatcggcatactgccccgcatcgttcgggtcaaagtaatacccctgatgctggccatgttgctgcaacccctcatacccgcctgcgccaccggcagctgccgccgctccgtaatcgtaccccgtgcggtgtatcgaacgggcccttgtcgnccctgaccagatggtcggaata

SEQ ID NO: 126868 - DNA, 262 bp, Glycine max
  Clone ID: PAT_MRT3847_85568C.1
cggacgcgtgggggtgcaggctgtcgcaagtgattggatggcatctgctcgcgctccgtccaggatgaccgaacttatgtcaacgcagattctgatgctcagaataagcctggcagcaaccacgacaccattatttacaccgacgcgcctcataggatggagaggaatcttccagatccttctagaaccaacaggaatgcttctaccaatgcgattgaagagatctacgactgaatcccgagcttgcactaggactgcatgc

SEQ ID NO: 126869 - DNA, 493 bp, Glycine max
  Clone ID: PAT_MRT3847_85569C.1
gcttgacaccatattcctaatcctaacaacatgtgtcaacaaatatactctccatttcaaaatattagcctttttttaaataaaaaaatgtttcaatttatctgtcattttagaaaattaaagtttgaattttttttgtcccaactatatctttgtctctcttatctctaccaagtggaatgagagatagcaatggcattagtggagtcaggagtgccaatattttgataaaaaggaaataaattatattttatgataattgagactaattagtggctttcttaatctttgtgcaattatcttgaatgacatattctgaaacggatcaagtattataaaagtggtttgagtgttagactgcaaattatcttctcattatgttgcaaatgttccttttctctacatttcattactttaatttggaagatacatccattcaaacttctaatctcaataattttccatgcttagttctaatctacttgtggctcta

SEQ ID NO: 126870 - DNA, 470 bp, Glycine max
  Clone ID: PAT_MRT3847_8556C.1
ggggcaaaaaaagcccaatgggctgggaaaacaaaaaagggggaaccaaaaccccccctctcccccaagggaaaaaaaaaaaaaacggaaccccggaaaccaggttaaccctttttatttttaggcaggccaaggcccccttgccgacgggtaaaatgggggccccccaggccacttcaattgggacccaggatatctaaaaggggagataggggggatgaacccaaccccaatcccaggccgggaggggaaaaaaaaaggaacaggggaatccaacttaaacccctaaagccgggaccccctacccactactttgctttaaaaaccccaaatcgggcaacaataagcccccctggcaaaagaaaaaaagaccggacagggggaacaaatcaggcccgggttatcataaaacacaaagggccggatggcaaatttatcacaaggctaccggggtttcccccaatttaaca

SEQ ID NO: 126871 - DNA, 407 bp, Glycine max
  Clone ID: PAT_MRT3847_85570C.1
acttggtgattgccggcagcataatatcactatatgaagactcttgttgagacacgaaacacagagaaatggaagcagcgtggatcacaattctggtactgatattgatcctctctctgataggcgcatggaagttgctgaactggttatggctcacacccaagagactagaaaggcttctgagagagcaaggccttcaaggcaatccatacacgcttcttgttggggactccatggaggttatcaagatcagaaaggaagccttatccaaacctatcactctcttctctcatgacatagtgccgcgtgtctcttcctatgctcaacacactcttaacaaacatggcaaaaattcttttatctggtttggaccaataccaagggtgaccctcacagatcctgggcta

SEQ ID NO: 126872 - DNA, 2159 bp, Glycine max
  Clone ID: PAT_MRT3847_85571C.1
gtacgcaagcaagcagccctgaggaagcagatgctgttgtttcagtattgggtgaaatggatgcatggatactttgtccctttttccttcaaggaggtcgttacactattgaagacatacactatgttgatgattctgatacgcttgttcctgcaggggacactgagtttgccaaagatgcttcctttggctacaaatcttcaaacctgcgtgattgggtagaggaaaaaacagatggccaaatacttggaagtagtgttgcatctatttctatccaacttttgaggaaaggtggtccagatgcagtttgtcagcatctatgcagtttgcagaaggggtcaatatgcatagttaatgcagctagtgaaagagacatgactgtattttcacttggaatgatcaaggcagaattgatgggaaaacgtttcttgtgtcgcactgctgctagttttgtttctgcccttatgggaatcatctctaagcctccaatattgccaaatgatattggaatagctagagaaaggaatggtggtttgatagttgtgggatcatatgttccaaaaacaacaaagcaggttgaagagctcaaattacagtgtggtcagttcttaaaaagcattgaggtatcagttgaaaaacttgcaatgagtcctattgaggagatggaggaggaaatcagtagagcagctgaattagcagatgtatatcttaaagctcataaagatactctaataatgaccagccgaaatctcataactggaaaaactgccgctgagagtttggacattaactttaaagtgagctctgctttggtggaaatagtgaaaagaataactacaaaacctcgctatataattgcaaagggtggtattacgtcttcagatcttgctacaaaagcccttggtgcaagatgtgcgaaaatagttggtcaagcacttgctggtattcccttgtggcaattaggccctgaaagtagacaccctggagttccttacattgtcttcccaggtaatgttggtaacagcacagcattggcagaagttgtaaagtcctggactagtccaatcagacttacatcaacaaaagaaattcttaataatgcagaaaagggtggatatgctgttggagcatttaatgtatataatttggaaggagttgaggctgttgtatctgctgcagaggaagaacaaagtcctgctatattacagatccatccaggtgccttgaagcaaggaggaattcccttggttgcttgttgcatttctgctgcagagcaagccagtgttcccattactgttcactttgatcatggaacttcaaagcaggatcttgtggaagctcttgacctgggattcagttctgtgatggttgatggctcacatctttctttcaatgaaaatgctgcatacacaaaattcataacattactggctcacccaaaaaatatgttggttgaagctgagctaggaagattgtcagggacagaagatgatttgactgtagaagaatatgaagccagactaacagatgttactatggcatcaaaattcattgatgagactggcatagatgctttggcagtgtgtattggtaacgtgcatggaaagtaccctgcaagtggtccaaatctgagatttgatctgcttaaggagctgcatgctttgagcctgaagaaaggaatttttctggtgcttcatggtgcatctggtttgagcaaagaacttgttaagacgtgcatacatcttggtgttagaaagttcaatgtcaacaccgaggtaagaaaagcatacatggactcccttgttacccccaagaacgatctagttcatgttatggcctctgcaaaggaagccatgaaagttgtggttgcagaaaagatgcatctctttggttcagcaggaagggcataattcctacaaatttactagctaggattattggtgactatcaacttcttattattttgctattatgttgtcttgtagtaaggaatatcactgcctcatgaattcattatttccttcagttcaatagatggtttctgaatttcttatttacttgccttgtccttgagggcaaaggtttccaacggtgcagggcctgccggacctagttgagactcggtcggaccccggggagtgtgtgttccgggaccgggt

SEQ ID NO: 126873 - DNA, 284 bp, Glycine max
  Clone ID: PAT_MRT3847_85572C.1
acaactcactaatgatagactgttccataaccattggattggtatcccgagctgctcagagagattctgcattgtgtgttagaccctcaaacaatgggactcatacctacaatacgacgtgtccagttcgataaattttctggcagaatgcctttcatgtatcgatgacgcgctttgtccactgaaacttctgactgaccaacaacatttctatgacattctttctccaactgtaagcaagaaaccctcttggcctacacattgtcgagacacatgttgacact

SEQ ID NO: 126874 - DNA, 373 bp, Glycine max
  Clone ID: PAT_MRT3847_85573C.1
gccgccagaaaatattaaaatcctaggggctgggttggatttggtgaatggtttaatgcaaatgaaaccaccattctcacattctacttcccttctaagaggcaaagcacgcctctctccctacctttttaccctcatagatttcatcctctttgtcgctatcctctatggcgaagacttcatgtgcatcttcggtcaacagatccaaaactactataattaccctcacaaactcttctccacaaccggtgagttcatagttcactcactttttttcatttgaattactcagactcagttacatttctagttcatatgattatcatcatgcgattatgtatgctaattcaattcgtcaagcttttgtctcatt

SEQ ID NO: 126875 - DNA, 804 bp, Glycine max
  Clone ID: PAT_MRT3847_85574C.1
atgtcctgaattcctcggagatgaagtattgctgaaagggttggactctctctcggtattcaattgtgataagttcaatgtgtcggcaggttttcaacacctttggaaattgtggatttccaattgcagagatgtgggagatttgcatgctttaaaagatatgacttccctcaaggtgttaagattgaggaatcttccaaagctagaatcatttcccaactgctttggaaaccttcccttgctttgcgaattgagtatttttttttgttccaagttgtcgtgtcttccaacaagcctaagcctcatcaatctgcaacacttgactatttttggttgccatcctgacttagagaagcgatgtgagaaggaaaccggggaggactggtcaaaaatagctcatgttccctatatttcagtgggaagtaaacactatagtcctgattgagtattctcgtatttggagagcccagactagattattcacgctggctgtgtttgaagatttctgtgtatttgaatcgtttgctattgctcctttgtttatgtgacctcctacggtctttttatcaatgtaataaaaagtggatttgtattatttacttctttatttatttgatctcacctgtcttcttatcagttaatgcattcaaaattattgtatactttctctactgcatactttcattttgcagcagaaccttgtttgcgatgcaactttgatgcaaaatgcttgaaaatagaacgtaatggcttgagttgattatccagggatggtcaattgtcagcaacaacttttcattttcc

SEQ ID NO: 126876 - DNA, 2134 bp, Glycine max
  Clone ID: PAT_MRT3847_85575C.1
cggaaaaaagccactgagtgcgattcaataattgcgaaaaaccacggggagtgttgtttgtttcggtcccggctggaccagggaatgaatagagatgagaggctttcggcttaagaaaactgagttaagcggccaagccaaacgcagaatcggcggcagaaattgccaccggaagcacgtcgaagacgggtgaactaaaaagaagaatctcatccaccacttatcctttcaatccccaaccccaaaaaaatcacaacttctagtagtaaaaaaaaaaaaagactagaaggtagtatagtagagtgtttttcattttttattttttattttaatgatgggagagaaaagcaacagcaacagcggcgacgcgattaactcgacgctgctccacgggaagtacgagctggggcggctgttaggccacggaagcttcgcgaaggtataccacgcgcgccacctaaacaccggaaagagcgtggcgatgaaggtggtgggaaaagagaaggtggtgaaggtaggcatgatggaacaaatcaagagagagatctcagccatgaacatggtgaagcacccgaacatcgttcaacttcacgaggtcatggcgagcaagtccaagatctacatcgccatggagctcgtgcgcggcggcgagctcttcaacaagatcgccagaggccggctccgggaggaaaccgccagactttacttccaacaactcatctccgcggtggacttctgccacagccgcggcgtcttccaccgcgacctcaagccggagaacctcctcctcgacgacgatggcaacctcaaggtcactgacttcggcctcagcactttctccgagcatctcaggcacgacggcctgctgcacactacgtgtggcacgccggcctacgttgcgcctgaggtcatcggaaaaagaggttacgacggcgccaaggctgatatttggtcttgtggcgtaatcctctacgtacttcttgctggttttttacctttccaggatgaaaacttggtggctttgtacaagaaaatttaccgcggtgacttcaagtgtccaccgtggttttcctccgaggcacggaggctcatcaccaagctcctcgacccgaacccgaacacgcgaatcacgatttcgaaaatcatggactcgtcgtggttcaagaaacccgtgccaaagaacttggtgggaaagaaaagagaggaattgaacttggaggaaaagattaaacatcaggagcaagaagtttccactacgatgaatgcatttcacatcatttccctttcggaagggttcgatttgtcgccgttgttcgaggagaagaagagggaggagaaagagttacgtttcgccaccacgcgccccgcgagtagcgtgatttcgagattggaagatttagcgaaggcggtgaagttcgacgtgaaaaagagcgagactaaggtgaggttgcagggtcaagaaaatgggcgaaaaggtaaactcgctattgctgcggatttgtacgccgtgacgccgtcgtttttggtcgtggaggttaagaaagacaacggtgacaccttggagtataaccagttctgcagcaaggagcttcggccagcgctcaaggacatcgtgtggaggacttctcctgcagagaatcctacactcgcttgaacaacaaattcaattcaattgtcgttcctttgtagttttcttgtttcagaacagagacatattttaattatttgcttgcttctttgtttggattctaattctatgttttagcctctcgggggtgtcgtcgtctttttacccaggaaagggggaattgttgaaaaggcgaatgcagtagtagtgaaccgaaatggacatcgaggagttgttgtcgatgattcgggtacatgtgctgcctgttgtattgctcgtggctgatgttgttgctatgttggcgtgattgtgaatatgcttgcaaattgattggtgtggctcatggtcattcgtggctgcgtttaatttattttttctattatttatttttttggtgaatgagtgctttgtttggggtcggtcagtgatgacgtgtatgttaatttctgaactctggaccttaattgccaaataaaagaggaaattgacttctgagagttgttccgg

SEQ ID NO: 126877 - DNA, 317 bp, Glycine max
  Clone ID: PAT_MRT3847_85576C.1
aaggagggaaaggacaaacaaattgatggttttcatgaagctggtagcaaaggcagaccgagataagcttcaatgatacctcatgatgagccagttgggcaagctcaaagagcctgaagttactttgacttcttccctgtggaggtggatagacaagagggagccgcccactttggggaatagaaatcgagcgtctaggtagccttgccgacaaaaaaaaaataggtggtaactcccgaggaatagggaactggatccacctttgtgacaaaaatccttagagtcttggactacaactgatgagagattggtaggga

SEQ ID NO: 126878 - DNA, 325 bp, Glycine max
  Clone ID: PAT_MRT3847_85577C.1
ttcttcagaacggtgggtcccagaatataggtagggaacttagtgaccgctcagacagaatatctatagcctactgcgatttctctcaagcgttatggaaggagtaaagggcgttatcgcttctaagagagtcgataccaaacttgatgttaataacaatggcgctagcaccattattaggaagcctaaacctacggcgaatgctgacaatgaacatacctcgccagattctcatctaagtactttctacaataatataggaaatataacgaatgttttttgctatgtatattactaatacaaagcattgcatgatcttggcaaa

SEQ ID NO: 126879 - DNA, 2298 bp, Glycine max
  Clone ID: PAT_MRT3847_85578C.1
ccgagaggaaaaaagccactgagtgcgattcaataattgcgagaaggcaacgggagagagaacaaagcacttagtgctattcaataattacgaaaaaccaacagcgagtgttgtttttgtttggtccaggctggaccagggaatgaatagagatgagaggctttcggttgaagagaactgagttaagcggcgaagccaaacgcagaatcggcggcagaaattgccaccggaagcacgtcgaagacgggtgaaccaaacacaaaattccatccaccacttctcttttcaatccccaactcaaatctgtgaagaaaatctcaatttctaaattgtaattcttagcactactgctagtagtagtaaaaaaaaacaattagaaagtagtagagtgttttttttttctttttttcgtttgttttacttttaagatgggtgagaagagcaacgttggcggcgacgcgattaacacgacactgcttcacgggaagtacgagctgggccggctgttaggccacggaaccttcgcgaaggtgtaccacgcgcgccacctgaagacgggaaagagcgtggcgatgaaggtggtgggcaaagagaaggtggtgaaggtaggcatgatggagcagatcaagagagagatctcagccatgaacatggtgaagcacccaaacatcgtgcagcttcacgaggtcatggcgagcaagtccaagatctacatcgccatggagctcgtccgcggcggcgagctcttcaacaagatcgccagaggccgtctccgggaggagatggccagactttacttccaacaactcatctctgctgtggacttctgccacagccgcggcgtctaccaccgtgacctcaagccagagaaccttctcctcgacgacgacggcaacctcaaggtcaccgacttcggcctcagcactttctccgagcacctccggcacgacggcctgctgcacactacgtgcggcacgccggcctatgtcgcgcccgaggtgattgggaaaagaggctacgacggcgccaaggccgatatttggtcttgtggcgtaatcctctacgtacttcttgctggttttttacccttccaggatgacaacctggtggccttgtacaagaaaatttaccgcggtgacttcaagtgtccgccgtggttctcctccgaggcgcggaggctcatcaccaagctcctcgaccccaacccgaacacgcgaatcacaatttcaaaaatcatggactcgtcgtggttcaagaaacccgtgccgaagaacttgatgggaaagaaaagagaggaattggatctggaggagaagattaaacagcatgagcaggaggtttctactacgatgaatgcttttcacatcatttcgctctcggaggggttcgatttgtcgccgttgttcgaggaaaagaagagagaagagaaagagttacggtttgcgaccacgcgccccgcgagcagcgtgatttcgagattggaagatttggcgaaggcggtgaagttcgacgtgaagaagagcgagactaaggtgaggttgcagggtcaagaaaaagggcgaaaaggtaaactcgctattgctgcggacttgtacgccgtgacgccgtcgtttttggtggtggaggttaagaaggacaacggtgacaccttggagtataaccagttctgtagcaaggagcttcgtccagctcttaaagatatcgtgtggaggacttctcctgcagagaatcctacactcgcttgaagaacaaccaagactcccatgctaattgtcgttcctttgtagttgtttttgttaattcttgtttcaggactgagatattttagttatttgcttgcttctttgttatgttttggcctctggggtgtgtcgtcttttacccagaaaggggaattgttgaaaaggcgaatgcagtaatgaaccgaaatggacatcgaggagttgttgtcgatgatgattcaggtacatgtgctgcgtgttgttgtgctcgtgggtgatgttgttgctatgttggcgtgattgtgaatatgtttgcaaattgattggtgtggctcatgggtcattcatggctgcgtttaattttgttttatttatattttttcggtgaattagtgctttgtttgggggcggccccaagtgattttgtgtatgttaattttattttgaacttctggaccttgattgccaaataaaagaggaaatcgacttctctaaaaattgtggtggaaaaattatatttttgtagtaatatttttgcagaaaaaggatgtgaaataaaacaattattttgcgagcc

SEQ ID NO: 126880 - DNA, 262 bp, Glycine max
  Clone ID: PAT_MRT3847_85579C.1
tctagattcgcgacctgccgccctttttgtttttttgttggttatcattatttttgggggaaagtaatgctcaattaagtgtgctgagagtacgcgcttcctttgaagaagggttacaagtccacgattgttatgttttggggccgcgaagttgtttaattgggggatatcgtgaaagtttcggaaggcctgcaaatttttccagcgaacccttggacaattgtggttcttagaaaaaaggaagaagattctgtgatctagg

SEQ ID NO: 126881 - DNA, 642 bp, Glycine max
  Clone ID: PAT_MRT3847_8557C.1
aagaagttgaaagattgggaatctagggaatctggatgaacttgaagttacaaaactatgcatgaagatatagtcctttcagttatagctcacggattaataccagattagatatcaccttatcctatgtatgcttgtgttctgtcttaatacagaatgtaaagtagttcatcacggctcaagcatgttatggatcttggaaggcagttcgtgcagattgtgataggagttcatcactagtttattcggatattcttccccagttaatgaatcctagctgatttgaagtcctgccagcctagcctaatgtcttcaagcgcttatgactgactttctttgtattttgtcaccattttgactttattactagctggctattaggattttattgagtttgctgcccattgatgcttcaggagccactgttttacaatttaagatcatttatacgtgcaacttcgatactgactggaactcccaagagtgacacttcaattggtgacggtgtactagtatatgtagcataaacttccatgttagggtaatcttttagcttaacaaaggggcatattgaaagttattcatgttcaacccgccgctgcttgtttgtttactggagttaatttgactagtcaatcattc

SEQ ID NO: 126882 - DNA, 278 bp, Glycine max
  Clone ID: PAT_MRT3847_85580C.1
atggatatctgcagaattcggcttaagcagcggtaacaactcattttactatttttatttttttcttaaattatgtttaactggacattcatgatgttagtcatattatatacttttcaaatccttcttacttatacaattcaacaccaattaaaaatccaattatacccttcacttgttatttttaaaacaaccaaaaaaattaatgttaccaataaaaatataatttaccaagtcaattggagcttttacaaagaacaaacattaaaatgaattac

SEQ ID NO: 126883 - DNA, 338 bp, Glycine max
  unsure (1)..(338): unsure at all n locations
  Clone ID: PAT_MRT3847_85581C.1
tgggggngtntgtgntgtcntgcgttgnctcgtgtgttcggtctcgggntngtgtctcgcggcgttcccttggcgtgtgggggtgttttctctggttttggttggntgcgcntggntgctgtgtttgggnggccggtgtgggctgccccgtggttgctntggcgncttggtctgcgnctctctttgggctgttntgncnccccggggtgggtggcccgcgctggggttgttcccggaccncgccggtgtcgggcctcttcgccgntcttcctcctccnggttgttgttgttgttgttcctgtcctccantttcgcgnggcgnggccaacgccgggtgc

SEQ ID NO: 126884 - DNA, 441 bp, Glycine max
  Clone ID: PAT_MRT3847_85582C.1
ctttacttcattttaggaaatgggtcttaaacaactgcggtcaacccttgccaattttgaattctcgtgtaactgaaactgcttctgctgcggaagcttctttctttgggggccacaaggattctcgtgtaactaaactccaatgatgaacaaaactcttctcacttatttctacttgttcatctacattttgctttcttctggagtcattttgtacaacaaggttgtcactcctgttaaaatgacatttgaaattatgctacttgcgtgataccaataagtgccttctttgcatcaagtctttggtttggtaacacagcttatttgcatatttctgtggcttttatccagatgctcaaagctctgatgcctgtggcaacattcctcatggcttgtatgtgtggcaccgacaaaagcaggtgtgatatgttcttcaacatg

SEQ ID NO: 126885 - DNA, 1769 bp, Glycine max
  unsure (1)..(1769): unsure at all n locations
  Clone ID: PAT_MRT3847_85583C.1
atgctctcgctagttcatgttccagcgtttgaatggatgccgaaactccaaagatacgaactttactccattttagaagacgggtcttaaacaactgcgttcaactctggccaattggggattctcgtgtaactgaaactgaaactgcttctgcttcggaagcttctttctttgggggcagcaatgatgaacaaaactcttctcctcacttatttctacttgttcatctacattttgctttcttctggagtcattttgtacaacaagtgggttttgtctccaaagtactttaactttccgcttcccatatcactcaccatgattcacatgggcttttctggggcagtggcattttttcttgtccgggtctttaaggttgtcactcctgttaaaatgacatttgaaatatatgctacttgcgtgataccaataagtgccttctttgcatcaagtctttggtttggtaacacagcttatttgcatatttctgtggcttttatccagatgctcaaagctctgatgcctgtggcaacattcctcgtggctgttatgtgtggcactgacaaagcaaggtgtgatgtgttcttcaacatgttgatggtcagtgttggagttgtcatttcctcatatggggaaattcattttaatatagttggtacagtttatcaggtcactggcatttttgcggaagctttaatactggccttaacacaagttcttctgcagaaaaaggggttgactttaaatcctattacaagcttatattacatagctccgtgcggatttgtgtttctctttgtgccttggtacctactggagaagccagtactgggttgaatataattggctatgctattttatttcttcgagttgtgaggtatatgtgctcaagcgcttaaatttctcgattttccctagtccctggtggaaccggtccggtagcctcccggggcgctggtgtgccgagaggctggcttcggatagctctgtccccggttacattcccggcgtcgacggtaactggggtgcttatgggtcggcttcgcttttgcattgtgtggagttgcgatgtacaattacataaaggttaaggatgcccgtgcctctcaattgcctgtccaacctatatgcaccaggaaagtgaaaacccaaatccaagattatttttagagtacccttttggacacagaactgggaaggggaagctgagtcaaatgcacccctatttcctcattctttttaggccataggttttataatgaaatcatatgcttgctctttgtaattgcctgtgtagaatgcatcatttctgcgttaccactgtgaaacatggtttcaccccctccttcaggggtctttttggtctccccttttggagaaagaactaggaaggggaagctgagtctaatgcacccctattcctcattctttctaggcaatagattttataatgaaatcatatgcttgttctttgtaattacttgcttgtgtagaatgcatcatttgagttattaccactctgaaacatggtttttgacaatagatgaggggacaaattggcctcttgtataatctggtctcctggttgggaggcccagttatttaattatttcttaagttactgaatccaaaaaaaaaaaaaaaaaacctggtaaaaaaaaaaaaaaaaaaaaaaaaaaaaaaaaaaaaaaaaaaaaaaaaactgttatggaagtttcacanattcagttcatttttgggatcttcttttccatgctctatgtgctcta

SEQ ID NO: 126886 - DNA, 698 bp, Glycine max
  Clone ID: PAT_MRT3847_85584C.1
cgaagcaaacacacattggatctttattgccttagtattgggatcattcaagtattcatcactcataaggcaggaacataacatagcttccttcagtagttatgtagttaatgtcaataaaagtaaatggttgcaaatgtagaggaatgcgggaatttgcataaaacgggcaaataaaacttaaatgtaaacacgttgttctgaaaaaaaaaaaatcatctcccaatattactgttcgcaaatgttaatggataactagccaaaagatttgtttgccatgaaacaagaccgagtctgaaaatctcggaaaagtctgggagctcgcattattaccaagaacactttgaattgtaaatattatctacgcctcagttgatgcttttgccaaaacctcttctttcttgcccttgcctcctgtggccaacttgaatcccccatagatgagtagcccccagccagttaaagagacaatcacaaaatgctcttccttccatttagacgggctcattgggtctttccagcaggcaactttgggagggccatggtgatcggcgaggccacggcggtggatgagttgaaggggcgtcttggaagaggagagaccaatgcgggttagagatgcggctccacgtgcaaatgaggccatggctgcttcgcgaaggaatgagagaaacagagagggcacggtgttaaggtgc

SEQ ID NO: 126887 - DNA, 459 bp, Glycine max
  unsure (1)..(459): unsure at all n locations
  Clone ID: PAT_MRT3847_85585C.1
ggatcttaaggaacggcccncggggggcgggaacccggattgcccctggcgttccacacccgttgataggcatcggtggactcaaagctgagccaagggcttttttgatggctcacgggtgcaatagccacggcacgcataggggctgtgccactgaaaacggcttcatggggggtggaatcatgaaacaggttcattcattaggttcctggatggtgcgatacaactattgaatgtgtgtactcatggaggagtcctaatagggtcttgctgggtgctggctcgagtgcattattattagcctaatagccttgttactaagaattagaaaacaaaacaactagtgaaacaatatgggcaactatggctgcctttttcttgattaaagactttgggcagacacctcgacacacccgagaagcttcttttctccaccaactatgacttaattaattcctc

SEQ ID NO: 126888 - DNA, 250 bp, Glycine max
  Clone ID: PAT_MRT3847_85586C.1
ggagtgatggagatattattatttggcttaccatttggggaccaaccattacatttcctttcttggagaaaattcccaaagccttttaaaactggtcttggcaggcttaattttacccccttttttattttaaccatttgggggattttttacccaaccggcttacccaccccaaaaaaaaaaaaaaaaaaaggcaatttccccaacttaattggaactttacttacggcttacctttttaaaccttccc

SEQ ID NO: 126889 - DNA, 307 bp, Glycine max
  Clone ID: PAT_MRT3847_85587C.1
catctttccaccttctttaatagtggtgttagaaagtggcatactttattgacaccagactgagcgtggcagggggcatgaccaggctggtatggaatggatgatggtgatgacatttatgcttcacgatgaggctctgggtgtgtgacacctgatggtctggggctggaatccaggttaggttctggctgtttgacaccttgcagtgctggtccaatcaatcaaaacaacatctttgtgcaaaaccagatatttaaggaagcaactttttgcttattcggacattggacattcatagaaatgcgcc

SEQ ID NO: 126890 - DNA, 258 bp, Glycine max
  Clone ID: PAT_MRT3847_85588C.1
gtatactattaaaaccagcacataagtattgtaaatgtgtgttcctcctaggttggaagaaatgtctttccttctatctgggtcctgttaaagcgggtgtcagttgtgtcttttcacctcgatttgtgaattaatagaattgggggagaggaaatgatgatgtcaattaagtttcaggtttggcatgatcatcattctcgatgatattctcactttgtcgcaaatctgcccttatcgtaagaacaagtttcaaaattt

SEQ ID NO: 126891 - DNA, 288 bp, Glycine max
  unsure (1)..(288): unsure at all n locations
  Clone ID: PAT_MRT3847_85589C.1
nancgcangcacgcgtacgtnagctcggaattcggctcgagngccannnacaagtncntcaccanngatnncgcgnngggcnnannttncaacnancctccgaacnggtanccggaccatccngcnancngtnagcngtccacanaananaccagcggccntnnangtggagggccccgcggaanagtnnttcaaganttcaaccncnggantcncgngnggcngcncancacggncgagnncggtaaangnaagccgangnannntgccgagnacggntctcngana

SEQ ID NO: 126892 - DNA, 345 bp, Glycine max
  Clone ID: PAT_MRT3847_8558C.1
cgcctgatcgctcacggaacgcctcggactatagggggaggagcttttgcaaagaatgccgttctcatccagaagccaaaagctgtccttgcactgtggagagacttagttggagatctcgtcatagaagctcctaagacgacttacacccacatcaaatggacagacgactccctcatagcatatggaaattaggctgatgacaccatcaatgaggaggctttcccccacaagctggtgcagtctggagagattcaggacaaagttgtatagaaatttgcacaagaggaatagcatacagcttggccaacccaggtgcgacctgcaacaactcggagggccgaa

SEQ ID NO: 126893 - DNA, 248 bp, Glycine max
  Clone ID: PAT_MRT3847_85590C.1
gcggaccaagccgtccgactagtcgttctgcttcagaggttcttcctttgactaagatgttgctctgaccggagaatgtatgagtcacaggtatactgcgaattccaaccaatacaggatgtgcgaaaaccccttgtggaagcttcatgatttacaccaacttgaactggactgagtgaaccaccagcgagacctttgtcatgagagtggaacctattacagattagttggctggtgatgacatgaga

SEQ ID NO: 126894 - DNA, 1588 bp, Glycine max
  Clone ID: PAT_MRT3847_85591C.1
ggctcgcgctcgagccgcaagcaagcaaggcaaaagagaagcaacattgaaaactcaatggctgcaacttattatctactgccaacaagtccgaaaactttctcacctttcctcagaaatccaccttccattccttcaggtcatcatgtttcactgttgggttcattattggactatccattccattgttccagcagaagaggaaacaatagtgttgaggccaattgcaatgcaaaaaagaagaacccttggttagacccttttgatgatggggaggatcctgagatggagtatggttccttgtttgcagatgggaagcaggaggaggatcctaggccaccggatgaccctgacaacccttatggattcttgaagttcccttctggatatgctgtggagatagcatccttggcattgaaagtgagaggggatgtgaggagatgctgctgtgtgatatctggtggtgtttatgagaacctcttgttctttccagctattcagttgatcaaggataggtaccctggtgttcagattgatgtggtggcgtccgagagggggaagcagacctatgagttgaataagaatgtgaggtgggctaatgcttatgatcctgatgatgagtttccagagcctgctgagtatactgatatggttggagttctaaagaataggtactatgacatggtcttaagcaccaaattggcaggccttggccatgcagcatttttgtttttgtttatgaccactgacagagatagatatagctatatcatttccaattgtgaatgccgcaggatcccggattccttctgtcccatactatcgtaccacaatagtctaaatgtcgcatattggaggatataatatgtatttgactggctaggaaaaccatttcgagaagttccaagacaaccagtgccaccacttagggtatcaatctcaaagaagctgaaggaagctgaaggagcttatggaggcaaaatacgaaaaagcaggggcaaaaaaaggaaaatatgttgtaattcacggcataaaatcagattcaaaggcctccatgcagtctatgggtgatcctgatagcttgctacccattgaagtgtgggctgaaattgctgacgttataagggatgttacgccactttttgtcattccgcatgaaaaagaaagggaaaatgtggaggaaatattttcagaagatgcatctattgtcttcatcaccacccctggacagctagctgctcttattaatgactcagctggagtgatagctacaaatacaactgctgttcagcttgcaaatgcacgccagaaaccttgtattgcactattttgctctgaagagaagggaaacaagtttgttccgcgggctgaagagaagaaatgtattataatatcatccaagacaggaaagttaatagatattgatgttgaggctgtaaaaaacgcagttcaaacattcaatttgtctccagctttagtatagtggaagagggaaaagggaaagtgttctgaacttctggttaagtgattatattaactgtctttttttaattaataaagacaaatgtatatctacaaaaaatctaca

SEQ ID NO: 126895 - DNA, 262 bp, Glycine max
  Clone ID: PAT_MRT3847_85592C.1
ctgcgagaagacgacagaagggactttaagtaaagtcattacatttgtggtggtatatgacaatttttgcgacagacagcttgggaagcttttgctaaataattttgctagtttggtttttttcttaaacataagcagttccaaagttgtctttttacagacatttcattgaagacataaaattaatatttatatttactaaaatggaaagatgaagtacaaacctagagcagggaaaattcctctgcttgaaataaaatgc

SEQ ID NO: 126896 - DNA, 116 bp, Glycine max
  Clone ID: PAT_MRT3847_85593C.1
cgaagcttcaacgtctcttcactctcatccgtttttcactagttgtagcctctttgggtcaacaggccttcagatccagagccctcggggtttcggtgcgtacagaggcttccaca

SEQ ID NO: 126897 - DNA, 1311 bp, Glycine max
  Clone ID: PAT_MRT3847_85594C.1
ggctatagcgccctcgttctcttcttctggaactaagtgcctaagcttaaatggcgtcgtttttgtcttctctccctgccgtttccgctcgtcccatccccactagtgccttccctctcagaaaacctctctttcaaactccacccaccttgcatttcaaaaatcataggtttgccgttagctgcagttacgcagaagcaggtgtcaacgctgattctagctctaacaccatagatgttgtggctgatgttagaagtgaacggattgtagtcttgggaggaaatggctttgttggttctgccatatgcaaggcagatgcgtacatgggcatagaactaataagccgattataactaaccctcctttttaatttcatctgggtactttacgggaaagaggaaagcagaatccgaggttctctccaaataccccaattcaggtattgtcttaagacctgctttcatatatgggaagaggagagtgaatggttatgagcttcctttggatttggtaggggagccagcagaaaaaattctacgagcaatagagaacttcaccaaacctttaagttctcttcctgcatctgatttactcttagctccacctgttagtgttgacgatgttgcgctggctgttatcaatggtgtcacagatgatgacttctttggtgtttttacaattgaccagatcaaggacgctgccaataaagtacgggtatgaatatgatccggatatagtcaaacgagataaacctgcaattacaataattgtacagtcagggagtaactacaatgaggctattttccttgtgttaataccggtggcagcttttggagcacaatcttttttaaattttaagggagtagtgtgtgaccgtgtgaggagaatggtgtttaaaacaatactaaatgtaataaatgaggttcatatcttcttttgttgtccaagtattgttagtttatgtttcgtgccgcaatcgtgcctgtaaattctcaaacctagtagcgaactagtgatttaattagagactaacataccggcagcttttggagcacaatctttttaagggagtagtgtgtggggagaatggtgttaaaaacatattgaatgtactaaacgaggttcatatctttttttcgttatacaagtattgttagtttatgattggaccattttcgtgtctgtaagttctcaaaccagtgacttaattagaggccaatagttagatttgtaaatacaaactgcagtgttagtatctatttcgttttgcatgctgcaaaaaaaaaataaaaaaaaaaaaaaataaaaaaa

SEQ ID NO: 126898 - DNA, 1240 bp, Glycine max
  Clone ID: PAT_MRT3847_85595C.1
tcgcgatcttgcttcttcttcttctggtgctaagtgcctaagctcaaatggcgtcgtttttgtcttttctccctgccgtttccgctcgtcccattcccaccagtgccttctctcccaaaagacctctctttcaaactccacccaccttgcatttcaaaaatcaccggtttgcagttagttgcagttatgcagaagcaggtgtctatgctaattctagctctaacaccatagatgttgtggctgatgttagaagtgagcggattgtagtcttgggagggaatggctttgttggttctgccatatgcaaggcagcagtgtccaggggcatagaagtcataagcctaagcaggtcagggagacctacttactcaggtgcatgggtagatcaagttacttggatttcaggagatgttttttatgtaaactgggatgaagtacttgttggagctactgcagttgtttcaacacttggaggttttggtagtgaggaacagatgaaaagaattaatggggaggctaatgttgtggctgtgaatgctgcaaaagaatatggaattcccaaattcatcctgatctcagttcatgattataatttaccatcatttttactttcatctgggtactttacgggaaagaggaaagcagaatccgaggttctctccaaataccccaattcaggtattgtcttaagacctgctttcatatatggcaagaggagagtggatggttttgagcttcctttggatttggtaggggagccagcagaaaaaattctacgagcagtagagaacttcaccaaacctctaagctctcttcctgcatctgatctactcttggctccacctgttagtgttgacgatgttgcgttggctgttatcaatggtgtcacagatgatgacttctttggtatttttacaattgaccagatcaaggaagctgccaataaagtacgggtatgaatatgatcctcatatagtgctgcaatttacaataattgtacaggcaaggagaaactacaatgaggccattttcctcatgttaataccggcagcttttggagcacaatctttttaagggagtagtgtgtggggagaatggtgttaaaaacatattgaatgtactaaacgaggttcatatctttttttcgttatacaagtattgttagtttatgattggaccattttcgtgtctgtaagttctcaaaccagtgacttaattagaggccaatagttagatttgt

SEQ ID NO: 126899 - DNA, 417 bp, Glycine max
  Clone ID: PAT_MRT3847_85596C.1
gaaaaagatttagaaacgattgtagaaaaaacagtagtttaaattggcaaacaattaaaataacaaggaaaataattaaacatgaatttaagttaattaattaaaaacagaaaagatgagaaaatccaatattattgtagaaggaaattcagaagatgagaatgttgtgaacttagcccaccaaagctactcttgatgtaatattaattattttctctatttataattattccaatttatatttgtatctactagtatactgtaaccaagatccctctagtgaaagagcctaacttatctatcttctcttccaaattcctttgtaaagataaaataataaattacattaagaataaagatgtataacatgctaaaaaaatcaacctatccctggtgatgaccttatttagataccct

SEQ ID NO: 126900 - DNA, 422 bp, Glycine max
  Clone ID: PAT_MRT3847_85597C.1
ccacgcctccgctctattctacatacaaactcttcctctcagaactctctttctgtctctgtagaattctcaattctctctctgctatttattatcactctcttactcgcttctttcaccaaatcaaatgcttacgtctcttccccttcttctcttatttgaaagattcttgttgtctcaaaaattggtatctgtgccaatcacacctctgcaagtgtctttcttgctgttggttattccacaatttgtttcatcgatatattcatagtacttatagtacaaaaaactcttattttctcccaaaatcatttatattctactcctttatagtttaggaaggattccatttaagaatattatcttgccaattttctttaatcaaggcttacaatatcatcattatctaaattccattcaccatc

SEQ ID NO: 126901 - DNA, 451 bp, Glycine max
  Clone ID: PAT_MRT3847_85598C.1
tacggctgcgagaagacgacagaaggggactgcaattcatggtaaaactcttctcattctcaatcttgtgagtgcattccaaaccctactgcggcaaaatttaaaattttccccctttccatgtaattttctttcattttctcgggaaccaaacggtacgagactgatcaatttgccctttcccttctctgctttaaaaaggtttgaacttcccatggcgagcgctgttgatgcttccggaaacccgatcccaacttctgcggtgttgatggcgtcgtcgaagcacattgggataaggtgccactccgagaatttggagtttctgaagtgcaagaagaaggatcagaaccccgaaaagtgcctcgataagggtcgtgatgttacccgttgtgtccttggccttctgaaagatctgcaccaaaagtgcacaaaggagatgggtgaatatgtt

SEQ ID NO: 126902 - DNA, 661 bp, Glycine max
  Clone ID: PAT_MRT3847_85599C.1
ttaatcagcgatctcattctctagctgtcccagataacatggcctcatcttctccctctctaatgttcacagtgcgaaggtgccaacctgagctggtggctcctgctacacccactcctcaccaacttaaaccactatccgacatagatgatcaagacggctttcgtttccaggttccaattattcagatttatcataaccaaccatcaatggcagggaaagaccctgttgaagtcattcggcaggcactggcaaaaacacttgttttctattacccatttgccggtaggcttagggagggccctgaccgcaaattaatggtggattgtactggggagggcgtcatgttcattgaggctgatgcagacgtaacactttatcagtttggtggtgaagctctccaacctccattcccatgcttccaagaacttctatataatgttccagagactgaagaaattactaacactccccttctactcatacaggtccaatacacattgtttataatttatatatttatccacttctttgtacaaagaaaaaaaaaaacgttcaaaagccacatgaaaattctaaaaacgacataggcaaattgcataagtaagagtgaatctatttttggaattaataacactccccttctactcgtacagcttca

SEQ ID NO: 126903 - DNA, 421 bp, Glycine max
  Clone ID: PAT_MRT3847_8559C.1
gaacataagcctagcaacacagttggacatgtttgctgaatttgagattgaaacattggaatccaaaagaattggcaagaacaacataggttgtggaagtggtggtgccacaaacgaagtggctcttggaacatttggtcttctacccatggaagatgacaccctttcaaaaaaaaacccaaaattatttttttttttttaaaacacacccctggaaaatataccaccttttttttgttggtgcagaaaaaaaacacacccaagggctgcttcatggttgaaaaaccaattttaggaccccaagcttcattttcttaaggggcggaaaatttcccggggggggggggtggccctttcactattgaaaacctctccccaaagcgcccaaacttgtatattcaataaagcctttcccccccga

SEQ ID NO: 126904 - DNA, 332 bp, Glycine max
  Clone ID: PAT_MRT3847_855C.1
ctcgtttttctcgagccgattgccgttcttctgccgctacactctcttcccgcgctccccagattttaaaaacccatttccgttttcgccttccgatcaaacccttttggtctcaccgcgagtttttgcgcaatgccgttaccctgaatctaacacccaattagatttcacacactatctatctactaccacatcgcccgaaaaaaaaaaacccttacttcttcgaatggggtccggcgcccttaacccctctcatgcgccgcgcattctcgcccgacgaccttcatcatctcatccgaacttttgtccggcacaccccctttcccctctca

SEQ ID NO: 126905 - DNA, 484 bp, Glycine max
  unsure (1)..(484): unsure at all n locations
  Clone ID: PAT_MRT3847_85600C.1
cgcgtatgtgaagcgaggcccctagagcgcgggcgnnnntttttttttttttttttttttttttttgaacaggaatcaaatattatattgaggcaagcaccggcacatatgtatctacatatttacaaattacactactcaaaggatttttccacagactcctagttagtaaaaaccaaaaatcaaaaggcacagaaaaataaaaccaacctatagagaaaaaatcaaaatcaaagaaaccagctatcaagaaagttggattgatattgcaccattatcagcaacaccgggatcaaagcagccccaccccatggagagctcctttctgaaggggcttaatgaattctccagccgcgcctttcccctggtaacgaagcatagaggaaccaatctgaattttccattgatgatgataactaactaactatgagaattagcaccactggggtggcaaacagttaccaacccaattgttgttcaacac

SEQ ID NO: 126906 - DNA, 448 bp, Glycine max
  Clone ID: PAT_MRT3847_85601C.1
cttgcaaatcatctcaaggagacttctgagttccaactccaaaaccttgcctcctcactttcatgcatcaaagacttccaatcaaagctctcttccctctctctccccaacaacctcgttgacacatgcttcgaccctcttcagtttgtgatctccccaaacatctgtgctggaattcaaaccatccctgattggacaaaaaaagttggtcagtccacaccactcaacactgcttgcagatcagatctcactgacatctctctctgtgatgtgtgtctacaagctggattgcaggtcaagcagaagcttatttccattgatggtaatgcctcacattccattgattgtttttactttgccattctctatgctgctgggattgtcaatgagtatggacctgaaagcaatggtgctgtaagttgcatttttagcatatcagcttactcac

SEQ ID NO: 126907 - DNA, 422 bp, Glycine max
  unsure (1)..(422): unsure at all n locations
  Clone ID: PAT_MRT3847_85602C.1
gagaaagcacttgaaaaggtttgttaagggggtaatgtgttgcattttttatttcctgcattaatagaacaggtctattgggttaaacactgacgtttgaaaaacataaaaaaaattcaagtttttagtatttttgtctcttcctcccacctatagagcagatctgtgactgctaaggtatatcatcaaatctagtaattaccaatttaccatcattgctgtctttcatgaaagctttcccaacattacaattttttaaataaaaaatctggtattttaacaacgtcttgatctcaggatgaaaagcgagatcctgaaaaacttaagattgagcgagaagatcttgaaaggcggcagaaagaaaaaaaagctcggttgcaagcggaggcaaaggctgcagaagaagctcanaggaaagctta

SEQ ID NO: 126908 - DNA, 1595 bp, Glycine max
  Clone ID: PAT_MRT3847_85603C.1
ctactcctgctgggagaagacgacagaagggggcacgggggcaatccttctgatttactcttttctctctgtccctttctattatcttctctccttctaccaagtaattcccttatcacttcttttcttttctcatccctttgttctactatttaatcacctcatttactaatttttctttctttcttagacctttgctcgatctgattttgaaagcttgactttgggtttaggttttgttttactatttgatcggatcggatcggatcttgctttcgccattaattactcatggagatccgtgccgatgcagataccagctccttttcaagtttgttcgcagctgtgtcatatggatttacatcaatggccatggtttttatcaacaaggctgttcttatgcagtatgcatattcaatgactctcctcactctgcagcaattggttaccaccttgcttattcactttggtagaaagacgggatacacgaaagcaagagaactggatatgacaacggccaagcgactgctcccgctctctattttctataatgccaatgttgcttttgctttggcaagtttgaaaggagtcaatatccctatgtatattgcaatcaagaggcttacgccacttgctgtactcgttgctgggtgtttctctggaaaaggaaaacctacaactcaggtggctctttcagtgatattgactgctgctggagttctcattgctgcccttggagatttttcctttgacctttttgggtatagcatggcctttgtttctgtttttttccagaccatgtaccttgtgctggtggaaaaatctggtgctgaggatgggctttcatccttggaaatcatgttctataacagctttttatctcttccatttttgatgtttctcatcgtagccactggggaattcccaaattctttatccgtattatttgcaaagagttattctttctcatttttggtgatcctgattctttcattggtgatgggcatcattctcaacttcaccatgttcttgtgtacaattgttaattcagccttaactacaactattgttggcgttctcaaaggggttgtttccacgacctttggtttcttcttactgggtggtgttcaagtccatgctttgaatgtgagtggattggttatcaatacagctggtggtgtgtggtattcatatgctaaatatcaccagagaaaaagtaaggcggtgaagctagtaccagatgtggaggctcatcgtaaatagaagtggcatcgataagttgtggtgaaaactaacggtttcatgaatgtttctttactttgatttactacgattgtaaacactggtagtttagtttttttggttttcttttccttataattttatagtaattgcaggctcacatagtctgagtctaagatgtagtaatactgacatgatattcggaattgagtaaaataattgaactcttgtgattccaatgcgtaaaaaaaaaaaaaaaaaaaaaaaaaaaaaaaaaaaaaaaaaaaaaaaaaaaaaaaaaaaaaaaaaaaaaaaaaaaaatgggacgcggggattttttattccgtaatttt

SEQ ID NO: 126909 - DNA, 200 bp, Glycine max
  Clone ID: PAT_MRT3847_85604C.1
ggagaggtggcaaaaacctaaaataaccatgaataaatgtatcggaattttttattgtgcatggaaattctcaatgactacagaaaaaaattgagggtttttaaatagacaaattaagaggtggtagtacctcacacttttttttgggggggggggaacaaacatccaaaaaatcttacaaggagaacttttaagggggg

SEQ ID NO: 126910 - DNA, 483 bp, Glycine max
  unsure (1)..(483): unsure at all n locations
  Clone ID: PAT_MRT3847_85605C.1
aatttctttcaaactacaccaatcggggaggttagaagcgaaaaagcaagttttgataactaaagtaggagagcatatatacatagatgatgtccgcaccagctaatttggagacgggaggagaagagaagaaattagaaatagagaaagagaaagaggtggagagtcaggtagaggtagcagatactgagtcaaagccatggaaagagcaaataacagtgagagggttggtggtgagcatggtgcttggaatcatatacagcataatagccatgaagctcaatctctcggctggaatcgttcctaacttcaatgcctctgctgccctccttgatttcttgtttgtccgaagctggaacatagttctccaaaaggctggttttatctccaaaccctttacccggcaagaaaacaccatcatacaaacttgngctgtctcatgctatagcattgctgttcatgggagaatcgtttttttatttt

SEQ ID NO: 126911 - DNA, 995 bp, Glycine max
  Clone ID: PAT_MRT3847_85606C.1
tacggctgcgagaagacgacagaagggggccgataccaagccagctgtttcactcttttctctctttccctttctattatctctccaacttcactccttttattcccttatcacttcttagttctttccttatcctttcgctatccagacatgtaatctctcctttaccaagttttgttttactatttgatcggatcggatcggatcttgctttcgccattaattactcatggagatccgtgccgatgcagataccagctccttttcaagtttgttcgcagctgtgtcatatggatttacatcaatggccatggtttttatcaacaaggctgttcttatgcagtatgcatattcaatgactctcctcactctgcagcaattggttaccaccttgcttattcactttggtagaaagacgggatacacgagagcataaaaactggatttgacaacggccaagcctgctcccgctctctattatccatatcatacatctatgcatcttgccttatgtacttactagttagtaattattttgacttgcatgccctttatgttcatttaaatctagttttacctgcaagcattaaatctgttgcttgttgtttcttcagacctttggtttcttcttactgggtggtgttcaagtccatgctttgaatgtgagtggattggttatcaatacagctggtggtgtgtggtattcatatgctaaatatcaccagagaaaaagtaagccggtgaagctagtcccagatgtgtaggctcatcgtaaataaaagtggcatcgataagttgtggtgaaaactcacggtttcatggatgtttctctactttgatttcctacgattgtaaacgctggtagtttagttatcctggttctctttacctgatgcttttatagtaattgcaggctcacatagtctgagtctaagatgtagtaatactgccatgatattcggaattgagtaaaataattgagctcttgtgattcc

SEQ ID NO: 126912 - DNA, 1952 bp, Glycine max
  Clone ID: PAT_MRT3847_85607C.1
gcgataatcccgacatctaagcaaagagagtacggcctatatgtaaaccacatcattctgggaagtcgttcgtggaatgcgcaccttccctaacacccccattacaaatctctgtatttcagggttgaagattcacacattgaattgaagtttggaaatttgacacctaccccacaccatcatggcctgcatcgacaaattttgggttttcgccctcgctcttctcctcctcgcttcccctctcctccaagttgctaggtgccagtcagactctttctctgtatttcagggttgaaaattcacacgttgaattgaaatttggaaatcgtgacaccaaccctacaccaccatggcctccgtagacaaattttgggcttttgccctcgctcttctcctccttgcctcccctctcctccaagttgctaggtgtcagtcagactccgaagatgtagtggaggctgctgaagaatcaagtgatatcggcattgttggtgatgatgtccaagactttggtgatgggaccttcccttctgctccaggaattgaaacaataagtgtttttccaaaaaatagtgcgagattgataacagctggagaagagacagagctgcttgttggtgttaaaaatgatggggattcaagcttgaatgttattgcgatcaaggctagtgttcaccttccttttgatcaccgtatgctggttcaaaatcttactgcacagggttttaacaatggttctgtaccagcctcagcacaagctactttcccatatttatttgcagtcagtaagttcttgcaggcaggaacttttgaccttgtgggcactattatatacgagatagatgaacatccatatcaaagcaccttttttaatggcactgttgaggttgttgaatctggtgcttttcttagcatggaatccgtttttcttgttactcttggggttgcactccttgtcctcctggggctatggattcatggccaaatacagtacctatctaagaaaacaaagagggctccaaaagttgaagttgggactaagactactgatgcttcaacagatgaatggctacagggaactgcttatactcagtctctgtcaagcaagtcaaagaagaagaagtagataaacaatttctcacgttcagccactcactagactctaccatggatatggaatacagaatcctgtaactgactagggttgagtatgagagaacacgaggaagtagttgtgaaattttggctgaaagatccagctttctgttgtagcttaagaatttttacttttctacatttgaatgaagttgagctttttctaaactaacaaggatttcagttaggaaggatacaacttttgagatgtggcataatttttattagataacgtttattctgtgtttgagggcgaatttggatttttggtttctagtccatgcctttttctcgttctatatatttataatgacggagctcattaatggctaactgaggccgaccaaaccaaaaatatctgtctgagccttgaacaagaggaatcccttggacaactgcgtgtcgttctgtgatttcaatagccatgtttgccagtgtggcttgaagttttgttccaacagccaaaattatcacaacaggaattaaggatgcccaaaacatagcatgccatccattaacatttagtagcagaaaaacaacaaatgatgcccagaggacaggactgactccaacaactaccttgaagtcatcctccaaggatcttttgatatacttttggaagttaaatttacttccaggagccaggtggaccgtgataaatccattgcgcaaagccaagtagtcagccttgcccacagacctataaaattgtctaaagaagcatcctatatagaagaagattgaatatcttgtccaaaaagaagcatgagctctcacaaatgatgtttcctcgagcc

SEQ ID NO: 126913 - DNA, 237 bp, Glycine max
  unsure (1)..(237): unsure at all n locations
  Clone ID: PAT_MRT3847_85608C.1
tttttgatggaaaaatgattcatttctgtgatgtatcccacaaagtacaattcaagagaaacagtattccctgactcaannttttttaaatgaagaagcacaatttcttcgcagcaaaaaaaaatctatactnttcaagtttcaccatcacctatactgaagtcaaaactgccctatataacccatcacatcatatacatacagatcttcnctctctccgtcatatcagatcatagt

SEQ ID NO: 126914 - DNA, 998 bp, Glycine max
  unsure (1)..(998): unsure at all n locations
  Clone ID: PAT_MRT3847_85609C.1
attctcataagagacaatggggagcaagttgggatgagcaattttcctactattttggagaggaatcaaagaacggaggcatgactattttagctggttgagaatcacccaagttttatccactgctgtcatcttaggattactttggtggcaatcagatactaagaacccaaaagatctgcaagatcaggcaggattactattctttattgctgttttctggggattttttcctgttttcactgcaatattcacatttcctcaagagagagccatgctgagtaaggagagagcagcagacatgtacagattgagtgcatacttcctggctagaaccacaagtgaccttccactagacctcattttaccagtgctttttctacttgttgtttatttcatggccggcctcagactcagtgttgcaccatttttcctcacggttctcactgttttcctctgcattgtggctgctcagggacttggacttgctattggggccacacttatggacttgaaaagagcaacaactttggcttcagtaactgtgatgaccttcatgcntgctggaggattttttgtgcagaaagtccccatatttttttcatggattcgctacatatctttcaactaccatacgtataaacttttgctcaaggttcaatatgaacacattacacctaccattgatgggatcagaattgacagtggattcacagaggttgctgctctgacagccatggtttttggttaccgtttattggcatatctttctttgcggcggatgaaacttctagctggaaattaagaaaattgatattgaatgacaactcataattgtatcatatgtaagggacaactaccaagtgaattgcactcaatttgtctaatctcatgtattatttcatttagcatgttgaagcaacaaaatcatgctgaatcttatcacacgcacatcaatataaggagagtttagagaagatgccttttgaaattaaaaa

SEQ ID NO: 126915 - DNA, 498 bp, Glycine max
  Clone ID: PAT_MRT3847_8560C.1
ctctgtgcttaatttacgttcatgcttaatgatcgttcatgattaattggtgtatgtgttgcttaatcacataatgaattccttatgttaaattttgcttagtaatttaatttagggttggattaagtggttgaactgataaaggataaactctcgtaacctaggataagagacttactcgtgaatcaaggggaagcaacatgttttaattttgatattttctaattcacatttattcgctgtttaatttacaaaagcaaataccccccccccaatttgttacacgttttcttactgcatttttaatgtttatttgattcgggtacgacctcgatcaaacacctgagttagaactctacaatcaagaaattcaggttggtaagctggcataagaagtgactcaatgtgtggccagaatagaagaagatattgtagagattgaagctcaagaggaaatccctaccaaagagcatggatcccttctgtcgtcttctcgta

SEQ ID NO: 126916 - DNA, 434 bp, Glycine max
  Clone ID: PAT_MRT3847_85610C.1
aaaaacccaccggaaagggcttcccccaaaaaaaaattttgtttcccagggaaaaagctcccctcccttttttggttagcgggacccttatttcttaaaaaaaaaaacctcgggggggtttttaaaaaaatttttggcaaaatcataaaaatgggggtggtattaatcctatttacccggattggggccattttagggcggggaccccaaaaatttcgcggggccaactcaggtaagccccatttttacccccacagggaattttagggggcttttaagtaaaagtaaattccttgagggggcagccttttttttcctatgcttaaaaaagtggcaaaaaatgggtttaaaaggtttagggggttttacattacaggaaacacacaaaggttggttagagtttccattttaaggggacctccctactccaaagg

SEQ ID NO: 126917 - DNA, 318 bp, Glycine max
  Clone ID: PAT_MRT3847_85611C.1
caatcatccttctttctttttctgtgagcctttctttcaggttcttaacttgatcagtgtgcattgtccaaatcataagggtagttgcaaattgcaatggctaagcatgatgttgagggtggttccttttctgcataggactactctgatcctcttcagcaccgttgatttgtttttttggaacttactcatttggttcttttcacgggttttgattgctgttatttttttctctattttttttcctttttatttatttgctaacctgagtttgttttttattattcatcatttttttatttattctcttttttattt

SEQ ID NO: 126918 - DNA, 268 bp, Glycine max
  unsure (1)..(268): unsure at all n locations
  Clone ID: PAT_MRT3847_85612C.1
ggcccaanacaaccaaggagcgtaacaggancatgaagaagaagcagaaccaatactgctgcacaactgcnacctcaggaattgatcagagnaattcttctgagattancngtgaaatctcttctgcgtntcangtgcgtctgnaagtacgtttctgtctctgatntcggatccccaatttgtnatttcccattntgccctagctgcctcgcccanccatnagttaattttagatcacangnnntncagctcaanccacgccagggna

SEQ ID NO: 126919 - DNA, 559 bp, Glycine max
  Clone ID: PAT_MRT3847_85613C.1
accaaacaaagtcctaaaagaaaaccagcaataacaaatagtaatagtgaataacagaggatgtaaaaagcctcacactcagagtcacagaatcctcgcgcccacaagcaaaacagagagaaaaaagaaagcagaaatgggatcattcccaaaagcaaaacccaacaacactcacaccgacaccaacaccaacacccataacagggttatgggttttctcctagttttctttccggaagagaataacaatacaacaccaaccattgctaccaaaagtaccaaacccaaccttgtatcttcttctccctctccacattccttgaagagaattagttccagttccaacaatgcccttctctccaaagcccagtccactatctcaatatgcttcctcctcctcttcactaccctccttctcttcacactctccacattcgaacccacacaccacaaacctcgctccataccccccaaatccaaactccgcaaaaacacctcctcaagcgacgtcgctttcccctccactgcgctccagcgtatgggcacgctctaccgcaga

SEQ ID NO: 126920 - DNA, 472 bp, Glycine max
  Clone ID: PAT_MRT3847_85614C.1
ttttatttttttttttttttcttttttttttttttttttttttttttttttttttttttttggcaaattggaaaacccctttgccctatgaaaaaaaaaaaaaaaagggatgcctcccaaggttcctacttgcaatatttaaaatttgatttggccctcccagaatttaagtttaacttttccctcccggaactttttttagctccaaataaatttttggtcttttctgactccccactcaaataatttgccagttcctttaacataaccttaaaaagaaacaaaaatttgcctttttctaatttttctaacctagcgaccgtttcctgacttttcccggcttgggaacattctgggggggacatgctaaaaaactaagaacccttttttaaagactcccttccctaagatttaaaacagggctttttgtcgtcaaaattgccacaagactttggggggagtcaaacaccac

SEQ ID NO: 126921 - DNA, 247 bp, Glycine max
  Clone ID: PAT_MRT3847_85615C.1
gggtggctcaaacatctcttgcgcagctgataacaatgacaaccatgccggcgcctggaaggttgattgataaactgcccttaaatgcatcgatggcttacacaccatgaagaccaacaatgacatcacctacattgatagcaccgggggagaagcgctatgcatgcaggtgaggtcaccaataggcaataagaaggatgagactcttaactacctgccagacctagatgatgcacatataggcaaa

SEQ ID NO: 126922 - DNA, 267 bp, Glycine max
  unsure (1)..(267): unsure at all n locations
  Clone ID: PAT_MRT3847_85616C.1
gtgggcggcgcccgcttggcgcgtggttggcggcgttgaaagaggtgtgggatttttcttgtgggcctggcgtgctgggcgngagggtgttgccatattacctttgttggtttgggcaggcgaacacggcgaaagagtgcgcggggtggcgggtgttggcggggggttggcgggttgggggggtgatctgggggggggggctgggggggcgtggggcgcgctggggtggggggtggtggccggggggtgggggggggtggtgtgggg

SEQ ID NO: 126923 - DNA, 321 bp, Glycine max
  Clone ID: PAT_MRT3847_85617C.1
cggaagagcgggcgcgcgccacgcgcacgcaaaaagaggctttcccattttgctggagagccggaggaaggaaaaacgggaagccgaccaatgaggcacagaacagggatcacacaacaaccaaagaaaaaacacaggctaaaacgagagaccactacaaaacaaaataggcagaatcagagagaaccgacgcgaaccaaaacaaaagaggacctcagcaagccagggaccagggcaaaaaacctgacagaaccgagcaaaaccaccagggtagggaacaggaggacataaaaaaaaccaacaagggaaaagggcagaacc

SEQ ID NO: 126924 - DNA, 541 bp, Glycine max
  Clone ID: PAT_MRT3847_85618C.1
gctgctgcgcctgctggtgccgccgcggcgttattgccgggacccacgcctccgcccataaatggtgaaacaggcaaacggagatttgtttctggcgatggacaagagacaacacagagtacgcgacccagtgtggtagaggctgacctcagggtgcgagtgggactatgatgaacagtgcaccgtacattgacttgacgttgaatgtcccaaggatggagaagacttcactcgtttgcacaaattgattcgacaaaaccgacaacgcgctgcttcactattctccccataggagtataatcttgcgtatcgtaggaagtttttaaaatatgtgatggatcactatgagagagaggggacaagcttagttgtcaagatggaatccacccatactccatggaatggactggtttggccaatagattactgagttacggcaacgatattctgggttgcgactatgctagttatgatggtttgattaccaaacaagttatgagcaagatggcagatatgataaataggctctgtggtgctgatg

SEQ ID NO: 126925 - DNA, 155 bp, Glycine max
  unsure (1)..(155): unsure at all n locations
  Clone ID: PAT_MRT3847_85619C.1
tcagaacctagcttggacnanacnaactatcanaanacggaacnntttcntctcttgnatttaaanncgagataaatatagattctggggggattgttggattctgggtctcgttgggtnagattcatcanaacaaccctttggattctttcttg

SEQ ID NO: 126926 - DNA, 508 bp, Glycine max
  Clone ID: PAT_MRT3847_8561C.1
gccgaggggtttaccgtgctacatgtgtgtagtgccgccttcttgggggggggggggggggggggggggggggggggggcgaaggggggagaggtgcggggaggggcaggggcagccgctgggaaaaggaatagaccaaacttacaaagattaggctaactactgaaacagaaagagaaggagtaggataagcattgtagagttaggagtgaacaggaggagagcctgcagttgagaaggtagtgaaatgcaaattatagtacaactggtatacaggggaagggcgtatttggggtagtagccacacccatgcagtccaagttacaggggactgtgcacatacctaaatagcgtgcgttattaaacgtagttggtgcatgtggagtaggtgtgtcaatggtgagctccactaaacttacggtgccaatacgtaaacccaaagcaaatgtggtagtttaaataccaaattacggagggcaaaggatatggcggtgtggtggccttagag

SEQ ID NO: 126927 - DNA, 1297 bp, Glycine max
  Clone ID: PAT_MRT3847_85620C.1
ataaatccaacagatctaaaagtaccagttttggacataaaaatgccaaagccatcagaaggaactgaagagaaacattctgtaccatcatctgctgcagtgatgcagacagatgaaaatgacaaggaagaagatgaattcagtgaagatgattgggatgcatttcagtcgtttcctgtctctaaaagtgaggatggagatgattcaaaaacagagtatgttgctgaaggaaaggatcctagcacagttaaaatgtcatcagaaatagaaagttctattggaggagttgagtttcaagaatgttctatttccaaatccatcaatagtgaaaaggagctgaaaggtgatgaatgtctggaggctgttaaagagaaacatgatcaaacttatcctagtgctaacaagccacatgataatgagaatcaagagatggaggaaaaattgcaaacctcagtgcttcaagaagaggggacatcaatcccaggaagtgaactagtttcttgtgatcagaagcctgaggaagaggctaagatggaggaaaaattgcaaaactcagggcttcaagaagaggggatatcaatcctaggaaacgaacgagtttattgtgatcacaagcctgaggtagaagctgagatggaggaaaaattgcaaaactcggggcttcaaggagaggggacagcaatcccaagaaatgaacgagtttcttgtgatcaaatgtctgaggtagaagctgtgatggaggaaaaattgcaaaacttggggcttcaagaagaggggacatcaatcccaggaaatgaacgagtttcttgtgatcaaaagcctgaggtagaagctgagatagaggaaaaattgcaaaattcagggcttcaagaagagggaacatcaatcccaggaaatgaacaagtttcttgtgatcaaaagcgtgaggtagaagctgaaggatcaattgaagaggaagtagtgtcagattctccgacacttcaacaggggttttctgaaccaggtaatagtgaacagcttaacaggtgtgatgaagatgctgagaaggacagtgttaatgaaaatgagagtcatcacccgcagctagaaatgtctgaaactccaatagagtgtacaaaattagaaccatttgctgaagaccataaagagtaagttaattgtagggcatgagatattctgcttattacttcatagcatggaaaaccgcgggaaaatacctaaatttgaagcattgtaaaaatgtatcatccagtagagccattttttttttcaattccaatctatattctataaaaaa

SEQ ID NO: 126928 - DNA, 229 bp, Glycine max
  unsure (1)..(229): unsure at all n locations
  Clone ID: PAT_MRT3847_85621C.1
gtcngtngccacgtggcnggaacgatctcaagcgnnctacggttcagtcgagagnctgttcaataaatggcaagctcaaaggtggtgggcagagaactacgacaaggttatggaactttacaatgttcaaaggtttaaccgccaagcatttcctcttccaacgcctctaagatctgnagatgagagctcaaagcttgaatcagtagnagaaagcccgtaacacctccac

SEQ ID NO: 126929 - DNA, 301 bp, Glycine max
  Clone ID: PAT_MRT3847_85622C.1
ataaccaattccacgggcggcactactcactagtccgcccttctcccttttttttttttttacattcaaattgtttataccttgcattgcatggatattccttcaaaggccgaaaagattattataatcaatacactacttacacagtaagttttattaacctatatattaactaaatctctatcaccacttgaatcccacatagaactgttgttttgaccttagctaggactctcaaaagaaaatgtaactactgtcacaaacttaagttacaatataaaataaaataattcatcattca

SEQ ID NO: 126930 - DNA, 241 bp, Glycine max
  Clone ID: PAT_MRT3847_85623C.1
tggcagactctgtcttccaaagtgaaaaaaaggtaaaaacgattatgttctactagtcgcctgtttgaatcactgttttacttaatgtttttgcgtatgaccaagacgaattaaaaccatatgtgcatccaatctactaaaatgaagccattggttactcgattgagttagtcgtagtgcacctagatgcttgacgtgcgtatgacgtgttaattagccattactatatagtattactgta

SEQ ID NO: 126931 - DNA, 2666 bp, Glycine max
  Clone ID: PAT_MRT3847_85624C.1
ggctcgagggatgccttctctgctgcagttattgtcaatattgctttctcttttatacctgcctcatttgccgtttcaattgttaaggaacgtgaagtgaaagctaagcagcaacaactaatcagtggggtttctgtcctgtcatattgggcttctacatttatttgggacttcgtgagcttcttgtttccggcctcttttgccatagttctcttttacgtctttggtctggatcagtttgttggaggggtttctttgttaccaacaatcctcatgcttttggaatatggacttgcaatcgcatcatcaacttattgccttacatttttcttttttgaccataccatggcgcagaatgtggttctcttgatccactttttctctggattgatactgatggttatctcattcattatgggactcatgccatcaacaatgagtgccaattcttttcttaagaattttttcagaatatctcctggattttgtttcgctgatggtcttgcttcactagctcttttacggcaaggaatgaaagataaaacaagtgatggggtgtttgattggaatgttactggggcttccatctgttatcttgctgttgagagctttagttactttctgttgacgcttgcacttgaaatgtttccttctctcaatttgacttcattcatgatcaagaagtggtggggaaaaattaatatcttccagcataataatccctatttggaacctctgttagaatcatcttccgaaactgttgctatggacttcgatgaagatgtagatgtgaaaacagagagaaatagagtactttcaggttcccttgacaattccattatctaccttcgcaatctccgtaaggtatattttgaggagaagcatcatgggagaaaggttgcagtagattcattaactttctcagttcaggaaggagaatgttttggctttttaggaacaaatggagctggaaagaccacaactatttctatgctatgtggggaagaatgtccttctgatgggactgcttttatttttggcaaagatatatgttcccatccgaaggctgctcgccgatatattggatattgtccacaatttgatgctctattggaattcttaactgtccgagaacatcttgagctttatgctagaataaaaggtgttccagattttgcaatagacaatgttgttatggaaaagttgacagaatttgacttattgaagcatgctaataaaccatcattttcacttagtggagggaataaacgaaaactgtctgttgcaattgcaatgattggagatcctcctattgtcattcttgatgagccatccacaggtatggatcccattgccaaaaggttcatgtgggatgtaatatctaggatctcaacaaggcgaggaaagactgcagtaattcttactactcacagcatgaatgaagctcaagccttatgtaccagaatagggataatggttggtggacgattacgatgcattggaagtccacagcatctaaaaacaagatttgggaatcatctggaactagaggtcaaacctactgaagtgagttctgcagacttgcaaaacctctgccaagctattcaagaaagacttcttgatgtcccttctcatcctagaagcttacttaatgaccttgaaatttgcattgggggcactgactccgtcacatcaggaaatacatccattgcggagattagcttgacacgagaaatgataggcttaattgggcgctggcttgacaatgaagaaagagtaaaaacactaatctctggtacacctgtctgtgatggagcttctcaggaacagttatcagaacaactgtttcgagatggtggcattccattgccagtattttctgagtggtggctgtctaaacaaaaattctcagaaattgattcttttattctctcttcatttcgtggggcaagatgccaagggtgcaatggtttgagcatcagatatcagttaccatataatgaagatttttccctagcagatgtttttggacttcttgaaagaaacagaaatagattagggattgcagagtacagcatcagccaatcaactctcgagacaatatttaatcattttgcagctaatccatgaagtgtcctcattttacaattcctttcataaaatgctgcttgttggttataatgtgttaaatgtatcaaaatgatgacattctttcacttccccggctagaattaagacggcattgagcgagattctaaggccatgtatattgtacaatcgataattatagtgccgttaattgtaaatatatttacagtactaagatccttaatcaatctaattgctctagaaacttaagttttgttgaggataatccatattgggattatcttcaatttgttttgttccattccaacacccaatggtggaaaatagggagagttcggcagaatcatttttcatcttcccttgctgagatggttctccttgcttgttgcgaagcacactgcagccatctactagtccctgtaagagtactgaaaaaatatcctccaaacttcttaattcttaggcaattgtgttccgccattttttccccccaaatatatatcatttttctggaaaaaaaaaaaaaaaaaaaaaaaaaaaaaggttctagatcgcga

SEQ ID NO: 126932 - DNA, 485 bp, Glycine max
  Clone ID: PAT_MRT3847_85625C.1
cttaaacaccaaaaaaggtttctgtttttaaaataaaaaccaaaaaccaaaaaaataatgtggggcccccccgcggcggggggacaacgggggacccaaaaaaaaaaaccaattcatgatggcggggggccccccgcccccccaaagaaaaaagggggggggggggtttactgggtaaaaaagcacccaaaaaaaaggagggagggggggcttggaattttcgttttacaaataacccaaggggccggaaacccaaaaaataaaggccggggcccgggcccccacccctggggctttttggccccaaaaacgaggagacccccccgcgcccaagggggggacccttttagggatggtaagaggggggccaaaagcccggattacggccttttgcccctaaacagggggggaggagggggggccaaacccttctattgctgggagggggggtagaccgtgcaaaaccgccgaaaaaacagcaaaaa

SEQ ID NO: 126933 - DNA, 277 bp, Glycine max
  Clone ID: PAT_MRT3847_85626C.1
aaaataaaaaaaaaaaaaaaaaaaaaaaaaaaaaaaggacaaaacgtttctgagtgtataagatacccaacttttctatggaacgataaaacttctttgaaggggaaccctaatgtagatgatgagcaagatattttagaacgttgagactggggaaagccggtgattacccagattacttgctattgataatatttctcatttcccagctgttttagaagataattggccctcaccgggtgccctttccaacaattgcacatcctgaatggataat

SEQ ID NO: 126934 - DNA, 1341 bp, Glycine max
  Clone ID: PAT_MRT3847_85627C.1
gtaacccaatcacatggagccttcaaagaacaacgcccaatcgaaagaagacgacaccgtggcgctgaggaggaagcgggcgcggcgcgtgagcttcgcggacaacgaaatcacctccgtccacgtcttccgccgcgacgacgacgacgattccacttcctctccctccgaacccccttcttcctccgatccctccatcctagggtttttccgcgacctcgcctccgacagcgacgatgacgaacaaccgaaactcgaagacgaagccgaagccgccgcaaactccttcctccgccctgtcggatccccctcccctggcggcagcatcaccgccgactatgatgacgatgatgattttggcggtccggtgtcggcacatttcgtccgaccggatcggctatcggactccggtgttttggaagacatcacgatggactcgacggctttctcactgcactaccagagtcttgctggctcagactccggcgacatcaagacgcgccagttcgtcaggcttggaactccaagctctcagggaagttacatggagctcacggaggcgacaaagaggcctgccgaagtggtactcgacgcaaatagtgccggcaaagactccaacgacatgagcattgaggtagaccaccaaatgagttttggctatgacataccctctcctgcgtttgatgctgctgctgcaattttggcagaaggagcacctaaggaatcaccacatcacagcttggagggttcggttatttcaccagtcactcaccttcaccagatacagccttctgattcttcaatcaaggaaaataaagagtttaatgttgtcaagagcaggaggaagtgggtcacctcttttttaattgtaaaaggattatgcccctgtggtgggaatccatggggtgggtcagggctgtaggacctcttccagcttccccagcaagccatttagctcaattttgtgaaggatttggtgttaatataaatcaaagcagatggtgtggatggtgggtggctctaactagtaccatatggcaccataggaatatcttgatctttcaaggaaaaccttttgatcactctaaagtcatggaggaggctatgtttacagcttggtcttggataaaagctagagagaaaggtttcaacagtagcttcaaccattggtcctctaatatatcggggtcctttggttaacctatgtggtgatgttctattgatgggttagtttgggtttttgggaggcagcaccagaggtgctttgtattttctttgttcagtaccacttgtactgttttatttaatcaataatataatatatatttcgccttcaccccc

SEQ ID NO: 126935 - DNA, 427 bp, Glycine max
  unsure (1)..(427): unsure at all n locations
  Clone ID: PAT_MRT3847_85628C.1
aatctacatatagaaacatgaacattccaactgtgctagctttaccattcccagcacaagggcatgtaaatcccatgatgaccttctcacaaaagttggttgaaaatggatgcaaagtcatttttgtgaacacagatttcgtccacaagcgagtggtgagatccatggtggagcaacaagatcatagcctcgatgattcgtcgtcactgttgaagttggtctcaatccctgatggtttgggacctgatgatgacagaaacgatcaagccaagctatgtgttgctattccaagttccatgccagaagcccttgaggagctcatagaggatattattcattttgaaggtgagaaatatagaattagcttcatttgtgcagatttgtgcatggcttgggcgttggatngtgggaataaatttggaatcaa

SEQ ID NO: 126936 - DNA, 251 bp, Glycine max
  unsure (1)..(251): unsure at all n locations
  Clone ID: PAT_MRT3847_85629C.1
gaccaatttttcttaaattactaattaaggccaaattcagatgagtttattaacaaaaaaganaataaaattaattagaaaggnaagcaaatcaaactctttccataagttaaaatacacctcaattttttaagaaactttcttagttaacttttccattgaggnacgtaagttaacttataagagaatattgatgtattttacctcatganaatccttttatatctttctcataagtgtntgtngagaaa

SEQ ID NO: 126937 - DNA, 856 bp, Glycine max
  unsure (1)..(856): unsure at all n locations
  Clone ID: PAT_MRT3847_8562C.1
gagaaaaaaagaagttattctttcttctttttgctgaaaccccataaagcgaaatcgtaaagggtgtccttggaaaaggagtgtttcattaaaaagcagggatctttcgggagaaagataagagaaaggggtaagctttgttttggggcaatgggggatttggagaagcaggagagggtgggagagaatgagaggcttttggagggtatgcctgttttagattttgacatgctttgttcctctgtggcgttgcaaagtgcacatgggagttggggaaagcttgggggtggggatgaggaacaactcctcgattgctttgatgatcgccgcatcgcttttgaatctgcgttttgtccttgctaccgatttgggaagaacatgaagctagctggttttggttcttgctacattcaggctatagtttattttctccttgctatcggtgcctttgttactttcattgcctatactatcacgaggactcactacttcctatacccagcagttgcactcatcattgttgttggagcatatctaggattctaccgaactcgtatgcgaaagaaattcaacatcaagggtagtgatagttcgttggacgattgcatttaccattttgtctgtccttgttgtacattatgtcaggtcatttcaaatttctctcttttgtaactatggttatgttgattgatttaactgtattctgaaataaagctgttgataatatcatattagtggtgatcataaccaaantaatacatatttataatcagaattatttattatattaaatatttatatctttataatatatattcgcaaagtcaagaacacttaaaattaacaatattcaaaa

SEQ ID NO: 126938 - DNA, 390 bp, Glycine max
  Clone ID: PAT_MRT3847_85630C.1
gggtgctcgaagctttttctgagagatattatgatcaggctcaaaatatcctagccaataaggatgctgctcttttgttatcatactcaagtgtaatgcttaatacagatcagcacaattcacaggtcaaaaagaagatgacagaagaggattttatccgaaataataggcgaataaatggtggcaatgatctacctcgacagttcctgtcagaactttaccattcaatttgtaagaatgagatccggacaactcctaagcaaggttctggtttccctgaaatgaccccaagtcggtggatttatctcatgcacaagtcagaaaaatctgctccattcattgtctctgattccacagcataccttgattatgatatgttttctaaaatgt

SEQ ID NO: 126939 - DNA, 1264 bp, Glycine max
  Clone ID: PAT_MRT3847_85631C.1
ccaaatatccgattaaatatttgtttctggtctgcaacctaaaattctatgtgagtgaattgggaggatgctgtgtctgggtcgattcggcggggtctctcactacccaatcaaatccggttggagtcggagggactacaccaataacaggcccagatggtgtttgatggccgcccaggaatccgactcttcttttgcaccctctcttgactccgacaaaaccgcctctgctggattctgcatcattgaaggcccagaaacggtacaggattttgccaagatggaacttcaagaaattcaggacaacattcgaagtcggaggaacaaaatcttcttacacatggaagaggttcgtaggcttaggatacagcaaagaattaaaagtgctgaacttggaattttaagcgaagagcaagagaatgaactccctaacttcccatcattcattcctttcttgcctccgttgacttcagcaaatctcaagcaatattatgcaacctgtttttctcttattgccgggataattctttttggtggtctccttgcacctagtttggagcttaagcttggactagggggcacatcttatgcagattttattgaaagtttacatctgcctatgcagctgagtcaggttgatcccatagtggcatcattctctggaggagcagttggagtaatctcggcattaatggtggttgagataaacaatgtaaaacagcaggagcagaaaagatgcaaatactgtcttggtactggatatcttgcatgtgctcgctgttcaagcacaggagcacttgttctgattgaaccagtatccacagtcaaaggtggagataagcctctttcaccaccaaaaactgagagatgttcaaattgctctggatctggcaaggttatgtgtccaacatgtctttgcactggaatggccatggcaagcgaacatgatccacgaattgatccatttgattagaggttcagtaattatagttatcccgagcagttataagaaaaactagtattttttttgttgaagtggtatttgtttccgagcaggttcaataatttgaaagtggtatttgtttccgtggcggagaaatggattttctgtaaatatgtataaacacttacaagaaaaagaaaattgttaagaataatatagacagtttccctttattttaaacacttacaagaaaaagaaaattgttaagaataatatagacagtttccttttgtttgaggattaaaaaaaaaaaaaaaaaaa

SEQ ID NO: 126940 - DNA, 853 bp, Glycine max
  Clone ID: PAT_MRT3847_85632C.1
gacccagcgtgcgattctatgtgtgtgaattgggaggatgctgagtctgggtcgattcggcggggtctctcactacccaatcaaatccggttggagtcggagggactacaccaataacaggcccagatggtgtttgatggccgcccaggaatccgactcttcttttgcaccctctcttgactccgacaaaaccgcctctgctgggtcccttttctatgcgtgcattctctctctctcttttttcctttcttcattcttccattctattctatccgcagattctgcatcattgaaggcccagaaacggtacaggattttgccaagatggaacttcaagaaattcaggacaacattcgaagtcggaggaacaaaatcttcttacacatggaagaggtctcaccttcctatgacatcttatatactgctgctgtttctccgagaaagggttcttcagttggatatttcattacttttatttttgtatagcactatatcagatattgaggtggtcttgttggctatggttctatttccctctatcaaaattatgttgatctactattttttcttcactgactttccaaatttagtacaaaacctgttcaaaattcaaattgccattcatgcatcttactctctgggaagtccttttctcaaacaacatcctcttattttgtaggttcgtaggcttaggatacagcaaagaattaaaagtgccgaacttggaattttaaacgaagagcaagagaatgaactccctaacttcccatcattcattcctttctttgcctcctttgacttcagcaaatctcaagcaatattatgcaacctgtttttctctattgccgggata

SEQ ID NO: 126941 - DNA, 1277 bp, Glycine max
  unsure (1)..(1277): unsure at all n locations
  Clone ID: PAT_MRT3847_85633C.1
ggttttcgcaaaggcgaacgactcagatccatagcgttgatgaaaggaatagttcagagcttcattaaaaatcagaacaagaggataagccatctaaatgtatctcgtgtttcagatcaacaacacgcaatatctcatctctatgagctcatgagatctaaaagctgaacagcttgactacgccgtataaaagcaaaaaatatcacaaatatgaaactattttgctaattcatctgtatcacgaataatcttcattgaaggaagaataattgcagccactggtctatctttatatccaccaccttcatcaatgatcagccttaagccttctacatggagtttcgcgtggtgaccactaacaacaatggctggacttgcagttagttcctctggaatatcccaaacactctttctcccacttagagcctccaccttaggcacccgagtatcccgagctttcaaaagttttaactgctctttcacatcttttcctttctccaaaccagcatgaacagcaatcaatttgcagcatttaactccatcatcagtgttcacaaagacatcgtcctcttcatggacccaaaccaaatcagcaagaaatttcttgtgatcatcaggaacagccttaaccaaaccggcggagccatggggaactccataggactcaaaggttggtccagcgtcataaatggagccctgatactccgtccccttaaccgtgttaaacttcacctttatcttcccactccacctcctcccttgcaggtgcatgtcctcgtacccttcccccttgaaccacccttcgcgctcctcgctcgcctcgtattccctccacccctccgagaacccacacccatccgccggcgccgggaggaggcggaggaaggccgcgaaggccaagtcgtggttgccgcagaggaacacgtgcttctgccgcgggtaacgcgagggtaaggagatcaggaagtcgatgacttggcgggtggcgggccctcggtcgcagtagtcgccgaggaagattagggttgcggtttcgaattcggatcggtcgaggctgccttcgaggttcttccagaggctttggagctttgttatgaagccgtggatgtcgcccacgcagatgactgctctggtttttgggggctctgacattgatgccagtttgattgctttggttttcgtgggatttgctttgtgtacgtaaacttaccctagaggaccagattgagattcttgtggatctgttgcattctaatttattntattttattttattg

SEQ ID NO: 126942 - DNA, 1965 bp, Glycine max
  Clone ID: PAT_MRT3847_85634C.1
cacaaaatccccttcaaaagcaaaaacaaaaagcttcttcactcgaattgcaggaaatggcaacaatgtccgcatcttcaatgaaccttaacatgattgactctaacttcgaagtcgacaagctcacctacgaaatcttttccattttggagaacaatttccttttcggctacggccacaccgaaaatcgcaccaatttggttaattttccgctgaaagacgcgaaaccggcgaaacacgccgccggcaaggtccgcatcctctgcattgacggcgccggcgccactgacggcatcctcgccgcgaagtccctcgcgcacctcgaggcctgcctccgccgcaagtcaggcgacgcgaacgcgcgcgtcgccgatttcttcgacgccgccgccggctccggggtcggtggcgtcctcgccgcgctgcttttcactcgcggcaaggacggaaggccgctgtgcagcgccgagggggcgctgcggttcctcaccgacaaccgccgcaggatttcgcggcgggcggggctcctccggcgagtgctccggcctgcggcaaaggcggagaagctcttcggcaagacgttcggggagtgcacgctgaaggacacggtgaagcccgtgctgatcccctgctacgacctcgtcacgcgcgcgccgttcgttttctcgcgcgccgacgcgcttgaagtggacggctacgatttcaagatgcgcgatgtgtgcgccgccacgtcagcggacccatcctctgcccccacagagatgcggtccgtcgacggcaggaccaggatcatggccgtcgacggaggcgtcgccatgaacaatccaacggctgccgccatcacgcacgtgctcaataacaaacatgagttcccgttctgtaacggcgtttccgacctcctcgtactcttcctcggtaacggagagtcagactttaacgccgtttagtcaaggacatcttgaaccttgtctacatctgtgagtgtaatggcctgccagaggtggctgagtactggaaacaagtgatcaagatcaatgattatcagaagagccggttcgtgaaccgcgtggtttcgtcgatgttcaacactgttgcaaccaaaaagatagcaattctggggtttgcattcaagaaggacactggtgacacaagggagacaccagccattgatgtgtgcaagggactactcggtgacaaggcacgcctaagcatatatgatccacaagtcactgaggaccaaattcagagggatttatggatgaacaagtttgattgggaccaccctattcacttgcagccaactagtcctacaactgagaagaaagttagtgtggtttgggatgcatacgaggcaacaaaggatgcagatggtgtctgcattctcactgagtgggatgagttcaagactcttgattatcagaaggtgtatgacaacatgagaaaaccagcatttgtttttgatggaaggaacattgtggatgtggagaagctacgtgatattggtttcattgtgtactcaattggcaagccattggatccatggctcaaggacatgccagctgtggcataagagagacatttcaaggattttgaggcattattcagtttggttcaattttattactactggcaattgttttttggaacaattttttggttgccatttttcactttcccataatagttggcataaatgagtataaattttgggaaagtaggaggccatatgttttgggtttccttgtactgcaagtcatcactactatttggatgttttgagtttataaggatttttttattttatttgattagtatggtgttactatcagtttgatgaatgaattggaaattccagcatgaggaaaattttgacctactccaaccataaaagttgctcttaatgttgaaatatgaagggtatgttcatccatgtaaatttcaatttgggatatgattttcacatat

SEQ ID NO: 126943 - DNA, 321 bp, Glycine max
  unsure (1)..(321): unsure at all n locations
  Clone ID: PAT_MRT3847_85635C.1
agagaattcanttagcaaagctgatagaacctcatctgccaataagacctctgttaaacattccaggagcattgggaaaattaaaaagaagacaagtgcaaaaaacagtgttnctgaacatgacagtgcttctgcctcccttaagtcaaagcaaccttcatccaacaaacagaaaactgttagtgaaaagcaagacactaacgggaaaactgcacgcaaaaaacaaactgacaaatcttaaaagcttttgttaaaggatcaaggaaaacgaaaagtattaaaaagccaaagcagacccactaancaagacatgcatgctgt

SEQ ID NO: 126944 - DNA, 495 bp, Glycine max
  Clone ID: PAT_MRT3847_85636C.1
taattttaaggttgtaatgcgggacaaagtcttttacttcacttgttatttggaaagtactacttctctcccactcacatgtcgttgtaatcatggttttatattgcggtttgtaacgccaattgtggttgcaacataaaagtgttttaactcatcgcaatcatatctcaattacgaccgcatcagtcacattaacccacgatgtcatggttggcaaagacgcaaccacaaccacaatttgacaccatacactaaaatcttcatttgggtataagaaagaggaccaagccatccatgcatgcatgttactcagttttccctctcaaattaattatatagttcatgccacattcatataactaatctagtacctctaaataaggcacaattattggacatcatcctttcaatcaagctctttctctagtctcatatgaaaggaaagagagcacaagtgagtcaagatgtctcaccgacaataccctaagaagagac

SEQ ID NO: 126945 - DNA, 136 bp, Glycine max
  Clone ID: PAT_MRT3847_85637C.1
aaaaattatcgtgtcaactcgcgttcacacattatccatgaatcctgtctcgcctactaccaggatactactgtattgctcatataattcacgatgtattgcacaacacgtgttagggataactcgaatcactcat

SEQ ID NO: 126946 - DNA, 345 bp, Glycine max
  Clone ID: PAT_MRT3847_85638C.1
gattctgaagttgaacggcggagaagaagatgttgtgcgcttgttcttccggggagcagttcaaattcgaagagccgccacactcgccggagtccctcgccaccagggatttctccgccagcggactctcttccaggaccggagaatgggaacctaaattcgatgatacgcaagttgaagaagctgaatctactcttaaagatgctctttccttaaactacgaggaggctacggctttgttggggaggcttgaataccagagagggaactttgatgctgcacttcaagtgtttcaaggtatggatatcacgggtttgaccccaagaatgatcaaggctattgctg

SEQ ID NO: 126947 - DNA, 372 bp, Glycine max
  Clone ID: PAT_MRT3847_85639C.1
gaattggttaattttttgtttttttttttatacccaacagtggtgatcaaacacatcaaatttctaccataatacaaaggcattcagcttttttagggggtacacagggagcagcaaattcttttatctaaaaggtttttaagtttcaagtactttggtggttttatcttcttaagggaccaccacctgttttttcttgacaattttttaaatttttggctcctgcgaaggagcatgcttgacatttgagggattctgaaaccccaagttttttaagctagcagggacatccttttgttgctgttgaaggggactccttaaaacttgaaattttggtggaagttggaccactttaacattaaatgttttttt

SEQ ID NO: 126948 - DNA, 1319 bp, Glycine max
  Clone ID: PAT_MRT3847_8563C.1
cacaaagccaccgcaacacaacagaagaatcctcaattctcattgtccctgttttttgtttggaggggaaaaaaagatattctttcttctttttgctgaaacccaataaagcgaaatcgcaaagggtgtcttggaaaagggtggtttcattaaaaagcagggatctttgggggggaaagagaagagaataggggcaagctttgttttggggcaatgggagatttggagaagcaagagagggtggaagaggatgcggaaggagagaaggagaggcttttggagggtatggcggttttggattttgacatgctttgttcctctgtggcgttgcaaagttcgcatgggagttgggggaagcttgggggtggggatggtgatgaggagcaacaaggtggggttttgaggatgtgggagggtgaacttctcgattgctttgatgatcgccgcatcgcttttgaatctgcatgttgtccttgttaccgatttgggaagaacatgaagctagctggttttggttcttgctacattcaggctatagtttattttcttcttgctattggtgcctttgttacttccattgcctatactatcacgaggactcactacttcctatacctagctgttgcattcatcattgctgttggagcatatttaggattctaccgaactcgtatgcgaaagaaattcaacatcaagggtagtgatagttcgttggatgatttcgtgtaccattttgtctgtccttgttgtacgttatgtcaggagtcaagaacacttgagatgaacaatgttcaaaacggaacatggcatggtcggggtgacacaatatgtataggtggatttagagatgaaagtaaagctctctgtgagttacgtcctccttctgttgtgtccatcatgcctaatgatgaaaattgcatggaaaagagcacagatgttagcaatggatcttgagtcaaggtagtggggaagctttgaaacaatggttcttcatgatctgaattctatccctagtgtctgcagtgcatatttcattccaagttctcatcgaatttctcggccaagagatcaatgtaatggcagctgcaacacaggttcatactaaggacaaaaattgttgtatgatgattccctctaggaaattaggaatgcttaattatgttgattttaaaaccattccggggggagatgttagcttgcaaatgtgcatgcagggtatgtcattctcaactagtggggtcttatttttaccaaacccctgcagtatagtttgattatatattgttggaagaatgccatcgtaattgtgtattataatg

SEQ ID NO: 126949 - DNA, 249 bp, Glycine max
  Clone ID: PAT_MRT3847_85640C.1
atccagagtgataagtgtctattttctcctacgatcagcgctctaccttaactttatcatagatactaattggcccacattcccaagagccattcaaggatattcatctccttcattcaaagatgaacgtgaatgtaagaaaggccaaactacaatgtctagtgtctacacatctatgagggccagattgtctctggaaccaaagattgcgagagatatgaaaacagtttggaaacggaacgaatttac

SEQ ID NO: 126950 - DNA, 523 bp, Glycine max
  Clone ID: PAT_MRT3847_85641C.1
gggaaggaaaatgatcccaacaatttttttgactaaaaaacagtttggctgaattaaaaaatgccgccctaaatgggccataaaaattccctcgaccaaaaggaacaaggatgggttctcttccccttcaatcttttaaaaacccaagcctttgaaattaaataaataaataaagctttttttcaaaactggggcttgttttataatttcaagcaatctcattttttagttgcagcccttgcagcactcaagtccaccgaaagatcaaaaacctttccagggatcttactggacagctcaaccacattttttactggggtttcaaagggggggggagcatcatagcttggagagatgaaacacccctcagcttcatgatcattggaggggtcaaacctggcataagggccataaaatatctcatctacagggccaaaaagggcaataccaggcttcaattccacctcagggttgtcagtctctgcttctgttgtaacaaaagcaatatattttcctttggctg

SEQ ID NO: 126951 - DNA, 417 bp, Glycine max
  Clone ID: PAT_MRT3847_85642C.1
atggacaacaccttgcagccacatttcttttatttacacttcgttttcgcgcagcctggtgcatgtttgcattctgtatgtggggaattcaactacacaaagtaaagggggggcgttatttttctatataatgaacctaatagatctgctccatgattatctggcaaactgttgcatcacatgatccttatccgcatagggcttcaagtgagagcttctttgcaattcccggacacgggtctcccccaaaaacttcaggagctacagtcaccaagcaagattgcttgccaatgcagttcttttgaggggcatcatatgatttgggagcatgacaacttccttttctaaaggttccacaagttccctggggcaatccataactagcaaatttaatctgaaagatgttttttccaaggg

SEQ ID NO: 126952 - DNA, 291 bp, Glycine max
  Clone ID: PAT_MRT3847_85643C.1
ctcattatagattgacataaactctttttttttatctggaaaatcgtcatttctttggatagacttggatgcctgggggcgaacaactttttcaatttgatccggataaacgaattgttattagattcatgatttgtcacatcacatcttcctacagcattctaaatcgcgctatttattcacaagaaactcatcacaattactttcttcgcctacaacatcttgatgggtctcatgagctgtctgcatagacaaacatattttttccactgctgtgttaatgtggaatgc

SEQ ID NO: 126953 - DNA, 741 bp, Glycine max
  Clone ID: PAT_MRT3847_85644C.1
gatttccttcctatccccttcacttttgtttccacagtacaagaatccaccattttttcttccttttcttctcttttaaactcactccgtctctctctctctctctcatgctccctcactcataaactcattcatggcaatggccacggttcacaagtggctcactcatttctacgacaccaaaaaatgcagcacatcctcgtacctcttggttccaaggaacagcaatccatgtacttcctccactatcatagaccccatcatagatgctacctttcaatgaacggttgcagagagggacaacaccaacatgcaagaacaaggaacaaccctgttgggaccatagaaaccagaaccttggcagcagttgcatcacctgcaatggctatgtacagcctcaacatggccatttcggagcttaaatcggatgctctgtttggtacctcttcgggcattgtaagggtgcaggttccaattgaagagcaagttgaagccattgattggctccattcgcagaaccatcttctgcttcctcgctgcttcttctttggaaggaaacagtgcagtagtccctgctgcattaatggtgaagaaaagttggtcagtgttgctgggggttggttcagctgttttcttttcccagccacatccattttcctactgggattggatatctataagaaggtttctttctgagagatgccctttaatccgtgcatatggagctatccgtttcaatgc

SEQ ID NO: 126954 - DNA, 825 bp, Glycine max
  Clone ID: PAT_MRT3847_85645C.1
gcctttttctgtagtatttattatcaatgaaggctcgagatcggattagaggaagagagagagagagaatggagaaaaaggaggaaaaggtggtggtgggcgtgccagtgccagtgtattacggtggagaaaatgaataccaaaggggaatcatccctcctaacgccgtgtttggagatccaaagggcatccccatccagcaaaccatttacagggacactcctgctcctttcaactgcccttactgcgctcataccgctctcactaccgtcagatcaaagcccagtctggcagcatttgttggatgcttgatgccaatgatgcttggagtttgctttctttgcccttcaatggattgcctttggcataaatatcactactgtcctaaatgtcaagaaaaggttgctgattttgagaaatcagatccctgtgttgtgatggatccaccacactggactcaggagagctttgcattgtctggataggatgataattctgttactgccatttggttttgcattttctatattgtttaagaattagctgtgacatgtgcatgggacaaacttactgctcttgaatttgatgtataagaattatctacttatacatgttttgttgcataactataataaactcttgttttgttaatagatattgtactttaaggagaattgcatacatccacaatctgctagctttattttggccttgataattggattgagttgtctgatgatgaggagatattcttcctctcatatttctaataaagcagtggcttttttatgaaaaaaaaaaaaaaaaaactcgagactagttctc

SEQ ID NO: 126955 - DNA, 205 bp, Glycine max
  unsure (1)..(205): unsure at all n locations
  Clone ID: PAT_MRT3847_85646C.1
cgtcctttttttttttttnnaagagaaacngtatttggcatgaaaatattacctgatacataggaccacaggatcactaacaaaacaacacggacaaatattatggcttacatgcaactcaaagaagccattgaacaacctaattttttgtctcctggtgaaggaattcacatttcttagaaggagctcacatatctcattagcc

SEQ ID NO: 126956 - DNA, 341 bp, Glycine max
  Clone ID: PAT_MRT3847_85647C.1
ggctcgaggattgtgagtttctaagtttaacatttgatgcactggaacaagtataggggatcggggagcattaaccgacgttgactagaacaacaccattaagagaagttatgagccacaaggctgctaagaatcatcatgatgatgaggatgctgataacgatatgacagtggcactaacacatcactctagcagggaaagaataactggaactgtctcgaagcacatcggccaatgtacgaacagtcacaaaatgcgcattatgtgcctgtcatacgaagaatgtcaaggtaccaggatgcagaagaatcagaacacctggagacaagtgatgtaatta

SEQ ID NO: 126957 - DNA, 776 bp, Glycine max
  Clone ID: PAT_MRT3847_85648C.1
ctcgagccgaatcggctcgagttggaacctagttaccaacctccggtaacatttgttgtggttcaaaagcgacatcacactagactcttctcaaacaatcatgacgacagaaatagcactgataagagtgggaatatcttacctggtattttttttttaacttctgtcattttctatcattagtgcatatcaccaaccaaaggatatctgtgaaaatctaagaggaaatatgcctagatagcttgtcaaagggtcatctcagaattgtagatttcaaagaataatgatactcaatactcatacaacaaattttcataataatttctacacattttttctttccatttcatcacctatcttatcacatacttccctctcttctcttcctatctctctcccttgtgtataatttgtcgaaaattttgaagtattaataacattacagtatttggaatacttagggaaggtaataacttatgtagaaattatttgtgtatcggttttcgagcttcaagacatgtgctggccctatctctatatattttgagcttaaggatttgaagcttagggtcactgatctactactactcaaagtctctttcgtagaaaattgtttcgttagggctcagagattccatcgcagattaagagaaggatatttaggcgatgtacagcagttccttgttcatgttccagtgcatgttgcgctcttataaatatgaccgtggttttagaggaaaatattatgtggatgttctagtgaactttgtcaacca

SEQ ID NO: 126958 - DNA, 752 bp, Glycine max
  Clone ID: PAT_MRT3847_85649C.1
gcaatggatgcattaaccttaagctcaagtgtgaacatttccaaaccatttcatttccttacactctcaaagaaacagcaaagagaaagacatcctcgtacgcagtttggtgtttcatgcagaggcagaaaagagcttggaggaggtgtggaggacaacttgtacaaggtactaagtttgagtcccaaaagtgcaaccacggatgacataaagaaagcatacagatcaatggcgcttcggtaccaccctgatgtgtgccaggattgttccaagaaggaggaatcaacgaggatgtttgtgcaactcaacgcagcttaccagaccttatcgaatcctaggcttcgagcagagtatgactgtgaattgggtttgagaagtgaaaagatcggtgttggtgatgagacttggagatatatatggcagaatcaacttgctgagttgaagagaaggtctcacatacgtatggcacaaaaccaaggatcatggggcagtagaatcagaccgcaaaacatcaattgaaattagatatttatcccaattacttttctttccgtatcggatcattacctgttaatatgttatgtaatatatatgttgttgagttttttaatttacaaaaaaaaatgagtaaaaaaaaaatgagaactcttcagaggcaatatagatatcctgatattcccaattgatgattgaaattgtgggaagctactttcgggtccccctgaataaaaaaacagggggggcccccaatt

SEQ ID NO: 126959 - DNA, 1387 bp, Glycine max
  Clone ID: PAT_MRT3847_8564C.1
accacgcgtacgagccaacacatcagaagaatcctcaattctcatttctcactgtcctttgttatttttttttttagagaaaaaaagaagttattctttcttctttttgctgaaaccccataaagcgaaatcgtaaagggtgtccttggaaaaggagtgtttcattaaaaagcagggatctttcgggagaaagataagagaaaggggtaagctttgttttggggcaatgggggatttggagaagcaggagagggtgggagagaatgagaggcttttggagggtatgcctgttttagattttgacatgctttgttcctctgtggcgttgcaaagtgcacatgggagttggggaaagcttgggggtggggatgaggaacaacaaggtggggttttgaggatgtgggagggtgaactcctcgattgctttgatgatcgccgcatcgcttttgaatctgcgttttgtccttgctaccgatttgggaagaacatgaagctagctggttttggttcttgctacattcaggctatagtttattttctccttgctatcggtgcctttgttactttcattgcctatactatcacgaggactcactacttcctatacccagcagttgcactcatcattgttgttggagcatatctaggattctaccgaactcgtatgcgaaagaaattcaacatcaagggtagtgatagttcgttggacgattgcatttaccattttgtctgtccttgttgtacattatgtcaggagtcaagaacacttgagattaacaatgttcaaaacggcacatggcatggtcggggtgacataatatgtataggtgacattagagaaaataaagctctctatgagttacgtcctccttctattgtgtccatcaagtctactgatgaaaattgcatggaaaagagcacagatgttagcaatggatcttgagtcaaggtagtgggaaagctttgaaacaatggctcttcatcttctgaattctatccctagtatctgcagtgcatatttcattccaagctctcatcaagtttcatggctaagagatgaatgtaatggaggctggaacacaggttcagactaggacaaggtgataatagtcacggggacacaagccgttgtgtgatgatgatccctctaggaaataggaatgcttaactatgttaattgtaaaattattccgggggaagatgttagtgtgttagtttgcaaatgtgcatgcagggtatgccattctcaactagcggggtcttatttttacgaaacccctgtagtatagtttgattatagtgtgggaagaatgccatcgtaattgtgtattatagtgaaccgtgctctttcatcaaactttaatcgacttttattgagatattacaa

SEQ ID NO: 126960 - DNA, 349 bp, Glycine max
  Clone ID: PAT_MRT3847_85650C.1
tttagatagagattggagcaaagtttgatgaggaccgttattcaatgcttgcggagtgtgatataattgttatcaacatgcctcttactgaacatacaataggattgtttgactaatacataatttctaatttctttaattgatttttgatttctttacatttctcttttgtatttctttttctattatatttttattaattttgttatattttttattattctttatttttatttatatttttattattatttttttttttttttttttattatttttttttttttttattttttttttattatttatttttttttttttttttttatttttttttttatttttatta

SEQ ID NO: 126961 - DNA, 399 bp, Glycine max
  Clone ID: PAT_MRT3847_85651C.1
cttcccgggttcacgtttcacaatcactttttgcgcttctctcactcactcactctccttgttcctcttcgtgtggctttctttgtcgaactcgaacgaagaggcgcgagattcttcacatccagagagggcaatgcgggaaccagatcggagccaagtttttgaaggaggtgtgcgcggagcaacgtttcgattaaacggtgaggtaccaatggaacaaccagttgcaactcgagcgagtgggggtggtctacaatgaatcgaagtgcagaaggtttttacctatatctttgctcatggatctggagccagggaccatggacagcctcttatctgtgccctactgggagatgttgcgggcagaaaactttttcttttagacattccggtgccggaaac

SEQ ID NO: 126962 - DNA, 310 bp, Glycine max
  Clone ID: PAT_MRT3847_85652C.1
atctgccatcttttagtcgactatatataatatcttttttaatgtcaatcacccaaaattgctgaatcgtaagtggacaccagcgttactcttcatataccagaacaaattgactacataatgtgtatgcccatgtcgatcttgataatagtcacttattatctgcctactacttctaaccttaattcgtccactactcatgcacaaaatacgacttctttatagctttccccttcttcctgtctagttaggcttagtatgatgacacgtaacagctgtcacagttctgctaataaacccatgtacaaat

SEQ ID NO: 126963 - DNA, 747 bp, Glycine max
  unsure (1)..(747): unsure at all n locations
  Clone ID: PAT_MRT3847_85653C.1
ccacgcgtccggtgaatgttcatatgagatgagatgataacaaaataagaattagggtttttctttgtgcacccagcacaacagcataattttaaatttcccttttcttaaagttgataatgtattggatttacggattagtcattccataagtagtttaaatgatttttttataatcattgattataatttattattaagtataatattttttatcactcatatttttatttttagtattttttgaaattgaataaatatttgaatcaatatcgtgtttatatttaaaagttcttacataaattatctttctctttttctttcattattttttcttttttccttgcaaaaatcgcttgtttttttcttcttcttcattttagttatgttattataagttttaattattattatttttcaggttttttatatattttatatatttttttataactatttgtattagaaatcttattttgatattatatctgttcaacaaaccataaagagattctattattttttaatttttttaataaatcatattttgaataactccattacaaatttttatttttcctattcaaatcaattgtcgaatgataatttaactatgatttggctaatttattttgttttaatacatgttattagcaaaaatagnttaataattatcgttaacgcgatcaatttataataaatattttagttttgaaattatgctaaaaaattcaataattatttaaa

SEQ ID NO: 126964 - DNA, 571 bp, Glycine max
  unsure (1)..(571): unsure at all n locations
  Clone ID: PAT_MRT3847_85654C.1
cccacgcgtccgcccacggtgaggcaaaaaaggtcctcaaaaaaatgaaaatgacaagaaagaaggagaggagacgttgatgatggagaagttgagaagagtggtaaacgagatagcctatgctcaaacactctctcaccttcctcctcttcaccgctctctcgtccctttcctctccattgcctcatctctctacaaactcgctgtctcgcttcgctgctcactttaccaacgccgcttctttcaactccaccggttgccggttccggtgatcagcgttggtaatttgagttggggaggcaatgggaagacgccgatggtggagttcatcgctctctgcttttgtcattacggaatttcacccctcgttctttctaggggttatggtggtggggatgaagtcaacatgcttcggaggcatttacttgggacaccaactaagtttggtgttggtgccaatcgagctgctgttgcaagtcgttntatccaaaaatatggctacgttgatattggttagagttcatggcatgagaaacagtaccttgatgagaaagtccaggattctgttgat

SEQ ID NO: 126965 - DNA, 204 bp, Glycine max
  unsure (1)..(204): unsure at all n locations
  Clone ID: PAT_MRT3847_85655C.1
acaangaaagnacaangcaccaagcgggcctangcacaaccnnaggcgananacanggnnaacggagannaaagacaccncnaaagaaggananagccnngaagagaaangcancaagaaagaagcgcnngagggagaagagaacgcncgngcaaaaaccccgggaacacgaannggcgnngccacnncaaagcggggaaagaa

SEQ ID NO: 126966 - DNA, 275 bp, Glycine max
  Clone ID: PAT_MRT3847_85656C.1
tttttttttttttttttttttttttttttgggggggggttttttttttctatttctttttttttttttcattctctaaaaaatttgtctctagagaaattaaataacctctataaatacaacaaaacaaacactctactcttattaccctggggggctcagattccgttccaaatgtaaacaccaaaggaccgatgaacatcctctgtacggaccataatattaaacattagaaacaacacacatttatataacttccccctctacccttttatc

SEQ ID NO: 126967 - DNA, 754 bp, Glycine max
  unsure (1)..(754): unsure at all n locations
  Clone ID: PAT_MRT3847_85657C.1
tccgggactagttctagaacgctcaccattgtggcttgtctaggtcttcaatcgaactcgccaggaacggaactttctcagattgacacacaccatgaaggaaagtggtttcgagaataatgatacaaagcaagctgctgctgatgtgttgtttctatattcaaaatttgcaatggcatgcattggatgtaaggctcgtccatgtgatttgaggtttcatttgatgaaggagatttcaggtatgccctcttctctaaatagggagtcaccacagaatgcagcatctcctgatgcaatgggtgagtcatccagcacaggaacagcaagacttgatagaacagacagttttcgtgcactctagttgagagtggactgtgaccatgtttttggttggggctgtggcatagtaggtgtttgtgtcttggtaaaagcacttttttcctgcatattatcatattatgatgctatgcaggcagaattatgtttccaattaccatctatgcaatggctcacagattggtatttgttataccagtcagtcagtcatttcattttaaatttgttgtagtgtggttcaaatttggttcgtttcagtaagtaaatgttgctcttaatccttctacctggctcgagtataattacctctcataaaggatgtatgtagtattgtagtcttgtaccaaaaaaaaatcagtaaataaatgcatgtgttcaatgttttttttttgcgctctgtnaaaaaaaaaaaaaaaaa

SEQ ID NO: 126968 - DNA, 1900 bp, Glycine max
  Clone ID: PAT_MRT3847_85658C.1
cgctttaaatttaattaagggtccctagtggaagcaagcaagcaacaagataagaaagcaaagaaggagagagagaggatgacaccacatcctctgttttctttcattcccattcttagttttccctgccattcaaattttcacatgacctctcattattattctttttattattattagttcttttttgtttccatcaccaaccaacctctcatctttggatggtgaattccccatctgagttcctttgatctcttcgccttctctcaatttcttcttctctgatcccagcaaagaaaagaaaaaaaaaacaaactaaaaaaaacattagaaacaattgttttttttaaaaaaaaacatagctgcttggttttccctctttgctggattagatattttggttcagttttttttattgatgcttcaaagatccgattctcttagagatcgaatttggcataacccacttcgtatctgattgaagcaccaactgggttctgtctgagattcaacataagaactgatggaatcggatcttggcaagctcttcattgggggaatttcctgggacaccgatgacgaacgtctcaaggaatattttgggaaatatggagaggtgatagaggcagtgatcatgagagatcggacaacaggccgtgctcgtggcttcggatttgttgtctttgctgatccttctgctgcggagagagtcattatggataagcacataattgatggccgcacagttgaagccaagaaagctgttcctagggatgatcagcaaactataaacagacagactggtagcatccatggatctcctagtcctggacgcaccaaaaagatttttgttggaggtttaccatcaacaatcacagagagtgattttaagaagtactttgatcagtttggtacaattactgatgttgttgtaatgtatgaccacaatacccagaggccaagaggttttggcttcatcacttatgattctgaagaagctgtggacagagttctttataagacatttcatgaactcaatgggaagatggttgaggtcaagagggcagttcctaaagagctttcccctggacctacccgaagcccattgataggatataactatggtttgaataggaccagtagcttcctaaatagttatgctcagggtttcaatatgaatccaattggaggttatggagtcaggatggatggaaggtttagtccacttactagtgctagaagtgggtttaccccatttggctccagtggttatggaatgggagtgaatttggatttaggattgaacccaagctatggagggacttccggttatggtggcaatcttggatacggtcggatgagtcctttcaacgatggcaactctaacagatacaccactcctattggcaatagcgggggcaatgggagaagcggttctcttatgaactcagcttctcggagtgtttggggaaatgggggcctgaacaatgctgtcaatagtccagtcagccctggcgcttacttgggatctggaagtgggacttttggtgtttcaattggaaatgctggcaccaattggggtccatcagttccaacccagggtggaggggctgcctctgggtatagtacttggggctcttatgaaggtggagataacagcattggtttaggaggtggagggtatggaaggaacagcagcccaagtgtgcctcaatcctcaacatttactgcaccaactggtgattatgaaggatcctatggggacttgtaccgcagtggttcagtttacagtgactcaactttgcggtctgctgcttctgagatagatgcttctggttcgtttggttatggtggacttggtggtatagcttcagatgatctagttaagagttctgagggt

SEQ ID NO: 126969 - DNA, 253 bp, Glycine max
  Clone ID: PAT_MRT3847_85659C.1
ggcagaaatagttttaatttttttaggcagggtttcttatttaaaattggccgacctttttccagaggggcccatttcccaacctttaaaaaaaaaaaaaggaggcaccctggggcttaccccccccttcaaagggccaaaaccctggacctggcggaagggaaggacaggaccccttttttctaaggaggtgggtttaacacaaaaccccggggggcccgaaacccttcccagacttattccttaggttttg

SEQ ID NO: 126970 - DNA, 383 bp, Glycine max
  unsure (1)..(383): unsure at all n locations
  Clone ID: PAT_MRT3847_8565C.1
agaaacagcgtgctcctatctgatactcaaaaaccaggattaangttttcggcacgcttccgaatgctaggaattcgtttcgaggagagaccctcttgcacatttgagttttcctcctgggtttaggttttaccccacaggtgatgatcttttggttcagtacctttgccgcaatgtttttggccctcatttctctctttcaatcattgctgaaattgatttttacaagtttgttccatcccctcttccatttaaggccgcgtttggggggaaggagtgctatttttaaaggccaagattcaggatttacccttttgttttacgcccaaacagtcaacgtgatttctgttttttgtaaagacccctgatatcagacttttatt

SEQ ID NO: 126971 - DNA, 1366 bp, Glycine max
  unsure (1)..(1366): unsure at all n locations
  Clone ID: PAT_MRT3847_85660C.1
ctgctccaggattttttttttgttatctcttcttccacaaactttcggagttttctttcgttaattaataaaatctttgcttaagcaatagatatccatatatctatatattgtcatctcttcttccaccaaactttcggagttttctttggttaattagtaaaaaattgcttaattaatttgtccttccagaggatcgaatgagatagaaagggtactggaggggcaattaattaattaatctctagtgagtatatatataaatatggagagcctggaagaaagagtgtttatgttgatgaatgaacaatattattattccaattccaatgtatcagatcagctgcatatgcatcatcatcgctctgtgtctgtggagaatctaaacctatggtgggaaaacaacaccgactccgatgactcagccgagcgaattttgtattgggaatctcagatctcactgcttcaggaaattttggagcggtaccatttaagtgggtcaaaattgagacttgaggttggtcgaatcattaaagaggtcaaagcttctgatttttgcagctgcttgaaggctaactcttcggattgcatcacctgtttgagaagacgagtggttgacgggctctgcgaaagaggattcagtaccaacctttgcatttcaaaatggagaacaactaaaaaatttccaggaggctgtcacgaatacattgaggtgattgcaaacacatcaactaggaagaagattcattttctggtggaattggagttgagggagcagtttcagattgcaaaagcaagtgaaaattaccggaaactagtgtcctgtttgcccgaattttatattggaaaactggagtacttaactgccattgttcgagtaatgtgcaatgctgcaaagaaatcaatgaaggaaaagaaaatgcacgtgggtccgtggaggaagagcagcttcatgcaaatgaagtggtcaggattcaatcaaatatgcaattctaataaatccttgggttcagttgcaacatatccccatgcacaagcaagtgaatcttacttcagaatttcaggagctcctacacctttggtagtcacctgaaaatgaccagaaaatttcaacactaaattttgaacttaggcctatttagtagtaggagttgatgagcaatatatcagaattcgaaattcagtgtcctttactttaggtccaaggttatgatgtaatatatttgcccagcattagagtatatcatatattgtttgcagtaatttttaaattgtaaatgtccttgttgaatatatatatatatatataaaggaacgtactgagattccttttacaatcnnntgcatgatatatctcaacctccac

SEQ ID NO: 126972 - DNA, 443 bp, Glycine max
  Clone ID: PAT_MRT3847_85661C.1
attgtcatctcttcttccaccaaactttcggagttttctttggttaattagtaaaaaatggcttaattaatttgtccttccagaggatcgaatgagatagaaagggtactggaggggcaattaattaattaatctctagtgagtatatatataaatatggagagcctggaagaaagagtgtttatgttgatgaatgaacaatattattattccaattccaatgtatcagatcagctgcatatgcatcatcatcgctctgtgtctgtggagaatctaaacctatggtgggaaaacaacaccgactccgatgactcagccgagcgaattttgtattgggaatctcagatctcactgcttcagctgcttgaaggctaactcttcggattgcatcacctgtttgagaagacgagtggttgacgggctctgcgaaagaggattcagta

SEQ ID NO: 126973 - DNA, 992 bp, Glycine max
  Clone ID: PAT_MRT3847_85662C.1
agagcatatatatatatatatatattgtcatctcttcttccccaaactttcggagttttctttggttaattagtaaaaaattgcttaattaatttgtccttccagaggatcgaatgagatagaaagggtactggaggggcaattaattaattaatctctagtgagtatatatataaatatggagagcctggaagaaagagtgtttatgttgatgaatgaacaatattattattccaattccaatgtatcagatcagctgcatatgcatcatcatcgctctgtgtctgtggagaatctaaacctatggtgggaaaacaacaccgactccgatgactcagccgagcgaattttgtattgggaatctcagatctcactgcttcaggaaattttggagcggtaccatttaagtgggtcaaaattgagacttgaggttggtcgaatcattaaagaggtcaaagcttctgatttttgcagctgcttgaaggctaactcttcggattgcatcacctgtttgagaagacgagtggttgacgggctctgcgaaagaggattcagtaccaacctttgcatttcaaaatggagaacaactaaaaaatttccaggaggtgcgatgcacacacatttatattcaccaacaagcctaacattatataaatgtaccaaaacttaataatgttgttttgaaacaaagcctagctaatttcatatattatatatgttttaggctgtcacgaatacattgaggtgattgcaaacacatcaactaggaagaagattcattttctggtggaattggagttgagggagcagtttcagattgcaaaagcaagtgaaaattaccggaaactagtgtcctgtttgcccgaatttatattggaaaactggagtacttaactgccattgttcgagtaatgtgcaatgctgcaaagaaatcaatgaaggaaaagaaaatgcacgtgggtccgtggaggaagagcagcttcatgcaaatg

SEQ ID NO: 126974 - DNA, 300 bp, Glycine max
  Clone ID: PAT_MRT3847_85663C.1
tttattttttcgctttgaagagctgaatgcatgtgcctataatgccactcactgattgctgaacaaaactgcaaccggtagcttgtacactgagacgatagagagatcctttcttgtaattcgtcttgctcggacacctaatatgggatggaatagctggaacgacttatgctgggatactgatgaaagaaaaggttgggcaacatatgaggcagtggagctatttgtccgtgctgctaagggatacacatcgggagtttagacgatcgttgtgccgcactgtgattataccataaggga

SEQ ID NO: 126975 - DNA, 509 bp, Glycine max
  Clone ID: PAT_MRT3847_85664C.1
ttattgatcccaagtaacttgagttctatagacagttttgatattacggctagtttggcatcaaatgtagtgggatcagattcagagccagagaacaccaattttctggaacctgctttcttttcagaccttcctatttattatctacagaatcagtgcacacagaactctacattctccgtttctcttcagatagcaggcattagcaagcagcaagaggtaatatgtgctcagggtttacgtttatggcgtaatagttcttctgaggtgaacaatgagctatataaaggttatcggagaagtaacacagagagacagatcaatgagatagctgcaggttatgattttttaaattcaaatcggagtatatttaatgtcagcatatggtacaactcaacctacaaaaatgacactggctctaatcaaattgcattggcgcgtattcctcgttctgtaaatttggtatcaaatgcctaccttcagtttctattgggaccctggtccaaatg

SEQ ID NO: 126976 - DNA, 239 bp, Glycine max
  Clone ID: PAT_MRT3847_85665C.1
ctcggggggttttttccgggggggaatatatttggaaaaccaggggattgggatggattttggaaggtggggcctggaccatccaattttttccttttaaaaaatgggcctttgttttggagtttggggctaattgacagcgttgttttcatgccctttattgtgcgtttgccctgttcttttgttcctttgccctccaagttgaatacttttgggaagggtttattttttttttatcc

SEQ ID NO: 126977 - DNA, 1205 bp, Glycine max
  Clone ID: PAT_MRT3847_85666C.1
cccacgcgtccgtacggctgcgagaagacgacagaaggggatacgcagattgtggttagtattgacaaaagtaaaatggataatgaagaaaaagagtgttgattttgtgagagatgatgagttatgcaataggagcacttgttgttccgtctccaactcccctaccttttttgaattccactgctccagtggaagtggaacatggtcatggtcttggggtgaagcccattcaagatgggtataagtggcgcttcgttttggcttatgatggaaccaaatacgcaggctggcaatatcagcagtctccccctactgtacaatgcaccgtggagaaagctttaactcaagcaacaaagcttcaaaggaaggatctctgtttggttggtgcaagcaggaccgatgcaggagtccatgcttggggtcaggttgctcatttttttacaccttttaactatgacaacttggaacaacttcatgcagctttgaacggtcttcttcctactgatatccgaattagagagatcagccctgcatcagctgaattccatgctcgattttctgccaaaacgctgttatgagagaagctgcaacatattttgttggcaagcatgatttctctgcctttgccaatgcatcccacaatgatcgggtaccagatccagtgaagcatgtattccgattcgatttgaaagaaatgggagctcttttgcaactagaagttgaaggctcaggttttttatataggcaagtccgaaacatggtggctttgttgcttcagattggtagggaagctatccctcctgacattgtaccacatattctggcgagtcgagatcgcaaagagcttgcaaaatactccttgcctgcccctccacatggtctttgtcttgtttctatcaactataatgaaagtcacctattgcctccgccggagtccccccctgcaaacagttttggtagacatcagaccataaggaaatgcaaggttccattctttttgtaataataggcagcaaaacaaacaatctaactatcttttggactgtttttttttttacatttagattttaaggttgtttaaacttcaaagatttcatttgattgaagtactctatttgtttaattcaaatagatgctcgaggatgcgggatttgatgatgtcattgccgaggatcgaactgatcagtttgtgaacacgctacagc

SEQ ID NO: 126978 - DNA, 419 bp, Glycine max
  Clone ID: PAT_MRT3847_85667C.1
agaaaaaaatcaaaaaaaaaaaaaaaaaaaaaaaaaaaaaaaaaaaaaaaaaaaaaaaaaaaaaaaaaaaaaaaaaaaaaaaaaaaaaaaaaaaaaaaaaaaaaaaaaaaaaaaaaaaaccaaattcccggggggccccccaaaaggttcaaacctaacttacccttccaggcaagttcaaacccctccaaaagggcccccaaatttcaatccacggcccttcgtttaaaaacttcgtaacgggaaaaccccggggttaaccaaactaaacccccttgcacaaaacccccttttcccaaccgggcttaaaaccaaaaaggcccgaaccattcccccttccaaaaattgccccaccctaaaggccaaatggaaccccccttgtacggcccataaaccccgcgggttttggggttaacccc

SEQ ID NO: 126979 - DNA, 350 bp, Glycine max
  Clone ID: PAT_MRT3847_85668C.1
aaaagactggaaggaatgcaattgtgagcctgagtcctaccaagacacccaattagatacaattgcttgatggttttgatgaagaaattgtcttgggtgaattttctttagggagacctccatgaaagggttgcggggtggggagtggggttcagtagtggagagacgcaggcgctgtatcatatcttgtgtcaactgtagccataattcagaataatgtattatgaaataagatttaacttttgtacgccaaacatgaaatttgactttttaactcccttctcgtcaaaaaaaaaaaaaaaaaaaaaaaaaaaaaaaaaaaaaaaaaaaaaaaaaaaaaaaaaaaaaaa

SEQ ID NO: 126980 - DNA, 960 bp, Glycine max
  Clone ID: PAT_MRT3847_85669C.1
agacgacagaagggggaagagaaaagaaaagaatcgagtgattttcgtttgcgttgctgttgcgactgagtgagtgaagatggcgtgcttgcacgaccacagttgcgaagaccatgactgttcctctaactggtctctctacaaacacatcgacctctccaaggtaactgctttgaatgaggcaaatccaggaagtgttaagtcagttttcaaagcttgggaagagcgtctggattcttctggggttcacttggaaagcaatgagggtgatcctgagttacttgtcttcattccatttacttcagatgtcaagattaagagcatatccatagttggtggagctgatggaacaagtccttccaagatgagagtgttcatcaatcgagaaggaattgacttttcagatgcgcaaagcatgcaggctattcaggaatgggatttggttgagaatatgcaaggagtattggaataccagacaagatattctaaatttcaaagcgtggcaaatattaccttgcactttcctgagaattttggtggtgacactactaaaatacactatattggctttaaaggcgaagccactcagttgaaaagggatgttgttgccactattgtttatgagcttatgccaaatccttctgaccacaagacacgtgctgaaagtggagggggtctttctcacatagaatgaaatagttacatttactgatgttacttagttacttaataaccatcgctacccaatctcgttctccttgtttccaccctccctagacaaaaaagtacagctggacgtggataactacaatatcgtgcaatgaaatatttagtcctgaagtctacgtaaaaattattgcatgtgaaattttgtggctatatactgtttatctggatgatgatgaatatgacaatcttaatatattttatagaacaaatgaaaaactaatcattatgacc

SEQ ID NO: 126981 - DNA, 1096 bp, Glycine max
  Clone ID: PAT_MRT3847_8566C.1
atttttctgtttattttacggggaatgtgtacgataatttaagtagtgaggtgaagcaaggtaatgaagttcaaaatgatggctcaaatgccttaggtaattatgtgcaatatcacgagggtcaaggttatgatggatctttagaaagccacacaaacaggcaaggtgatgggttaaatgcttcagctaatcatgtacagtatcaagaaggtgaaacttatgttgcatcttcagaagaacacacaaatggacaggatctgagtagtagtcagtattgggaggatctttatcctggctggaagtatgactacaaaaccgggcaatggtatcaaatagatggctatagagcaacagccactactcagcaaagctctgaagccaatatagctgtggctcgaggtgctgcttctgatgggaaaacagagatctcttacatgcagcaaactgctcaatctgttgcaggaactttagctgaatccggcacaactaaaaatgtatctagctggagtcaggtttcagaagggaataatgggtatccagggcatatgatttttgatcctcagtatcctggttggtattatgacacaattgcccaagaatggcgttcattggaaacttacaattcaaccatccagtcttctagtcttggacttgaaaatgggcatgcttctgccaatactttctcgcccaatgataatagtttgtatagcgaatacagccaaactgataattatggactacagggcattgataatcaggctgtagatggcagctggagtggtttgtatggcactaaccataagcagggttttgacatgtacacaactgggtctgtcactactcgaggggatagtataacttctggtggcaaccaacagattaatcattcttatggttcaagtatttctgtgaacgaacatcaacaaaatacttctagctcttttggatccgttgcattgtacaatagagtaaaccatgatcgtggcttggctaatggaacttttgaaccacaaagctttggccctactggggacactgctcaacagcttaattattcaaccacaaagcttagtgaacaaaaagttgtttcaaatga

SEQ ID NO: 126982 - DNA, 674 bp, Glycine max
  Clone ID: PAT_MRT3847_85670C.1
gcggaggccggagaaggggggcccgctcccattttcgctctcttccctctccctctgctgcgccgaaaaccgatacgacaccgctcgccattgaatcttccacgacacgattcgattattgtcgatgacgtgttttgattggtaaagtacgcgcggcgaaacgaggcatggcgaaagtggctaaaccaagttctgtgccctcgagctctcaccaacttggctccggacctttgaaaactggatctatggctagaaagaagacaccgtcagaacttaggactcggcgattaaggtcattctatgatgttgataatagcccagaatctttgctggcttttagtggcaacaacaatgtacatgctttatatgactttttactaaattacagttttgtgacggaacctagctcaattggcttgaatgttgccttaaaatcaacttgtgaaaagccagaatctaaagctgctggtagtgaaagcttacaagaccacggaagtacttttggcattccagaagctgtagtcacttctcgactgtgttcatgttcattaaaaggcgtaagtacgttgtctggcatgcgtacttgttgaaggtgatatatggcctaaacaattatcagaaattaatctgatttcaaggcagtttttctgagctgatctgaatgggaactgatg

SEQ ID NO: 126983 - DNA, 735 bp, Glycine max
  Clone ID: PAT_MRT3847_85671C.1
ctttcaaatcccttccaacccccaatctgatctcctcaccacaaaacatatatacacaaagagtatagaaaacctccaattaatcccatggcttctttacaaaccacatctatattctcctcttcatccttttcttcttctctaagaaaagtcaacgcttctatccatgtccctaaccctccacgagtgacttattcggttccaaaagcaccaacaagaaagttgcaggttgaggaattaattaatggatcagtagattcaaccccattagagaagaatgccttcaccacacacatatatgaaggtttattcagccctagcaagaagtctaatatggccactgttcaactctattcgattctggaggcagtagctgacagaattgaaatgcacaaaaacatttgcgaacaaagaaacaactggaacacccttcttctaaattccatcaacatgatcactctcactgccacggccatggccggtgttgctgcagccaccagtggtgacactacaccgcttttggcccttaaactatcatccgctctcttgttttctgcggccactggaatgtcacttatcatgaaccaaattcagccctcacaactcactgaggagcaacgcaatgctacaaggttgtttaaacagcttcatacccaaatccaaaacataatcgctcttggaaatccaaccgaaaaagatgtgaagggttcgatggagaaggtgttggcacttgat

SEQ ID NO: 126984 - DNA, 2042 bp, Glycine max
  Clone ID: PAT_MRT3847_85672C.1
cactcttaattgaactcagcatttcacttggacaccattcacacaatcattctctatctcttgggagctgcttatggtatttttaaaattaatataatttaatgaaattaacgcgtaaaaataaatttatttccatgacagagacggtaggtggagatttttatataagcagaccattattatccctctccatccatgcgccttttccctctctcactgtttttataagtttgattgccaaatcaatatccatggcttcggaggacagaaacgaagaagagcttcacgttctattggtggcattctctgcccaaggtcacatcaaccctttgcttaggcttggcaaaaaactactaagcagaggcctccacgtcaccctcgccaccaccgaattagtttaccaccgcgtcttcaagtcctccgccgccacccccaccgccaccgtccccacttcaatcaccaccaacggaatccaagtgctattcttctccgacggcttcggaaccggcctagacaacaagaccatcacccccgaccaatacatggaactcataggaaaatttggtcccatcagcctctccaacatcatcaaagaccacttcctcaacggttcccaaaaactcgtttgcatcatcaacaacccctttgtcccatgggttgcagatgtagctgccaacttcaacatcccatgcgcatgtctctggatccaaccctgtgctctctacgccatatactaccgtttctacaacaaccttaacacgttccccactctggaggacccttcaatgaatgtcgagttaccaggtcttcccttactacaaccccaagaccttccttctttcgttctcccatcaaacccccatggaagtattcccaaggtgctgtcttcgatgttccaacacatgaagaagctgaagtgggtactcgcgaactcgtttcacgaactggagaaagaggtaatagactccatggctgagttatgccccataacaacggtgggcccactagtccctccatcgttactcggccaagacgaaaacatcgaaggagacgtgggaatcgaaatgtggaagccacaggactcgtgcatggagtggctaaaccagcaacctccttcttcggttatctacgtttcctttgggagcattattgtgcttaccgctaaacaattggagagcatagcgagggctcttaggaacagtgaaaaaccttttctttgggtggttaagcgtcgagatggagaagaagcgcttccacttccagaagggtttgttgaagagaccaaagagaagggcatggtggtgccgtggtgcccgcaaacgaaggtgctgagtcacccttcggtggcgtgtttcttaacgcactgtggttggaattcgatgctggaagcaatcactgcgggcacgcccatgattgcttggccgcaatggaccgaccaacccaccaacgcgaaactgatttcggatgtgtttcgtttggggattcggctcgcgcaggagagtgatgggttcgttgcgacggaggaaatggaaagggcttttgagcggattttctcggcgggggactttaagagaaaggcgtcggagctaaaacgggcggcgagagaagcggtggctcagggtggctcgtcggagcagaatatccaatgcttcgtggatgaaattatagggacaaagtctacttgatggttggaccaggaccagatacagctttggtaacttcttgtcggtattggagattaagattctgctagagtttggagttttatgatcattatatttatcgccttcttccaaaaaaagttgtggttattatttttaattcctagttttgtgcttactatgattcggtgattacataattatagaacaagaacaagggtcacaggactttgtggatatgtcatgtgtgtaaccaaagactttcttttaatgtcaatattagaatagttgagattttgactctcaaatctcaagtcttgacaattttgtcattaaaaaagtttttcattaagttaaagaaagagtgttttaaaaaaaaat

SEQ ID NO: 126985 - DNA, 2339 bp, Glycine max
  Clone ID: PAT_MRT3847_85673C.1
cttgcgtccgtgcatgttgcccgcccgacctggcgaccttccacacagaaaccgtgcaatcagggttggccttgagcagactccacatcctattccactcggtggcactcttgtttctctattactaccgcataagccacatcttactggaaccaagctttgtatggattttcatgaccatagcggagcttatcttcggcgagctctggctcttcaaacaggcgttccggtggcggcccgtgtcgagggccgtcatgccggagaagctgccgagcgacggcaagcttccggcgctcgacatcttcgtctgcacggttgaccccgaaaaggagccgacggtgcaggtgatggacaccgtcatctccgccattgccatggactacccctccaacaagctcgccgtgtacctttccgacgatggcgggtgtccggtgactctgtatgggatcagagaggcttctcggttcgcaaaggagtgggttccgttctgcagaaagtatgggatcaattcacggtgccccaaggccttcttctctcccatgggggaggatgaacgtgaactgcttcttcttcgcaaccatgaattcttggcagagcaagaacaactcaaggctaaatacaatataatgcaaaaaaatattgacgaatttggaagagaccctaaaaatcgttccattgtgtttgatagaccagctcgcattgagattataaatgagcaatccgaaataccactggttgtttatgtgtctcgtgaaagaaggccaaatgttcctcatacatacaaagggggagccctcaacacattgctcagagtctcagggctattcagtaacgggccctatgtacttgtagttgattgtgatatgtattgcaatgatccatcatcagctaaacaagccatgtgcttttttcttgatcctgaaacctccaaagatattgcttttgtccaattccctcaaatgtttcacaaccttagcatgaaagacatctacgatagtcaacataggcatgcttttacaacaatgtggcaaggaatggatggactaagaggtccaggtctttctggtagtggcaattacttaagtagaagtgcattaatctttccaagcccatatgaaaaagacggctatgaacataatgcccaaaacaaatttggcaactctaccatgtacattgaatcattaaaggccattcaaggacaacaaacttataaaacgagcatttcaagaaatgtgattttacaggaagcagaagcagtggcctcttgttcctatgaaatagacacaaattggggtaatgaggtaggattctcatatgttatattactggagagtacagttactggctatcttcttcactgtagaggatggagatcaacttacctttaccccaaaagaccttgtttcttgggatgtgcccccactgacttcatggaaggcatgcttcagttggtgaaatggagttctgaacttttcttgctaggaatatccaaatacagccctttcacttatgggatttcaagaattcctattctgcacaactttaccttttgctacttcacatctacatgtcaatatattgttgccttaatagtatatggcatcattcctcaagtatgcttcttgaaaggaactcctgtgtttcctaaggttacagaaccatggtttgtagtttttgcaatattatatgtatcctctcaaagtcaacatttgattgaagtcctttatggtggtggctctttgggaacatggtgggatgaacaaagaatatggattgtaaagtcaattgttggaggcatatttggatctatactagcaatcaagaaacgttttgggttaaacaaagcaaaattcattttatcaaataaagttgttgccaaagagaagtttgagaaatatgaacaaggtaagttcgagttcgaaggtgcagctttgttcatgtctccattggttggattactcatagtgaatattctttgcttctttggtggtttatggagactatttaatgtgaaagattttgaaaagatgtctggccaactttttctacttggctatctggcggcgctcagttatcccatttttgaggggataataaccatgaaaagcaaggtgcaatagtagtttgtcaatgattaggctaatttaggtatttgaactttgttcacaaataatttgcttcatatgaaaatctaaagtgcatgctaaatgtttgtatcttaatatgtaattagcgtgcttttatttcatgcatgagaatatggctatcgattttaattaggagcaaaatgtatgttcttactccatttttaatgcaatttctttattttcttgccaatt

SEQ ID NO: 126986 - DNA, 333 bp, Glycine max
  Clone ID: PAT_MRT3847_85674C.1
tcctccgattttgcgttcttaatttctttttatgagttatatgcttggaagccacagggcactaaagttaaaaccattctgcggtttggattcccaatttcatttttattctcttaaattcaataatatttttttaatattcccattatttcaacaaattttttttttcattgttttatttcacaaaatttgaatgattttgctcaacgcttattcactgcatctgatttaccctctctatctgtgtccaatgtccattgcacttgaaatataactgatgcaaagatccataaaagtttacttaccatcccatttcaccgattttgaaatttt

SEQ ID NO: 126987 - DNA, 306 bp, Glycine max
  Clone ID: PAT_MRT3847_85675C.1
attttacttgattatgctattgcattcctctattgctggcttgtactcgatcaaacaaaaaaggtcgacccgagtcaatacccgaaccactacccttggcttgagttaaggaacatatcccatgcaaggagttttttctttttttccccacgcgcggttcgtttttgacttaaccaaccaacccacgcgccacactattagcctgttcaaggttcattcgctacaacgttaaaattttccacaagaactagtatcctcaataaattccataaaaaaaaatagtggattctcgtgaccctaaagatg

SEQ ID NO: 126988 - DNA, 202 bp, Glycine max
  Clone ID: PAT_MRT3847_85676C.1
cgtccgcgagacgtagaataagaggattcgtgattgtgcaggcgagggatcgcgctgcggcgttgcctcgtttgtttcgtaccatcccacactcataatcttgctatgcatcaaccggagcctaccactgacacgtacacacatgtgaacgcgtatcgtcccttccatggctcggaagcgcatcctcatggagctcaaggac

SEQ ID NO: 126989 - DNA, 1874 bp, Glycine max
  Clone ID: PAT_MRT3847_85677C.1
tcccacgcgtccgtacggctgcgagaagacgacagaagggggatagagaaatagagataagtacggtgcgaaaagagtgaggcggagaaaaatgaagtgcccgtactgttcggcggcgcaggggcgttgcgccaccacgagcagcgggcgttcgatcacggaatgcacgtcttgcgggcgcgtggtggaagagcgacagtcgcatccccaccacgtgttccacgtgcgcgcccaggacaaccctctgtgtctggtcacatcggatctcgctctccccgcgctcaatcaaaacaacgaggaggaggaccctttcgagcccacgggcttcatcaccgccttctccacctgggccctcgagcccagcccactctacctccagtcatccctctccttctctggctacctcgccgagctcgaacgcactctggaatcatcatcatcatcctcttcctccagttcttcttcttcgttgtcgtcgacggtggtggttgataatttgagggcgtacatgcagattatcgatgtggcgtcaattctagggttggactgcgatatctccgaccacgcttttcagttattcagggattgttgctccgctacgtgtttgagaaaccgcagtgtggagtcgcttgctactgcagctcttgttcaggccattagagaggctcaagagcccagaacccttcaggaaatttcaattgcagccaatgtgccgcaaaaggaaattgggaaatacatcaagatactgggagaggctttgcagctaagtcaacctattaacagcaattccatctcagttcatatgccaagattttgcacgcttcttcagctcaataaatctgctcaggaactggctactcacataggagaggttgtgatcaacaaatgcttctgcacccgcaggaatccgattagcatctcagctgctgctatatatttggcttgccaacttgaagacaaacgcaaaacccaggcagaaatttgtaaggtaactggtcttactgaggtcactctccgtaaagtgtacaaggaactattggagaattgggatgatttacttccctctaattacaccccagctgttcctccagagagggcatttcccacaacggtaattgcttctggtcgttcttcaacggctaaggttgatgctgtagaggttatttcttctttggacccagaaaagttgccagatattaaacatagcaaacctaatgagggcccgggcatggttcatcatcccagagggaaggatgaggctgttggtggttatcatgcaagccattccacactgaatcaacagtcaactttttggcaatcccagcttcccagtgggacacacaatcatcagaatgttttgcaaggaatggatattgatgtatcgcagcgaaaccaccaacagccagaacacatggcagaggatacaacaaatggtgctgccaatggtagttctctaaaatcaaaccaactttgtagtcctcctgcttctagtgcaagttctgttatgaggcagttttcagctcccccttcatctgggccttcaaatgttcgataagtacagtcacctaagataatgccaggttatccggatcactgaagaacaatgaaatctaaatggttggggaaattccggttccttgtgccaacacctaacctagcacggataaaattacttcgcctcttttaagtatactattgtattgtatatatatgcatgcattatgtcacatttgatttgttttttatgtgtgaactttggtgtggacgtgtggttattgctagaaccggaatctctcatcgacgctagaaaaagactgataatttgtggtggttttactaatttcaggtacttaattacaaaaaattacatgtct

SEQ ID NO: 126990 - DNA, 353 bp, Glycine max
  Clone ID: PAT_MRT3847_85678C.1
atgaaatttaaatttcagtgtttataaataaagttttattggaacacagccaagttcatttgtttatgttttgactctgactgctttttcttatagtggcagagttgagttgttgtgacagaggtactatgaccctcaaagattcaactatttactctctgatccttacaaaaaatgtgcattgatccttaacttagggtaaggacatagagtttcaggataataaaggttttgttttattttgttttgctttaataattcagcctccaagtttggaggctggggggaattaggtgttatattatgtgctgctttttgttgttgttatttaagtgaacgggggatccactagt

SEQ ID NO: 126991 - DNA, 402 bp, Glycine max
  Clone ID: PAT_MRT3847_85679C.1
ggcttgtggtcaatctgagctacaacaacgccgaaaccaacgtactctcatattacaccttaaacgacatcgacggaatcacgctcattatgactctgggccggcttttctccttcgtcgtgctcaaactaatgactgtgggcatcatctacattcatagattcttgcgtgcatacttgacccaaactacatatctcacatgactagcttgcggcgcattacctacttacgacgataaactcgctgaggaacgatctacatgttattgttgagatggatctgtacaaaacgtatccatgtgacatacatgatacgagcgagctatgctatgatctgaagaacgaatggtacttttttatccataaagacacgatttgtgctacgcggacacgaactaacaag

SEQ ID NO: 126992 - DNA, 327 bp, Glycine max
  Clone ID: PAT_MRT3847_8567C.1
ggtattttatgttctggtcttaggggcaccatcggtagggccatttaaaaagaaactgtttgcattaaaatgggaacagtgagaacaccattgaattttgattctacgcgagcctagctggagacagaattacattgacctcttcggagaaggaatcttagtgggcaaaactggcagattggatctacacttattcaaaattctcctattagtaacttgtctagaggtgatgtttagaaataaaggctgatttatggtaaagattgggttgattggaagtgcatccattaaaaagattggtatgagtcttattggttcacgtttttt

SEQ ID NO: 126993 - DNA, 323 bp, Glycine max
  Clone ID: PAT_MRT3847_85680C.1
acgacccctagggggcatcatgcacaggtaatcttataacaccctccgcttaaatgcctaatccaccttggaggccattcatgccatttacataactctccaaggtcacgcagattgcgttatataggttccaacatatacaaacactcttctggacgtttctatattgcactgatcgaggggatggcagggtaaaccaagatctaatgaggtggttcaatcgccccgcgagttgctggagtaaatatattcatcttaaaacctataatatgcattgaaaaagctacgattgtttactacccatgaagccttgcaacaatgac

SEQ ID NO: 126994 - DNA, 406 bp, Glycine max
  Clone ID: PAT_MRT3847_85681C.1
taataccaactattaggagggaagctgcgccggctggagccgccgcgccgtaattgccgggtccaacgaggcggctttatactcactcatcgacacgttggccctaggcgattctttcgctacctataatggggtaacttggactaacgcactacggatctgtataaggtgaggctatcgacgatggtgcattgcgttacgaccgtattacagacatgcctgatcatgtaaagaatgggaagaaacataaagtgccacttcatcgagggtaaacagcatcggttgctccatataaccgacgataatgccgcggacaatattagaggtgtaagcaacacaggaaagagcctgctcgttgcatgggcagattcaccaagacattgcattccggaaatgactaaaactt

SEQ ID NO: 126995 - DNA, 445 bp, Glycine max
  Clone ID: PAT_MRT3847_85682C.1
ctagagcatacatatgtagaacggctctttgtgtacatctatatgccaaggaaagtgtacgaagagggcaaaaacctcttcccggaacggatatagcttccctttttgaggatgccagagtgaatgatgatcttaatagcattacaagtaaaagtatatttagggaggagttagttgcgtcgctggtggaaagttgctttcagctgtctcttccattgcctgaacaaaaaaacacgggcatggagagcagggtcattggagctttggcatatggaactggttatggtgcattaaactggactgaacctgctttggaagtagtggaagtttgtcggccttgtgttaaatgggattgcgacggccgcacctacgcggttgactgctacttgaagttgcttgttaggctatgttacatatatgatactcggggtggggtaaaaagagt

SEQ ID NO: 126996 - DNA, 164 bp, Glycine max
  Clone ID: PAT_MRT3847_85683C.1
tttggacagggcattgatcttctttttgaattgtggcctagggattaaagtactgagattggtagagattgcatgtatgggaagcttaaaatgcctttagaagctttttaacttcatattgacccttactggattagccattgtagtctatggaatctataatt

SEQ ID NO: 126997 - DNA, 185 bp, Glycine max
  Clone ID: PAT_MRT3847_85684C.1
gttgaattacaaggatgtgaggaaatttgcaattttacgtggcttgtgtacaaggtgggaattgagcttgttccaagggattttgatatggattccccaattccctttcaaaaatctgatattgtcagcttggtccctgttcacaagcaagcagcatgctcatctgcagatggaaggcagctcct

SEQ ID NO: 126998 - DNA, 458 bp, Glycine max
  Clone ID: PAT_MRT3847_85685C.1
gattaactgtcaggttatttcttcatagcattagaaattttgcctgatgataccattggtttatgaggctgtttccccaagctgtggcggtttggtatagattcatgacccagttggtttgcaattttgacaagaggaatttgttacatcttggtccactcaagaggcgtgctgcaacaactcctgtggctgatgggtgtacatatttgtatgctatggtgcatgatagttcagtgtctacaataccatgtgaatatgtcattggtgtgcagtttctgctcatgagcttatgtttgcgtatgggctcaatcctggtatttcaagaacaagggtttcgggcaccattactaagtccattctccattgaactgtatggaattaaattgtaacattgataacaccattgtattatgaatttagcaagcaaatgttttgacagttttctgttgaccgtcttt

SEQ ID NO: 126999 - DNA, 418 bp, Glycine max
  unsure (1)..(418): unsure at all n locations
  Clone ID: PAT_MRT3847_85686C.1
aagcaagtaccccggcaggccccgggccggtatccccgggacttcccacgcgnccgtaagaaccctttttgacccccgagagggcgggcccacctcagagagtgtaagagggaaaccccgaacccaaccananccgncaacgaacaccccacacacgcaccagcaggagaaagccangcncgngcacggccaaccgacgaaaancaacggcaagcngcaaggccaaacacccccaagccagacagccagcaagacccacagaagccaggccaaacagggggggaaaacgacaaccgcccgcccacgaagaaaanngaggacacacaananccgacaaaccnnnacnncaanaaagagccacacccagggaaaacaangaangcngaaancagcaagcanccccccacacaaccatacg

SEQ ID NO: 127000 - DNA, 756 bp, Glycine max
  Clone ID: PAT_MRT3847_85687C.1
cgctctttcctcaccttaattctattcactctctctcactcacaagtcacacccacgcacttctttcttcaaactcactcctttctttccattccctcactttcacacccacaagtcacacccacttggttccttcctccaccccattatttttttctctttttttcatccaaacatgtcctccacacacccaaaaaacccagcaacgacaacaacatccactactctcatcgtgctctcaattatactcctttgttttccgacaaccgcaaaaaccgacaaccctccatgcccttatccgtgttacccaccacccattggaacggttactcccaccactccttcaggtggttccactgttccaccagcaccacctcaacccggattactatatccaccaccttctgggaattacccttattaccccacaccaccttacggcggcggcggtggtgttggcagcaacgacggtagcggtagcggtagtggtggttttggcagcccaccaccaccggaccctattctaccctactttccattctactacagaaagcctcctcacaagccagaagacaattcagcatcaacaaccactatgtacaaatggacagggatggttggtattactagtctattatcttcatctttgcttcttctctttgtataactctcatgaatcatgatcaaaatcttcatgtaatatctaaacagttaatttaatgcttgttaatttaatggtaatttttttttttattt

SEQ ID NO: 127001 - DNA, 319 bp, Glycine max
  unsure (1)..(319): unsure at all n locations
  Clone ID: PAT_MRT3847_85688C.1
ttcgccaatttttcttttcaagggccataatatatatagtttttcttgtttctcaagtgagctactttgtgtttgtaatttgtaatttgtaattacttgatttgcctgctcttttctctctctctttctttttgtattttttttgtttatgatccttgtcgttgtaatgagctatacatacaatgctagtagcggaactggtgntgtggttttatgatgatgatgcaaatgaagtgaaagatacgtgtagaaagtggttttaagcttacattatatagttntgcttttagaggacaagaataaaggctatatgaagatt

SEQ ID NO: 127002 - DNA, 857 bp, Glycine max
  Clone ID: PAT_MRT3847_85689C.1
cacccccaaaagtggcgaacgacacagacccagaacgaagtgtcgtttagcaactaaacccagaaccctattgttgagtgtggttctctcttctctgcacgatcgataaggtttggaggaacacgagggttcgaaaatggtggtgaggattcggctatcccggttgggatgtaagaacaaacccttctatcgggtcatggccgctgatagcagatcccctagagatggcaaacacctcgaagttctcggttactacaatcccttaccaggtcaagatggtggcaagagaatgggtctcaacttcgacagagtgaagtattggctttctgttggagctcagccttcagagcctgtggagcggcttctattccgagctggaatgctgcccccacctcccatggtggcaatggggcgtaaaggtggaccacgtgatactcgcccagtcgatgctctcactggacgtgtgctaaatcaagagaagccagctgatgccaataacactgagcagcagcatgacactcctgaaaacccttaaagtgatgtattttaggatttttttccccctttttcatcgaccatttttttctagatatatctttaatatctatgttctcaattgattttacagaactcaatagaataactactgtttgtgtggagaagttgggttcttttgctacattgtgggtgtattttccaaagcgagggctagactctgatcaaatttaggttgttcgatattatgttaagtgaactgataggttatcattctcttgaattgcctgttacttttgttctgtggaacttttgaaagttgtcagggtgatagggaaagtaggtcatttgattttggattt

SEQ ID NO: 127003 - DNA, 161 bp, Glycine max
  unsure (1)..(161): unsure at all n locations
  Clone ID: PAT_MRT3847_8568C.1
agttgangnagngnacgtnagnncggaattaggcgnnagaagatnnnnngtgngtgannnatgnngatgattctgggnngtctnnacatncnntnnnggatgganggggttanggtgagangnggggtaanagnattggngnannngggtngnagagnggn

SEQ ID NO: 127004 - DNA, 247 bp, Glycine max
  Clone ID: PAT_MRT3847_85690C.1
acgatcgaagtttgaagctccgcttgcagccatactcgaatcagggcacataaattttcaatttgaggaacattttttttgtttagatcaagaacagaagagcttgctcaagtgacgggaaaaaaaggttctattaggagagagttaatgtagttatcgttctgagatttgtcggctcttgtcatggacccccgcaaagagagaataaagtatgggagactgtggattttggaatgagtaaattcca

SEQ ID NO: 127005 - DNA, 329 bp, Glycine max
  unsure (1)..(329): unsure at all n locations
  Clone ID: PAT_MRT3847_85691C.1
accacgtnncatagaagnganctatagccataaggagaaaaactttcaaagaggtgaaagcaanaaganttcttntnttcctnatatatntatacttgggtgctaanntgngtgagttcattgacatctganatggnaactatctgacnangggcatggtctgaacctcaggngacngagcnttgcctcggtactctgttggggantngtcggcggcgcggtnntnaggtggaatccaaggccactgggagaaaggnttctggcctgttnactngacttaatctcatncnggagatcgatggatctgaaatttcnaaangaacccccct

SEQ ID NO: 127006 - DNA, 963 bp, Glycine max
  Clone ID: PAT_MRT3847_85692C.1
atactaattgaaatatttcaatggggtgggtaaataacaataaatacataaaattgaaatatctcttattcattttaatgaacccaagccaagttttgcaagagcacaaaaagagtgcgtgctatacattggtaccaaacacataaaaagtggttcatcaaagcacacaattctaattagaaactgtgaaaaagcatatggaactttggtggaaaacttaagcaacatgacatgcttggaaggcgttatctggggtgacaataggtgatggaaaattagggtgattcacggagtcaggaaatgcttgactctccaaacaaagtggtgaacgtggctgataaacaaaccctccttttcccttgtgattcttgacaaaattagcagtggaaaactgcaaaccaggagcatttgtgaagagcttcatcactctccctgacttcttatccattttcaccatcaagcacataatctctgttactttttttccatcaagcacatagattagcattaggcaattggttgatcctttctccaacaatgtgtggctcaaggaaatcatttggggttcctctaactgaggcatattggcctgtgggaatgagattgtcatcaaatagtgtgacttgggatccaaagatatgaaccacttcatctagaatgttgccactgttgtggtttcataggttccagtaagcatggttcaccatgttcactggggtaggcttgttcagagcttttgctttcatgattatgcttaatgagtttttcccaagaatgtagctcacagttactaggaggtccccaggaaatcctccttcgccatcataactgtgataactgaaggtgattctgggttagtcatcatcttttatgtaccttgtcaaatgaagtgtgttgtttccttcattagcaactaatttgtaatggattccatttagagtgaactgagcacctccaattctg

SEQ ID NO: 127007 - DNA, 433 bp, Glycine max
  Clone ID: PAT_MRT3847_85693C.1
gggggcaaaatgggattgtgaacaaccttaaattcaaagggagactttttgcgggggaaggtgggaaaaaaaaaaaacaaactttgtgtttatagactttctgagggtagcattttctttaaaaaaaaagagggaatccccattcacaaagggaagggatgggggtgacatttttgtgccccatttttgggcccaactgtttatgaaactccattttccataaacttgcttggcccgtttgaaaaaaggcttgaaacaagctcttggcattaaagggttgatctggggtccccaaaattacaactttccctccacttgtacccacggggggataataaacgggaacaattgccccggaaagttgtctgatttggccaaatggcccccttttttaccataaacaggaccaaagacgtgttcaaaaacttttttt

SEQ ID NO: 127008 - DNA, 233 bp, Glycine max
  Clone ID: PAT_MRT3847_85694C.1
tttctcactcgtcagtcttacgtatcatataaagagcctttctagaaacctgtgagcaaaatttctatgagccgaactctggttaagtcattacacaccgaacttacagacacccatggtgggatcattatgttccgtaacgtttacaaaagaatctatagtggtggcgccatcaactctgagcttataccaccctccagaaggccaccggataacggccacagaactctatc

SEQ ID NO: 127009 - DNA, 2214 bp, Glycine max
  Clone ID: PAT_MRT3847_85695C.1
ggcgggccgggctttttctcttttcctaaattttcagatctacgattctctctctcttcgatggcttccacggttgttgcggccgccgtgaggagtgacgtgccgcctcggcagccggtggatccttcggcgtcgtcctcccccgacgtcgctgatcggagcgattccttcaattcctctcccaaccacttctccgacactgaaattcagttacaaactccagacgtattgaagagtgaagagtatcgccaattgttccgtcttccactggaggaagtcctcattgaagattttaattgtgccctccaggaaaacctacttattcagggtcatatgtacctctttgtcaacttcatttgtttctactcaaacatatttggatatgagacaaagaaaataatcccattccctgaagtcacaagtgtaaggagggcaaagacggctgggctctttcccaatgccattgagattcttgctggaaacaagaagtacttctttgcatccttcctatcccgtgatgaagctttcaggattattaatgagggatggtcgcgacagggcaatggagccatagcaattatggaacagaaggaatcaatgtctgagtccagcagccaagagaatggatttgtagctgttgaaaatgtcaaaagttctgataactgacaacggatcactttctactgatctgagcaaagatacgacgcttacatccattgttggggatgatcctgtatcgacggcagattcagagaagcaatgcaatgtaaaacaggttgctgaacctgaactgaataatgatgccccaagtgctgcaagtgtgagttgtaaaacaggttgctgaacctgaactgaataatgatgccccaagtgctgcaagtgtgagttggaagtggaacgaggaggatattgatgccccatcaattcttgaagcatatacatgtgttgcagattcagtgtttccgatgaaggttgaagacttctttaggtacttattctcagatgatgctctaaattttcttgagtcttttcgccaaaagtgtggtgataaagactttaggtgttctccgtggcatcctcaagagaaatttgggtatgctcgtgaactgtcatttcaacatccaataaaaatttatcttggagcgaaatttggtggctgccatgaggtccagaaatttcgtgtttataggaacagtcatttggttatcgagacgtcgcaagaagtcagtgatgtaccttatgcagattatttccgggttgagggactgtggagtgtagagagagacaaggatgaatcaaaagaatgctgcactttgcgggtatatgtgaatgtggcattttctaaaaaaactatttggaaaggcaaaataatacaatcaacaattgaagaatgtcgagatgcttatgcgacatggataaacatggcacatgaaatgttgaagcagaagaaccttgaaaaacaagctcaaaatggtgaaatcaatttagatagagaagtgaagactagagaatcttcagaagggtcaccggagcaaagtaaccctacaaagatactagctacatccaatgcctttgatgctgctacccacaatgtcggctctcacttgcagggaaatttcatcgaaccatcatctgtttcactgtttaaagagtttatgacgaagttcagatcatctttgagaagtcatagcaatctttctctgctccttattactattgtcgctctgattttcttcattcagcagtttagcatacttgtgttattggccagacctcaacacatacatatgaacactcctgtagacatcatgaacaggatgaacaatgaggtcactagaagtccttcagacatagcgtggctggagaaaagaattcatcacctcaaagatgaaatgtacatggttgagagtaggcttgaaaggatgcggtatgaacatttacttttaaaaaagcaattaaaggacctagaacactagttaccaaatttcattgtcccctcttatagcatctttttttttttgtatatacatgtgatgtgatatatagatatgatatttaatttcgtaaattcattcttctccctcgttgtaaatgaggactttattttatacccaaaattaaagaaacgaggaacttgtgatttagggtttgttttcaagtatcaaataataggatgaaatgcaatggatgactattataattttaaggattaaa

SEQ ID NO: 127010 - DNA, 613 bp, Glycine max
  Clone ID: PAT_MRT3847_85696C.1
ccggtccggaattcccgggtacgacccacgcgtccgatttcccactctcactacactcactccctccaaaaaatggaagagaaactaaagtacccctttctctcttccttcttaaccctcttcttctgcatctccgccacttccattgccccacataactcccaaacccaaaccctcctcctccgcaccctccctaacccacccacactctcctggcccgaatcaaccatatcaggatccgacccggaacccgaccccttctccctttcggttcacctcaaccacatagacgcactctcccccaacaaaaccccttcccaactcttccacctaagactcctacgcgacggcgcaagagtcaaaacactaaactccttagccgcagccacaaatcaaacccgacccactaataccgggtcgggtttcagcagctccgtagtttcgggtctctcacagggaagcggcgagtacttcacgcgcctcggcgtgggaacccctccgaagtacctctacattgtcctcgacacgggaagcgacgtcgtttggctccaatgcaagccctgcaccaaatgctactcccaaaccgaccaaatctttgacccatcaaaatcgc

SEQ ID NO: 127011 - DNA, 900 bp, Glycine max
  Clone ID: PAT_MRT3847_85697C.1
tgccgtagtcaggagtgacgtgccgccgcggcagccggtggtggatccttcgccgtcgtggtcccccgacaacgccgctaatcggagcgattccttcaattcctcgcccaaccacttctccgatgctgaaattcagctttagtgaaacctgtgaattgtggcttttgacgttataggatggctctggtccttggaatcttttaattttgacacatttaattgaaattcatatttcacttaattttacaaactccagacgtattgaagagtgaagagtatcgacaattgttccgtcttccacaggaggaagtccttattgaagattttaattgtgcccttcaggaaaacctacttattcagggtcatatgtacctctttgtcaacttcatttgtttctactcaaacatatttggatatgagacaaagaaaataatcccattccctgaagtcacaagtgtaaggagggcaaagacggctgggctctttcccaatgccattgagattctagccggaaacaagaaggattattaatgagggatggtcgcgacatggcaatggagccatagcaattatggaacagaaggaatcaatgtcagagtccagctgccaagagaatggatttgtagctgttgaaaatgtcaaaagttcttatataactaacaacggatcactttctactgatctgagcaaagatacggcgcttccatccattgtagatgatccattattgacggaagattcagcgaagcaatgcagtgtaaaacaggttgctgaacctgaattgaatattgatgccccaaatgctgcaagtgtgagttggaagtggaacgaggaggatattgatgccccatcaatccttgaagcatatacatgtgttgcagattcagtgtttccgataaa

SEQ ID NO: 127012 - DNA, 397 bp, Glycine max
  Clone ID: PAT_MRT3847_85698C.1
acaaagactaaactaaattaagtaatggggcctttacaacacagggtgaagcaaaagttttcaacaattggaattgttcaatgaaaactaatgattcctaaaaaaattttttttcccaagcaaaaaaccccgggacccaaatttttgttgccttcgtaggcaaaatcatgaattgcttaacaaattttagcaaaaacgttttaaaaaacacttggaaacaaaataaaattttttttaattcccaaacatggggccccacccaaccttgggagaatgtcaataaccccttttcttgaaaatcacacttccttgggcataattggttaaacccaagttaaaacccattataaaccattttttacatttttaacaccaaaaagccattgggcaaaataaa

SEQ ID NO: 127013 - DNA, 728 bp, Glycine max
  Clone ID: PAT_MRT3847_85699C.1
ccacgcgtccgaaaaccttcttcaaccaccaccgttctcttttctcttctcactgaattttcagatctactttttctcctcagtggagtaataatattgattgattcacgcagctatagccatttcagatctaatattctatatatctttctctctctctctattctctctcttcgatggcttccacggttgttgccgccgctgccaggagtgacgtgccgccgcggcagccggtggtggatccttcgccgtcgtcgtcccccgacaacgccgctaatcggagcgattccttcaattcctcgcccaaccacttctccgatgctgaaattcagttacaaactccagacgtattgaagagtgaagagtatcgacaattgttccgtcttccacaggaggaagtccttattgaagattttaattgtgccctccaggaaaacctacttattcagggtcatatgtacctctttgtcaacttcatttgtttctactcaaacatatttggatatgagacaaagaaaataatcccattccctgaagtcacgagtgtaaggagggcaaagacggctgggctctttcccaatgccattgagattcttgctggaaacaagaagtacttctttgcatccttcctatcccgtgatgaagctttcaggattattaatgaggggatggtcgcgacagggcaatggagccatagcaattatggaacagaaggaatcaatgtctga

SEQ ID NO: 127014 - DNA, 310 bp, Glycine max
  unsure (1)..(310): unsure at all n locations
  Clone ID: PAT_MRT3847_8569C.1
gaatgcangcacncnnacgnaaacacggaatncancacgagcnnnnnnagcnncacanncncntcaatttncngancnncgcactanacgataccacacaacatacnananancnataaacacnaagtcnaaggacnangcaatnnnacgcaacnaaannncnanaggaaatntnnaaanannncngnggngnncnngnacgnagctgcgnnactgcaantganaacntanaagcaaananntctntgnnaaataanagancanacagnagnganagacangagangggngnacgaatcnaatacnagct

SEQ ID NO: 127015 - DNA, 526 bp, Glycine max
  Clone ID: PAT_MRT3847_856C.1
ccacgcgtccgtgaaagttgaaacaacatttgttatatatatatttcatctcctacattttattttgtggattgtgattttacatcacacatacacaagtttctataaaatattcatagttacctaatctgaatctattatgatggaaaaagcgtcatcttctaatgaggtaaggacactagttttagttggacgtactggcaatggcaaaagtgcaacgggaaatagtgttcttggaaggagagcattcaagtcaaggacaagttcttctggtgtaacaagtgtgtgtgaattgcaaagaactattatgaaagatggatcgattgttaatgttattgacaccccaggactatttgctggaactgattctgctgggaaggaaatagtcaaatgtattgatatggctaaagatggaattcatgccattcttatggtgttctctgttagaactcgcttttctgaagaggaacaagctacttttcttaccttgcaagcattgtttggacaccaaattgttgactacatg

SEQ ID NO: 127016 - DNA, 964 bp, Glycine max
  Clone ID: PAT_MRT3847_85700C.1
tctcgagccgattcggctcgaggggaataatcacaggcaaaataatacaatcaacaattgaagaatgtcgagatgcttatgcgacatggataaacatggtattcttgtgtctgtgcttgtattatacgtattttgttttgctgtggttcaagtttccttttaaatgtccgtttgaaaatgtatggaatttcaggcacatgaaatgttgaagcagaagaaccttgaaaaacaagctcaaaatggtgaaatcaatttagatagagaagtgaagactggagaatcttcagaagggtcacaggagcaaagtaaccatacaaagatactagctacttccaatgcctttgatgctactacccacaatgtcggctctcatttgccgggaaatttcatcgaaccatcatctgttccactgtttaaagagtttatgacgaagttcagatcatctttgagaagtcatagcaatctttctctgctccttattactgttgtcgctctgattttcttcattcagcagtgtagcatacttgtgctgttggctagacctcaacacatacatatgaacactcctgtagacatcacgaataggatgaacaatgaggtcactagaagtccttcagacatagcgtggttggagaaaagaattcatcacctcaaagatgaaatgtacatggttgagagtaggcttgaaaggatgcggtatgaacatttacttttaaaaaaccaactaaaggacctagaacacaagtagctaccaaatttcattgttgaatcatatccttcttatagcatttttttgtatattcatgtgatatatagatatgacatttaattttgttgtaaatgagaggactttatgttatacccaaaattaaagaaatgaggaacttgtgatttagtttgtttgccagcatcctaaaataggatgaaatgcaatggaccactattataaaaataaggattaatt

SEQ ID NO: 127017 - DNA, 370 bp, Glycine max
  Clone ID: PAT_MRT3847_85701C.1
tttttgaaatttaaaagggacacatattttaggggcaggggaaataaatttacatcgagccatattttttgaagatcaatgaactggtttgaaagatgtgttactacctaacgaatgaatatgctcaaatgctatgaaagtgattgtttgtagtaggttgttatgagccaaatttgtttataactatttgggggaaatcaagggtcattcgaacgatctggaatagctaactgtcaacattcaaacagtgattgtcttagtcggttatcattttaacacgcctaagtttagatgtttacaaacagtgtgagaaaggtttggtatttcgtctcttaaaattactgtataataggactgttcataatctatt

SEQ ID NO: 127018 - DNA, 281 bp, Glycine max
  unsure (1)..(281): unsure at all n locations
  Clone ID: PAT_MRT3847_85702C.1
cnaacttggagctttgggacggatgacaacggttcaagagcagctttcagttcgcgttccagcatgactacttgcgttcgataganaattatncgaaaaggatgaaacgtaccaagatgtttgtgaagaagcatttgcccaatgttggctgccatcctttcctggcagggcttcatgccgctttgcagtggaatctggaaagctcaacggttgtagcatggcaatgtcagactcggtattcgttcgaaagcggcgatctganttgccatacaacgcgcttg

SEQ ID NO: 127019 - DNA, 481 bp, Glycine max
  Clone ID: PAT_MRT3847_85703C.1
acggctgcgagaacgacagaagggtgtctctttaaggtgggtagggaaaagaaaagtgtccatgtccaccctcattttcattttagaccacttcttacctcaattgctagctttagaaatgaatttgtaacttaaccagggccactttgaacttgaaggaaaacaaagagggtcaggggatgaaaattattgtttatagtcaacgtttgtatcaccttaagtggtctcaacctaacacaattttagtctcattttttagtgtgtttttttttaatccaagtcactagctattgaagcccgctgaaatatagtattaactgaaggatctgggcttggacaaattggtgcaatcccgtttaagttaatttcctgatcctgatagcctaaagcttgaatcaagatttggtctgacctataaaaaattgggaaagataatggaatcataatattgtttattagatgatcatctaatattgtatag

SEQ ID NO: 127020 - DNA, 536 bp, Glycine max
  Clone ID: PAT_MRT3847_85704C.1
ggaaaaaaaaaaaatctttatttgggttttttcataaaaaaaaaaccaccccccttttttcccaaaaggacattggcaaaatttaattgggggggttgcccaaccccccttagcccctttttaaatatttttcccccaaaacttagggaaaaaaatttaccttaaaaaccaaaccctaaaagcccttaccaaaaatcacccccttaactaagggggaaaaaaagccttgtttattttgccccaccccatttttttggccccggccccataaactatttaaaagggggtttatttttactttttcacccttttccaggtgggggggactttggtttttttccaaaccgcttgaaacccctcccagaaaaaaaataaaaagagggggggggacccttccaaaaaccggccctaagaaagcccgagtttgggactttgaagaaacaacctcaaaaccctggcttaaaaaaaccaggggttttttatacccaaggggtttgggcccaataccctaaaaatcccaactttttaaaatttta

SEQ ID NO: 127021 - DNA, 1272 bp, Glycine max
  Clone ID: PAT_MRT3847_85705C.1
aaaacgccaagggattcgaacggacatgggacccacgtggcgtcaacggcggtgtgtgtggctgtgagcaacgcatcgttctatggtctagccacaattcggctcgagggtgggtcccccgagtcaagattggcagtttacaaagtgtgttataggaatgggtgtcgtggatcagccatcctggcggcgtttgatgatgccattgccgacggagtggatgtgttgtcgctatcgctgggcgtattacctctttcccgaccaaagttgacatccgacacgattgctattggagcattccacgccgtgcagcgcggcatcttggtggtctgcgccgctgggaatgccggacctctcaagtactcagttgtaaacgatgcaccttggattttaaccgttgcagcttccaccatcgatcgggatcttcagtccaacgtcgtcttgggtactaaccacgtcgtcaagggcagagccattaatttctcccctctttcaaattctcccgagtatccaatggtatatggtgagtctgccaaggcaaaaagagccaacttaggtacagcaagaaaatgccacccaaattcattagatagaaataaagtcaaagggaagattgtgatttgcgatggcaaaaaggatccgaaatatataactatggaaaaaattaacatagtgaaagcggcaggaggaattggtctggctcatattactgatcaagatggatcagtagcatttaattatgtggacttcccggcaacagagataagttcaaaagatggcgtcgcactcctgcagtatatcaattcaaccagcaatccagtgggaacaatactagctacagttacagttcctgattataagcctgctcccgtggtgggtttcttttcatcaagagggccttcaacgctttcaagcaatattctcaagcctgatattgccgcaccgggagtgaacattctcgctgcatggataggagatgacacatcataggttccaaaaggaagaaagccctgactatacaacataatctgaggaacttccatggctgctgcacatgtcgcatggcatgggtacatcgagaaaagacgatatctctgatgtagatggctgatgaatctgattgacaagtcatgacttctgcaattcaaaatgacaacttgaaggctcccatatcaactgattcaaggtcgatagccacaccctattgactattgagcatgggaaagttcacatctaaaccattggaaccagggctagtttatgaaactacaacgt

SEQ ID NO: 127022 - DNA, 356 bp, Glycine max
  Clone ID: PAT_MRT3847_85706C.1
gagaaagcttgaataacaaggcgacattttaaaacctcccggttttataagaacagaggaaacattatccgcaaagttcttaccgaatgctgatccatttttagattgcatatcatgcggaattttgacctctagactaagttcagcatagggaattgccccaaagcggcacgctattatcaccagacttgttcccccagcgggaatacccacagacgttacgacccggatggttctaggcggatttcataaccctgctgagctaaacggggggatgccattgataggggtgctcgaattattatatatctcatgatcgatatggcaatggatccagtcatccctttctttataca

SEQ ID NO: 127023 - DNA, 371 bp, Glycine max
  Clone ID: PAT_MRT3847_85707C.1
gaacgacaacacgcctcactctttatcttaattaacttacgcttacgactttatatcacaatgaacaacactaatgctgccaacggaaagggaaagttcaaaccctacagaaatcgacctggaaagagacaaggacttcttgagctcttcagttttctcttaattcttgcatcagttcctgcctttttgggaggagtcttctctatcttcgttgctctctctgcatttgtccttggaataattggactcttcgcatggactcgaagacacgctaaactctttattttgttagcaattgctgtgatcgcagcagccattgtcagcatcattttgagaggaacattccacgctcagtgcgttccctttcacca

SEQ ID NO: 127024 - DNA, 179 bp, Glycine max
  Clone ID: PAT_MRT3847_85708C.1
aactactggaacttgctcgttcattccatccacctccgtggaaacataagtgtctaacctcagtcagcttcacacgtgtgatatgcgtcctgaaattgggccactagcatactattcaattcgtctatggctgcatcttcttatgctatgcaatcaatcatggaaaacccttgatccga

SEQ ID NO: 127025 - DNA, 688 bp, Glycine max
  Clone ID: PAT_MRT3847_85709C.1
atactttttgacaatggttacaagcaagcgaaactaaaacgacgcgaaggggaaaaagggagatcggagagacagagagatcagtagtatcagagatggggagagggcaagttctgagcgcgtaccgcgcgcttctgaaagcgacacggaaaacattttccggcgacaccatgatgctgaaggaatctgcggtggaagtaaggaagaagttcgaggaaaacaagaacgtgagctccgaggcggagatccagaagcttctcctagaggctgaagaggcctcccatttcatcaccaacatgctcgtccaggcacagctcaatcccgattctggcacttacgcggtgaagccgtgtaaggagcatgctggagcaacgcttgaacttccctccgaagaaattattcggaagtcagcatagggacaagaggcaagcggttagaacaaagtctagatttttatttttgcttaggatcaataagcagtattgcctctgattttatgggggtgtttgattattatttttttgctcccaatcctttgtttcctttcaaatctatttagcggagtagacaggatataaatctgactggcaaaagtttatgatgccctttttttgttgtatgatcacataatgtatcccaagtttttttgtttaatttgccttcagcagaatttccaattggtttggat

SEQ ID NO: 127026 - DNA, 708 bp, Glycine max
  unsure (1)..(708): unsure at all n locations
  Clone ID: PAT_MRT3847_8570C.1
aaatttaccaggatgtatgggaaatgatatattaaaaaccttattctgatgtgtggaaacgaaaattcaatccttttaacaggagaccataaattcgtagtctggaatgcagttgtataagtaatgttctgctgctacttgaatggataatttgacatcgcttacttggagagtttactctctaatcctttcaggctatattaaaatgatccatgattttgtttaggtatagacatgttctgccagacatctgtttcagtccggacgaagaagcaatagtatttgattaaattatgttatttaattggattttatgataggctgataaagaattattaggctatgttaggtatgtttggtatgtttggttgagaagaaattggaggggtgagatggaaattagttacttggtttgataagggggagttagagaagaaataatttaaaaaatggtggaatttactgtattttttcttatctaatttcactcgttaacctatttctcaccatcaatttacactcatcgttattactttccatctactccgtattttttctctaccanacagggcattagaatatgatgaaatacaatttataatagatagtgagcatcatattttcaatcgttcccagccttcatgcatgtcttcttcanaactagtgaccgtatgtatggattatcaaacaaaataaaatgttataaat

SEQ ID NO: 127027 - DNA, 347 bp, Glycine max
  Clone ID: PAT_MRT3847_85710C.1
tttttttttttttttttttttttttttttttttttttttttttttttttttttttttttgggattatgtgcttttttatttcattttttactctttttttaaaataaatgtgcactattttatggagaaaaaaaagagcaccaccaaaacacggtttacccgagcgggcactatataaggaaaacaaaagagaacaaaaccaaaaaaaacccgcccgttttattgcgggtgtacccacccatagaggcgaatttatggttgagttaacaaaaaaaactttcctgattataccttcctgaaccccccccacaagaggcattttcttttaaaaaaacacccgttttttt

SEQ ID NO: 127028 - DNA, 373 bp, Glycine max
  Clone ID: PAT_MRT3847_85711C.1
cttccttccttttttttttttttctctgtatttttccattctttttttttctttttgggggtccgggtaaaaactagttccgatttccactttaacccatgggacaataaaaaaccctttgtactccccctttttcttctctctttcccccttaggcggggacctttattgcgccctacctttggccctctccctaacaaaggcatggtggccccacaattattctaaaacttgtcctcttttggttgtacccagggcacttccctacataaactaacctttttgttttaatacaaaaaaccccccttggataactaaatttccatgggcccattggaaatccggtgaaagagtccttttttttttgctagat

SEQ ID NO: 127029 - DNA, 444 bp, Glycine max
  Clone ID: PAT_MRT3847_85712C.1
agggaaaagggggctttttttttttaaagccccaaaaaaaaaaacaacaaagggaagtcttttaaaagacttggggacccccaggggaaacaacaaaaagggaagctggggcccctatttgaaccccttttattacaaaaaaaaagaaaggagccacctaaattggtgaaaggggaaggaaccactgaagggaaaacaggggaataagaagctaaaagggcctgttttcccctttggggcccccgaggaaaacgccccattgggccccaaagaacccaaaaaggggggaaccccgccttaaaaaattctctctcgcggggggtttggaaaaaaccgcttttggaggggaaggaacttggggacccctgaaaaaaatttttcccaggggggggacccacccttttttaagattgcttttgaaacggcctggttgcccagggtttt

SEQ ID NO: 127030 - DNA, 199 bp, Glycine max
  Clone ID: PAT_MRT3847_85714C.1
tcttgtgttgaagagttcgttttgattgatgtagtctcttcaacaagttagtatttacctattaggtttctatttgacatcttaaatattatggttctatgttctcattattattctgctgtttctttgtgaaccgagaaatgtagtaaccagcagcctccacattgaaaaagatgggatgccattggagatgataatt

SEQ ID NO: 127031 - DNA, 179 bp, Glycine max
  Clone ID: PAT_MRT3847_85715C.1
atctgaaatgtaatttggtacgtttcaacattttggcaaacacgttaattacatagtacaactttcgaaaaaaagatataatatatatatatatatatatatatatatctatatatatatatataatatgtaaaggatgaatacttgctgttattctcatttttttagaatctacattt

SEQ ID NO: 127032 - DNA, 278 bp, Glycine max
  Clone ID: PAT_MRT3847_85716C.1
ataggggggggcaaccaaaacaccagtttaaaaagcaagccacagaaaaagaaaaaaatgagcttctacagggcgaaaccgagaaaggtaacgggccagaaagcacaaacaaaaggtcttgggctagacaaaaaaaccagggtctaataggaccaggcgggccacaatatagagaacaaaaaaaaaaccagcccgaaaaaaaccatagaggaacacacagaattaaccccactccaggagacaaggaagcaaaaaaaagggcaaaacaaaaaaacaag

SEQ ID NO: 127033 - DNA, 395 bp, Glycine max
  Clone ID: PAT_MRT3847_85717C.1
gaaatttcaatttaaactcaagcacgccgcaggagaataaaaccgggacagccggaacaagacaaagcggccaggcaccacaaaggagacaagaacactgataacaggagatcccccgaacaccactgggaccagggcagctcctcaatggaggactcaaccccagaaggcagcaggccagacagcccacacacagcacatgaacacctgaatacacaaccaaaggcaaacaggcatgagctagctccgcgtaagaaccagcctgaggcatacgcgtacgccagatcaaaccaaagagaactgatggaggtgcagccaaaacaaacgaccaacgaccttgaaggcggcatatgccacggagacagctgcaaggggaaacccaggccatgcaaaac

SEQ ID NO: 127034 - DNA, 534 bp, Glycine max
  Clone ID: PAT_MRT3847_85718C.1
ggataaggaaggtattcccccagaccagcagcgattgatcttcgcaggcaaacagcttgaagatggcagaaccctttcagactacaacattcagaaagaatctacccttcacttggtgctgcgtcttcgtggtgggatgcaaattttcgtgaaaactcttactggaaagactatcacattggaggttgagccttctgactccatcgaaaatgttaaagctaaaattcaagacaaggaaggtattcctccagaccagcagcggttgatctttgcaggcaaacagcttgaagatggcagaaccctttcagactacaacattcagaaagaatctacccttcacttggtgctgcgtcttcgtggtgggatgcaaatctttgtaaagaccctgacaggaaagaccattactttggaggttgagccatctgattctattgaaaacgtcaaggctaaaattcaggataaggaaggtattcccccagaccagcagagattgatcttcgcaggcaaacagcttggagatggcagaaccctttc

SEQ ID NO: 127035 - DNA, 443 bp, Glycine max
  Clone ID: PAT_MRT3847_85719C.1
tcacgtcatcgtttgcaatacggtaccaaaatgaaaaaaaaataaaaataaatgtttttggagccaatgatataataactttatttattgagcttttttatatttttaactattcaagctcatccaatatatttcatatttattatattatacaactgttggcctaatttaaaccgaaattaagccatacagctgaatgagatcagcaatcatgcatctgcaaagaaatgatacttttggatgttgttgactatcaaccgaattgctgaaattgtggttgctattgtgagcagaaaagaaaaaacgatgttgaaccagtgccacgccttcttctctattctagctgttcttcccttaaccttgatgaagaccatgctggggaacatgaaggtcagaggaacgagtgaaaatgagccaagaaagtttacaaagtcacccataaa

SEQ ID NO: 127036 - DNA, 163 bp, Glycine max
  Clone ID: PAT_MRT3847_8571C.1
gagacgcatgcgtatacggacaacaccgagcggcttacaggacaagatgatcggacggggccagaactaatctatgcgcatgcaacagggccgagatctacccaggaagaggcatcatacttcagagaggcaattgtgagggttgcatgtttgcagactcaaa

SEQ ID NO: 127037 - DNA, 103 bp, Glycine max
  Clone ID: PAT_MRT3847_85720C.1
tatcaagcttcgtggaatatcaggcgtggcgttggtcacaggtccccagcaattactcagtaggaggatttatcaaatttctaggaatatatatcctggtctg

SEQ ID NO: 127038 - DNA, 279 bp, Glycine max
  unsure (1)..(279): unsure at all n locations
  Clone ID: PAT_MRT3847_85721C.1
gcatcgctcgttcctcgtggttncttcntttgtgtctctntctnttcggacacaaagcaacgctgtccatttccatgtctctgtctctnnttcgtatctactctncnccccaccttctttcctcctctctcttctttcnancccnanctctntgntntttncttccganattacnaaatgcccccgnanntncngaanttggtttaattggnacggtaggganggcttcctnagttgganncatcgantcccagaagatacagaatacgaacaacccnt

SEQ ID NO: 127039 - DNA, 1692 bp, Glycine max
  Clone ID: PAT_MRT3847_85722C.1
gccgttttcttggcggcatggccgcgaccgcaccgttaggacgatggacgagcaactcgaacgattcgactcggagttcgcctccacgagttccagacgatttccgcaacctcaccagctccggcgacatttcctccatcagcagcggctccggcgagattcctcccgtctcggtcctcgcgcctccctttctctaccgcgaggggtccaatgacgtcgagacggcggcgccaagggagaagtgcgtgggaaggagtaacaagggagtgagctgggggcacacttcggtgattgggagaaggaaagagatggaggacgccatcgccgttattccgggattcatgtctcgcacgtgtgatcgcatcggcggttgtacggctcccggttctagatcctccggggagatcgctgcgcttcatttcttcggcggtaacgatccccaccgtggctctcaggtcgctgagcgctgtgctaagccgaagcacgctgttttagcaggggaggggaaccggaaataagggggtggcgctcgatggcacagaagatgggaaactgtatttgctaacagttttgagaggactgacaatgaaatcctatcagacgcagttgcgcctgaaatggtaggatctactgcctctgtggtgattctatctggttgccaaattattacatccaactgcggcgactcaagggtagttctttaccgcaggacacaaactatccccttgacagtggatcagaagccggatagacaagatgaacttttgagaattgaaggaggaggaggaagagtcataaactggaatggagctagggtgtttggtgttcttgccatgtccagggccataggtgatcggtacttgagaccctggattattccggtgccagagataactttcacagcaagaaccgatgaggatgagtgcttagttttggctagtgatggactctgggatgtaatgaccaatgaagaggttggagaagtagcacgccacattcttagaaggcgccgcagatcattgtcaatggaggaagcatctcctgcacaagttgttgccgacagcttgactgaaattgcattaggtagaaatagtaaagataacatttcaatcatagttgttgatctgaaatcaaagagaaaacgtcagcaaaggcctcctttaatttcctaagaaactgattctcgttaatccttttcaatcttgagaagggcaaagagacggtaatgaagctgtagagttgatctatgaagcaaacccccccctttctgatgaccccattggtacttggtatcacttcagcttgtgtttctcctaaccttctgtacagagttgtttggcaaaaagaatctgcttcatgatagggattgcatgttattaattgttatgatgaagtttagatcagtactcttttttcccccatttggtcctgattcctgaacggttatgtgtggattaaaggaagagatggggaacagaatgaagtcctatcaattattattgtttgattttttttattgaaggaaatggaataaaacatgatgaactttattccatctcattgctttcaatactctcatttttcttctctttgatttgagggtatgggatgaaattactctaataagttataactcttattgttttgactagctttcaagcagtgaaatgaaaattttattattttattccc

SEQ ID NO: 127040 - DNA, 401 bp, Glycine max
  unsure (1)..(401): unsure at all n locations
  Clone ID: PAT_MRT3847_85723C.1
cctacgcgtccgaattgccattcttgaacaacaagccaacagcaatttgtaagaaagatgtttggagagttgaatgtggaatcccttctggatttccgctcacagttatttgcaatagcatttttaatgagatgctcattagatatagctatgaaaaatacctgcgccaggnttctaatgttttgtgggtggttcctgtggacaaggagcgtgtattgtcccaactctgttaatgttcgtgaaataatctggagatgcaagaagcttatcttgtcaagcacgtaaatgtgttgcgagaattgtttttgcacagtccacaggaagctcgacaattcagaaggaaagctctctctcgtattgaatggctgctaaaagctgatgagcctaccatagcacagatt

SEQ ID NO: 127041 - DNA, 432 bp, Glycine max
  Clone ID: PAT_MRT3847_85724C.1
tttcgaatttatacccaaaaagattgatgcctgattgaggcaaagaatagatcctcaatacaatgaggttcaggctcagatggaaacaaatttgtttaaatttgtctttgatgaagttgaaactcctaaaggttccatgctgggtcttaaaatacctcaacataaaattgcacttcccaagaacacaggtggaggaaccattctgcgcaatgatctattgataaatttttggacagagggcaattttatagcaagtgttgatttgcagtgcacttatctgattagaggaatgatttaaatggtgtgcacacttggaattcctgagagtacagcgttagccttggcctgtgctatgaatatgttcttttttggggcgcgccagttctgatatctacaccattttgtatcaagactgtgaaatattggatcctt

SEQ ID NO: 127042 - DNA, 412 bp, Glycine max
  unsure (1)..(412): unsure at all n locations
  Clone ID: PAT_MRT3847_85725C.1
acgcgnntacgtaagnctcggnaatttctggctcgaggaactactgtgctatgtacaagcacgtcgataagggtatgggaacgggatgcctcttggctaaatattattggcaaagcgtatggaaggctgatgcacattgaagaattgctccctaaaggaaatggtttacatgaggttttttcctcagacacactcaacacgctaaattaatctacagatgccctgtccagagcttgatggtcaacttgtatatctaaatgcatgcatcttgatcacagatctctaagtgttaaagatgatatctgagctgcatagatgattaatatgagccactcccttcctctccattaatactatgagatctatacatccttgcttcgttaatcttttctctcaacatgatatgctcaac

SEQ ID NO: 127043 - DNA, 203 bp, Glycine max
  unsure (1)..(203): unsure at all n locations
  Clone ID: PAT_MRT3847_85726C.1
taagctcggaatccggctcgagatcgatcggataccagcaattaaggaaatncagcttgaatgaactacccagctgcactagaactacatatccacacttattcatgctcgaccgtagtcggtgatatatacatcatgcactctcccatataccacactctaatactttttcataatatcatcttattcaaacattattcttt

SEQ ID NO: 127044 - DNA, 178 bp, Glycine max
  unsure (1)..(178): unsure at all n locations
  Clone ID: PAT_MRT3847_85727C.1
aganacttaaanaaatattcncattncaaatcctgtcgtctttatttgcgttgctcatcagatctgcatataaaacactaaactgtncaaacacacgctcngctgctttcggcctgaaattttnctgttccttttncgtttncctcagtctattgctacttcccacncnanaatangt

SEQ ID NO: 127045 - DNA, 583 bp, Glycine max
  unsure (1)..(583): unsure at all n locations
  Clone ID: PAT_MRT3847_85728C.1
gagaactttaaaaatgacctcgaaagaatgaattgtttggatcttaacgatgctataaacactgcagctcaagcatatcatgagcgctatgagcagttgaaagagcaagtgggaagaggagaaaagccaatctcaatcatggaccaaaaggcaattgatggtgataaagggaagaaagagcctgaagctcccaaggagaagaaaaaggctatttcgatctctaaagcagagggaaagcctaacaaacttgctcctccttctggttggaaaaatccatccgggacatcaggaggaatgcagtctgctcagaacgtgattaacctactcgatttcgacgatgaagttgagagttcgaatgggaataaacaagagcatgcccatgtccagcctcaaggacataacagcgatgttgaagtgagtcagacacacaacacaattacagtgaaaagcaccaatacggcttctatctctggagccgntgatctactggacttagactctgaagatggcagcaataatctcatgcaacctgttatggctgatgatgcctacaatagaaggtgcactaacaattcaggaactc

SEQ ID NO: 127046 - DNA, 437 bp, Glycine max
  Clone ID: PAT_MRT3847_85729C.1
gagcgagtaaagaggatgcaagcgctgcacgacacaatccatgaggtctacggccaattcaaggacgccgacctgactaccttcaaatgtgtatgcataccgaacttattgtctctgtacgagacggagcgcatgatataggaactaaacaactaccaacacgacacccatgcaattgagggaaccaactgctgaatcccatgaaagattatcccggctagcaaggtatcccgctgccgaagatgcaaaggaagtctccggctcagattgtcgagctctatgacgagaacaacggaccgaagactccggggctcccagatgaggttatagggaaggaaatgctagctaagctcagtgaaatgcttagcaatcctctgggtgctacggaggagcaattataccgacggctcggatgcccgagtgtgctcaccggccta

SEQ ID NO: 127047 - DNA, 288 bp, Glycine max
  Clone ID: PAT_MRT3847_8572C.1
gttgaagaatagaaacttagttaatggcaagaaaaaacacgttaattgaaaacccgaatgtgtaatgaatgatgaaaagtaaaacgggtagcaccgaccacaataacggaaaccacgatctctgaccgactgactgactaccacgatctctgactgactgactattctcactttccaccgaatcgaattctctctcattcgaagaaaaacgaactcaactgtgtctgcgagaactccaattcctaaaccctagcttgaatccaacgattcagtttcgctggttgactt

SEQ ID NO: 127048 - DNA, 433 bp, Glycine max
  Clone ID: PAT_MRT3847_85730C.1
cgcaggcgttgggactccagctgcagctgcagctgcagcaacagacgctaaggcaggcaagtatggagctgctgcaggcttagtgcctgttgggccatgctttgtcccggtagtagttggtgtcccaggagctggcgttccaggtgttggtgtaccaggagctgtgattccagttgtcccaggtgctgggatcccaagtgctgcggttccaggggttgtgtcaccagaagcagctgctaaggcagctgcaaaggcagccaaatacggggccaggcccggagtctgagttggaggcattcctacttacggggttggagctgggggctttcccggctttggtgtcggagtcggaagtatccctggagtcgcaggtgtccctggtgtcggaggtgttcccggagtcggaggtgtcccgggagttggcatttccccc

SEQ ID NO: 127049 - DNA, 235 bp, Glycine max
  Clone ID: PAT_MRT3847_85731C.1
tacggttgggagaggacaacaaaaggggacaaatttttctttttatcttacttctctaggaaggcactgaatacattgggggttcctaattcatacgtaattaccatgatggttgcataaaaagctcataccaacaatatgttggttgttcgtatgaacactggctatggagccaccactcacgagctgaattacccttgttggaggatagatgctgaagcgcacaccatatgag

SEQ ID NO: 127050 - DNA, 518 bp, Glycine max
  Clone ID: PAT_MRT3847_85732C.1
gaacctcccaaccgcatcgcccaccatggtcgctgcacggcagttcacctgcagcgccccgcgctttactgctcagctccgtgctcccgctcaacggcgtctgggcagcacctccaccgagaacgagttcatccaggagcgccagcacatcaaggagcacgtcaaaggtaccaccgccctgtgtgagaagatttccatctacggtgtcgttccctctctgatccttgctggcgccaatggctggtggctctggaaggctcactgcgagcactgggaccacatgactccgctggaggagcgcaccgagtacccttaccataacatccgcaccaagaacttccagtggggtgacggtgacaagactctcttctggaacgagtccgtcaactacctcaacaaggaccaggttgcgtaaatggagccagggtcacctgcgagttctaacgcgaaggaattgtacaaggactatccctggactatgtacaacctcctagacatcaattgatctcctttgtacc

SEQ ID NO: 127051 - DNA, 325 bp, Glycine max
  Clone ID: PAT_MRT3847_85733C.1
aaaacctcattatgctgaaggataaatccttttctaggggccgaaaccagctgagaaataacttaaaccgcatattagcttggagtataaaagaatttgttaaggggggaaaaacaaggaatatgctccataagttttctttaaaaatgggtaatactcctgggttcaccaaactattgaaattggggttaggggccaccaaatccaactcctatttggctactcactaccaaaattttggcccataaattcacccgggtaaaaaactgggaaaaacccttcaatttgtgtaaatttcgactcaaaaatttttaaaatttttccc

SEQ ID NO: 127052 - DNA, 306 bp, Glycine max
  Clone ID: PAT_MRT3847_85734C.1
atatatagtgggcactttaatattaccaatgaattaacctccatgtataagagtaataataaataaataaatatttctatacaaatacaggttacgcccctgggtccacccgaaccgagtggttgtctgcggcgtttaaataccttttgtttttccggcaccttatatggccgaaaatggctcccttatttacccttgtttgaaaaaccacgtggcggggccccactatcggaaaaacccggggagtcccccccctcgattgggggtaccgtggaccctttggagaagttatttgcggcaattttg

SEQ ID NO: 127053 - DNA, 372 bp, Glycine max
  Clone ID: PAT_MRT3847_85735C.1
accggcccggaaaacccgggacgacccatttcgaacgttcaacaccccgcaacaacacgacaggaaccgagcgaaagtgccagaaccaaacaccccccaaggccaagaccggaaacaacggagacggaagaaccggccgaaagggagccagagaggcaccgcagagagacgaagaagaacacgccgccgcgaacgacccggccacaaccaccgaagacacgacaaacacgaacaaagacgacagagaacacgggcaccggaagcaacacgaaggcaccgccaaagacgagaagaccacacgcaacgaggacaagccaagcaccaaagagcggacacagaaaacccagacgagaccccaagggggccaaccgg

SEQ ID NO: 127054 - DNA, 686 bp, Glycine max
  unsure (1)..(686): unsure at all n locations
  Clone ID: PAT_MRT3847_85736C.1
gtacagcctcgcaggntatccggtnccggnnaattcccggngtcgaccccgtccgccgggaagggggcaataatcaaacattcatgattcaacaatgaagaattgattcaattcatagtctcaatcttccaaatttatcacagatccaaatccaccaccatgattcccgatctacccctccccttcctcttctccttattcatcatcttcttccacctcgctgaatccaaaccctccctcaccgccacgccaaccaccctcccagcctccggcgccaccgtcaatctccgctggtccggcatcccttccccctccgacctcgacttcctcgccatctattcccctccgacctccccgcacgacaacttcatcggatacctcttcctctcgcagtccgccacgtggcgcaccggctccggcaacctctccctccccctcgtcgacctccgctccaactactcgttccgcatcttcagctggacccgcgccgagatcaaccccaagcgccaggaccacgatcacaaccctctcccggtcacacgccacctcctcgcgttttcggaggaggtctccttcgcccttcccggggggccccaacagatccacctggcgttcggtggggcccacggcaaggaggaggatatgcgcgtgatgtacatcacgcgcgatccgagagagacctacgt

SEQ ID NO: 127055 - DNA, 242 bp, Glycine max
  Clone ID: PAT_MRT3847_85737C.1
gaagcgtgaatggtcgcgatagtttcggagaatcggaggttacagccgttggtgacggttacgtgacggaagttagttcggttgcagaggcaacgtcagagatggtggaatcgttggagttaaagcgctgtcttggcacatgattcgattccggagaggtcacctgtgtcgtacgttttggagaagttgtaccatgggaattctgtgtggcgcacgacaactattggtgatgacaagggacg

SEQ ID NO: 127056 - DNA, 290 bp, Glycine max
  unsure (1)..(290): unsure at all n locations
  Clone ID: PAT_MRT3847_85738C.1
ctgagaatggnnaaccggtgactgggngcatcngataatcttcgttnatggtggaagnanaaagtccggnttgatcnnaatggtcctgctgnnatagccangtatcangcttataacactatnncatggaggaatgatggatgcaattccattgntccantncacacaccttgcaagacctgcatgncncaaccttgggttcactcttgtcggcactcatncngcactgtgntccccctcataggcgntttccatttganaagggtgttctcaancatggtntccaaggg

SEQ ID NO: 127057 - DNA, 176 bp, Glycine max
  Clone ID: PAT_MRT3847_85739C.1
acccctatcttggttagcaaaagagaaaatatgtgatgtgtactcaccggcggtggataacctcccagtggggaaaaaactacaggggatgggcggatttttatttagggaaaaaaatgtttgcctttttaaaaaaagaaactaagagaaaactcaaagtctggaaaaaggaagaa

SEQ ID NO: 127058 - DNA, 184 bp, Glycine max
  unsure (1)..(184): unsure at all n locations
  Clone ID: PAT_MRT3847_8573C.1
ccttggtttaagaaactcgacaccgacaagatgaggggcttttaacaaggagccccgaaacccaaaccctaatcngattcgctttcgattatggcgtctgagagcgctattcgatcgagtcccgtggccgtttctgtacattgggagcttgatatgcatgacctttaagagtgagaacagatac

SEQ ID NO: 127059 - DNA, 296 bp, Glycine max
  Clone ID: PAT_MRT3847_85740C.1
catctccaaacatcacattttctatcttcaatataaatctcagctatatataaaccaatttataataaaactacacatacagatcttattccataatcatcatcatctactaacaaaatgctcaaacctctataaataaacttatactctccaaatatcattcaatatttcctgtaataaatcttcaaagaacacatctcatttaaccccatatgtaaacttacacattccaattaaatttatatatcctttatcatatacatattattctctaatctactttatcatatattaat

SEQ ID NO: 127060 - DNA, 806 bp, Glycine max
  Clone ID: PAT_MRT3847_85741C.1
cctgtggggcatctctaccctgggaagatgggaaagtagcaaccttccattgctccttcttggcaaacttgtcaatggacataacagctattggcacaagaggaactcttcacgtgcatgattttgttatcccttatcatgagaaggaggcatcgtttttggctggtacagaaaccggctttaatgatcttgtcacagggtgggataaacagccaagtaagcatacagtaaccactgatctccctcaggaggctcttttgattagagaatttgcccggttggtcgcagaaatcaaattcaaaaactctaagcctgacaagaagtggccaacaattactaggaaaacacagctggtattggatgctgtgaaggcttctatccagaggggttttgagcctgttcagattcaggagtaaacaagtctcgccactgtgtctgattgtctaccctgctggagtgacacgatcctttttctgttgtgcattgatattccaaataaaattccattctacattgtatgtatttgtgagctgttcatctctgcaatgcggtgggaaaacaggttatgtaaaatacaatcattctaatggtcaaatttcatgtctttcgaggatggtgattgatcggtgaactaaactgccttaacagaagaccagtgacgactagaataactagtacattggtcttcatcttcatcgtataaccagttagttgatctgttatgcatgtatcaaaatgacttgtaatataaatgatttatttctccttgacataaaaaaaaaaataaaaagaaaacgaagcggccg

SEQ ID NO: 127061 - DNA, 385 bp, Glycine max
  unsure (1)..(385): unsure at all n locations
  Clone ID: PAT_MRT3847_85742C.1
agtatatatacaagactatatttgaatgaatctgccagaccataaaaaaataattggcagtaagtttgaaaaagcaatttaaaagaatgatgataagaaacacaatgccacaaagaatatcacatctgttatctttaagggtctctgnngncaccaccatagcngttgtcgcttattttggtggaatctcttggcgattgtatctttccagcctgaggggatagtatcattttttttataggatagcccatttcttgtccaagagagcattagctggcgtttttgagaaccttgtttttgcccctctttttggaaaacgggttacgagtatcttgcccttccattgtatcgaatatcccctcgttccgatccttagtggtggtgt

SEQ ID NO: 127062 - DNA, 292 bp, Glycine max
  Clone ID: PAT_MRT3847_85743C.1
gggggtgcttattagcacaccaccatgggtatggaccttgatgaggtgatgaagatagcgaatcgacattgtgcatgggatggacatgcttttgaagaatatcacttactagagaggggaggaacactttggctcttttattcgactggggcacaacagaaagggtatgcgatttacatatctacgattcagaaaccttattatcttacttacctacacgtgtggtggttgataattttcactatgcttactatgaaaagataatggctgtcatatatacatgagtgcattt

SEQ ID NO: 127063 - DNA, 1535 bp, Glycine max
  Clone ID: PAT_MRT3847_85744C.1
gagagagacctaacttaactattgcattgccacgcgtccgaaatccccgtatttaatccaggcaataaaaggccaatgagggaacaagagcacaagacaggaatagaagaagaagacccttgcacatagcttcaaagaaattaattaagatgggtcaccattcttgctgcaaccaacagaaggttaagagaggcctttggtcccccgaggaagatgagaagctcatcagatacattaccactcacggctatggttgctggagtgaagttccagagaaagctgggcttcaaaggtgtggtaagagttgtcgcctgagatggattaattatttgaggcctgatattagaagaggcaggtttacacctgaagaggagaagttaattataagtcttcacggggtcgttggcaacagatgggctcacattgcaagccacttaccaggtagaactgacaacgaaataaagaactactggaattcttggatcaaaaagaaaattagaaagccttctacggtgacttcatcaatgaccactacacaaagtgttgatccaccagccccaattcaattttaattccaatcaactagatcactatggcaaccaagaaaatttaacagcaaagccaccgatgcaagaaaccttattttcctcgacgtgccccctatttatgtttgacactagttcattagatcaagggacaacaacagtagacaccaccaataatgtacgagcagaactgttccaagattcattgggtttgagcagtagtgaaacgtggaacatgagccaccatcaagtccatgctcttcctcctcaactagcagcaacttttacagcaacaaacgttattgatactacgaattatctgccaccattgatagagaacgttgaaaacatggtgccaaatatggaagtacagtcttgtagtatagacgaggaaggagaaatggcactagagtgtttgcggagacaagatttgaatgagtgggtggagaatcaacaacaatgtcccagctttcttttctgggacaatattaatgttgaaggacaacttcgaggggaagaactagcaccaaacacgtcaaatatgggaaacaatacactttcaccttttccttcctctttatgactgcaacaaggactgtccccactccccactatactctttttctcatgctccctctaaccaggaagagttttcaggaatggtccggcccaggctgaaacttatattgcagagattgctttttcttcttttgttttttttccaacctctttcgattgctgattggaaagattcagaaaaatgagtgaagataaaatatgttatatatatataaccaagcgtgatgggtttattactttttattgagtgttttgacatggaagagggaaaaaaaaaagagaaggaataataataaaggcgattgtaacccgaaggaaagtttgattttgaagatatatatggaaagcatcttcaatttgcttgttttttgactgtaaaaatcgtcggttttgaatgagaataaataatgg

SEQ ID NO: 127064 - DNA, 455 bp, Glycine max
  Clone ID: PAT_MRT3847_85745C.1
tctagcccatttgggtatgtctatgttataaactttgattttgtacaagctcaagagcatttctatagtgtcttgagctccatctggagaacaccaaaaaactgactgggcaccttctttttctggggggaaaaacaaatgcagccgaattccccatttccctccaaagaaagggtcgggggccaaaaaaaaaaacgaggcagcattccccccaacccctagagggtctcgggggggcacacccttataaaactttttaaaaacaaggcaccattttttgcggggggcccagaaatccccgttcctgaaaagccgattaaatttcccaaaagcggggcccgggagtgtttctacaaaaaagtggtccccgccttctctaagggtaaaacccccacccactaacccaggggtgtgagccccccctccctgggggaaaaaagaaccgccattttggg

SEQ ID NO: 127065 - DNA, 714 bp, Glycine max
  Clone ID: PAT_MRT3847_85746C.1
tgattgtatccacactgttctattggaaccctcgtctaaatctatagtgcctaattgcctactttctggtgcctgtctcatttgataatgtctaaaatatcagggatgatgaatcatgttctgttaaggagttccatttaagttcttgtgttattgatacttttcacagtagtatgaggactagggatcgatgtcattttgatctttagctatttttcaggtccattcatttatactttaaattttaattttaatggccatcgtgtctcattctatttgttcaaacctttgggcattttcagtcttattttattattcaatattaggatgaaatttatgtaagaaatcatcagacttaatcttcccagctaaatattattccaagtctttactatttcttggagcatgaacaatttcagttcttgatgagacactaccctggcctgaatcagttctcttttctgtccttgtttttggcactatattaattcaaatttcctttaatcattaaaatccctgactaagtcctaaccatactttataaacactattgatagtatgatatttaccttccgagtaattggggctaacaagttatagaaaatgtgaatgacagtatcacttaaagcacctctgtgagatgagatacaccagaatgacagtcttggtccttctctttctgcttataacttatgtcttatagtatcctgatct

SEQ ID NO: 127066 - DNA, 636 bp, Glycine max
  unsure (1)..(636): unsure at all n locations
  Clone ID: PAT_MRT3847_85747C.1
aaatgatgatgatgatttgaatgatttggatcagggagaggatcaaaaatacacatcatcttgttttggcccagtttgacaaggtgacacgtaccaagagtagatggaagtgcaccntaaaggatggtatcatgcatataaataataaggacattctcttcaataaggcaactggagaatttgacttctgattttgtcagggattggtcttgccatttttgtggcagtgctttggtgaattacaggtactctgaggcatttcctgaagtttgccatttgtcaagtgggatatgtatgtctattagctctgcatacttggacagtttaaactgcagtgacgctcgtggttagttttttagccgtcataaagaacaacgataatgtcaagtttgcttttcttggttccaacatgatctctgaactttagcccaaaaagtgaaagaaaacatgacaatttcaggaatatgttttctacatcagcaacgttcgtcatttcttgtgttttttttgggcaaaactaaaacatggtttttaaaggtcagatggaaattgtagtgttatcttggaaaccagtgccgacacttattgtacaggttactgtgttggagaacaatctaaagacttgaacctaatttt

SEQ ID NO: 127067 - DNA, 591 bp, Glycine max
  Clone ID: PAT_MRT3847_85748C.1
aaaatgtacgtcaaagttagcatggacggggctcctttaccggtccggattcccgggtctacccacgcgtccgattcggagctggtcttggccttggagaagttcttcggttgctatggaattcgcgaagcgttgaaggatgcggagaatgctgaacacgttcccatatacgaggacaaagatggtgactggatgctcgttggagatgtcccttgggagatgtttattgagtcatgcaagaggttgaggattatgaagagatcagatgcaaagggcttcgatctgcaaccaaaagggtctttaaaaggatttatagaaggcgtaacaaaatgaaaaatatagatgaagcaaaaaagattggcttctaatcaatgtcgtacacgttttgaagacatccaatttcatgttgtcgttttattatatttgaggaagaagaaacattttatagtatggtgcatgaatcagatttctgtctatgttaagacctaagaatgaaggaaatatacagaagtcagtttaattaaatatagggaaacctcatcgttttagtaaatggtttgtcatatttgttgatatgctgcacatttcagc

SEQ ID NO: 127068 - DNA, 1209 bp, Glycine max
  unsure (1)..(1209): unsure at all n locations
  Clone ID: PAT_MRT3847_85749C.1
ctcgagccgaatcggctcgaggaatgcatcagatctcaacacgtggaccgcgctgcttataatcggatgcaaacctatttatattcaaccctttagtctccgtttctggtccgcccttcgtccgctcatctattctcgcctcagctttcactccaaacccttcccaaaccctaaccaaccacctcacccctctcgatctctttcgccgatccccgaaaccttccctatccgataattgacatttcgccgccgaattttttgggaggaacaaatccacgatggcggcctcctccaccagccaggtctacatccaggtaatcgacgatgtcatgatcaaggtccgcgacgagttcgtcaacaacggtggtcccggcgatgaagttctcaaggagcttcaatctatatgggaatcgaagatgttgcaagctggtgccattgtcggccccatagaaaggtccggggcgcctaagccaacgcccggcggtccaattactcctgttcatgatcttaacatgccttatgaggggactgaggagtatgaaactcccacagcggaaatgcttttcccccctacgccattgcaaactcctcttcaaacccctttaccaggaactgtggataactcaatgtataacattcccactggacctagtgactacccgtctgctggaaatgagcctggtgcaaataacgagataaaaggtggaaggcctggtccatacatgcaacctcctccttcaacgtggacgaaccagaaccagaaccaaagggctccacttgacgtcaatgttgcttacgtggaagggcgggatgaggcggaaagaggagcttcaaatcaacctctgacacaggacttcttcatgtcctcggggaagcggaaacgtgatgaaattgcttctcaatataatgctggtggatatatacctcagcaagatggagctggagatgctgcttctcaaatttttgaaattgaagtgtatggagggggcatgtccattgatgcaggtcactctacttctaaaggaaaaatgccagcacaatcagacaggccagcttctcagattcctcaacttgatggaccaattccctatgatgatgatgtgctttctactccaaatatatacaattatgggagtgttcaatgaagactancacattgcaaatacaccagctcctttcgaagtaccagcaagtacccctgcttccatt

SEQ ID NO: 127069 - DNA, 206 bp, Glycine max
  Clone ID: PAT_MRT3847_8574C.1
gtcctctctgagattttgctccatagaccttccccttcatctgatttgcagagactaacccaagaaatgaccaaccaaatccaggtgctttcttggatcttgctagagagagaaagtcccactttatctctcttatcttttatactttctgagtgagttgagtgcgtacgtgcatctgagggtacagtgcaaaacagtggagtttg

SEQ ID NO: 127070 - DNA, 171 bp, Glycine max
  Clone ID: PAT_MRT3847_85750C.1
tagcttattcaattttaaaatctatttttcaaaaacattccatagaaattttaaaaacttcaatctaatcctctccttattaactcaatctacacaccaaactcataacacaattacaaatctttaacacaaatcttctaatacaactttctaacaccaaaacattccttc

SEQ ID NO: 127071 - DNA, 1322 bp, Glycine max
  Clone ID: PAT_MRT3847_85751C.1
cgtccacgcgtccgaaacacccaccccgacgcagttcctccgctttgggcgacggaggctgcaacactctcaactacactacacgacgccggtttgctttttccaaacctgtcaagctgtactattactatagtttcatttcatggagacgcaatcgcatgaagatttacagcaaccgccgccggttacttcaaatgacactcacagtgatgatgcgtccaaccacagagacgctgagcaaaagcaagatattttgaggactgaagaagttgtgcagattctacaagttattgcatctacggggaggttctggcatgactgggataagttgaagagtatgctatcgtttcagctaaagcaggtactgtcagaatatcctgaggcaaaaatgacaagtgagcagcagtatgcatcattgggtgaatcctacattgagttggtcaacaaattggatgaagcactcacttgtttcattgaaggccctccattcacgttgcaaaggctttgtgagatcctattggatgcaaaaggcatttatccaaatctttcaaagcttgctttagctcttgaaaagaacttgttagttacttctacattgacaatctgcactgatccatacccacaagctacagaaaaagagccagatgaccaagagaaggcaagtgaaaagcagcagcagcagcaacaatctgatagtgcacaaaatggcattgagcctttggtgtctgacaatgacgaagtaatgcccgaggctgatgtaggtgatgacatgaccattgacatggaagcttttgaaggcgttaaatcatcagaaataaattccgagcctaatgctaataatgcataagcttcatggttgctgtgcatctttaattgcataaactctgatgagctcaaagactaggatgttttcacttgtggagctccaaatgctatgaggacggcgtggaccttggtcattgcagagtgctttattccctggtttggtaatcattggagctagacattcttagcatttaaaaacagaacagtgtttctaattgtatctcttggatgcaatgcttgtattggtagcatgaagttgagtatctcgctgtagatctgcttttaatttgtgctttaaattcactagcgtgttcaggaactttggcatccttgactatggtagtagctaccttgcatattggttggtttttggcaatgaagtttatcataatgcatccacaggtaacatcttgggccatccaaatgtgtttcattttgggtctgttgctcacccaagaaatataatccaatgaacttgtcgaacttttaatatgttt

SEQ ID NO: 127072 - DNA, 2084 bp, Glycine max
  Clone ID: PAT_MRT3847_85752C.1
ctcctctccgcgagccgcttcccttctcttcacatctcatctaaatctcaatctctgtctctgtctctgtccgcctcagctttcactccaaaccctaaccaaccgatctctttcgcctatcccggaaaccttccgaatcgtttaattgacgctacgccgtggaatctgggcggaacaaatccacgatggcggcctccaccaccagccaggtctacatccaggtaatcgacgatgtcatgaacaaggtccgcgacgagtttgtcaacaacggtggtcccggcgacgaagttctcaaggagcttcaatctatatgggaatcgaagatgatgcaagctggtgccattgttggtcccatagaaaggtccggggcgcctaagccaacgcccggtggtccaattactccggttcatgatcttaacatgccttatgaggggactgaggagtatgaaactcccacagcggaaatgcttttcccccctacgccattgcaaactcctcttcaaacccctttaccaggaactgtggataactcaatgtataacattcccactggacctagtgactacccgtctgctggaaatgagcctggtgcaaataacgagataaaaggtggaaggcctggtccatacatgcaacctcctccttctccgtggatggataacaaccagaacaacattcaaacgggacctagtgactaccaggctgctggaaatgaacctggggaagatgatgagataaaaggtggaagtcctgctccataaatgcaaccttttccctggtcgggcaagaactagagtgatagggctccacttgacgtcaatgtcgcttaggtggaatggcgggatggagcggaaagaggagcctctaatcaacctttgacacaggacttcttcatgtcctcggggaagcggaaacgtgatgaaattgcttctcaatataatgctggtggatatatacctcagcaagatggagctggagatgctgattctcaaatttttgaaattgaagtgtatggagggggcatctccattgatgcaggtcactctacttctaatggaaaaatgccagcacattcagacaggccagcttctcagattcctcaatttgatggaccaattccttacgatgatgatgtggtttctactccaaatatgtacaattatggagtgttcaatgaagactacaacattgcaaatacaccagcttcttctgatgtaccagcaagtacccctgctcctgttgctcaaaatgaggttgatgaagaagatgatgatgatgatgagcccctaaatgaaaatgatgatgatgatgatttggatgatttggatcagggagaggatcaaaatacacaccatcttgttttggcccagtttgacaaggtgacgcgtaccaagagtagatggaagtgcaccctaaaggatggtatcatgcatataaataataaggacattctcttcaataaggcaactggagaatttgaattctgattttgtcggggattggtcttgccatttttgtggcagtgctttggtgaattacaggtgccattgagtattttgtaatctttctttgattataattattaaattaaagctggaggaggaagagaaaagtccgtaatactttcgtcactgttatattgatgtgggcctgttgtacataaaggatgagcaaattttggcctttttacatggataggtactctgaggcatttcctgaagtttgccatttgtcaagttggatatgtatgtctattagctctgcatacttggacagtttaaactgcagtgactgtcgtggttagtttttagccgtcataaagaacaacgataatgtctagtttgcttttcttggttccaagatgaatggtaggaactttagcccaaaaagtgaaagaaaacatgacaatttcaggaatatgttttttacatcagcaacgttcgtcatttcttgtgttttttttgggcaaaactaaaacatggtttttaaaggtcagatggaaattgtagtgttatcttggaaaccagtgccgacacttattgtacaggttactgtgttggagaacaatctaaagacttgaccct

SEQ ID NO: 127073 - DNA, 305 bp, Glycine max
  Clone ID: PAT_MRT3847_85753C.1
cttccttattttttttttttttatttttttttcatgggggggaaaaaaacacaaaaataaccccccccttcattgttctataccaaaatatgcaaacttatctcaatttactcacaaaccatagaggggaaaaaaaatgccccccccccaaagcccttttttttccccccccccacaaaaacaccccgggggacaaacccgactttttttttcccacttttagaaaaaaaacgcttaaactagtgacgaaccttccggaccacaacaatcacatttggggtgccctcaacaaaaaaagatatcac

SEQ ID NO: 127074 - DNA, 217 bp, Glycine max
  Clone ID: PAT_MRT3847_85754C.1
gatatcttatgggttcctaggcccttaaacgccgtgggactccaggaaacatgaggatacactaactagtgccgtgagggcaaatagtgactgatactcagcatattctaaccatgtgaagcgcccctggttaggagaatccacctaaaattgaccaggtctttcctgggggggggaatgaccaagaacttgtaggacttaacccctaccccggtgg

SEQ ID NO: 127075 - DNA, 519 bp, Glycine max
  Clone ID: PAT_MRT3847_85755C.1
ggctcgaggattctccaacatttgggtgtttaagctattatgatatccttgtcgacacatgggcagatgatgaaaatgcgccgtagtgcccttcatgccagagagggaacttaagaggaattcctgcgatgcaacagagcctttgtatataccacatctcggttgaacacagcttactgttatcgcaatctcactaatggcaatatcgacgctctctgttactggtaatttataattaatgtgctcaacatacatggtctttagtgtaaatataatgatcaagcgtgctctggctaggtgcgttggtctctagttcttatccagatgaaatttacacgttgacttttataagaaaacttatatgaccattattgtgctgtatcaagatgtgagatgtccatatgcacaatgggacagcaactgctcatgagctgctaatacattactcatagaatggtgcctgtgtgtaaaaaagttattgttgtaaaagtgatagttaagtattaataactgacacat

SEQ ID NO: 127076 - DNA, 445 bp, Glycine max
  Clone ID: PAT_MRT3847_85756C.1
aattcggctcgagcattctcacacacggctgcattggccacaatgcacagctacttatcggtgtttttaccaacagaagcggcggctcactatcaaccgcagttaaaccccatcagcacgatcacgaatgctatgaacgcttcttatgagacccacaaacccttcacgcagtcactaatagaccagattcaacacattctactaacaacgatcgttactggaatcgacgtgtggaatctgacgatgtgatatgcacctgtatggcgtactccaacactgctgatttttcgatggtcgaacaaccagcccgtagtggtggccgatgaccaaaccgacgagacgctgcgggggaggttcctgatagcggtgaccaaggcctgagtcgatcaagcgtgttggaagagacgctccttcgaggacaatcatgaacagaatgaactctagc

SEQ ID NO: 127077 - DNA, 343 bp, Glycine max
  Clone ID: PAT_MRT3847_85757C.1
cttgacgctccctggacatcttaactcctacctgaggaatctagccttgaatctgatcccattcctacgtctccacttcatattcgtgctgttggcaccacttacacaacgcatgtcttactagtacttgttcctcactgtacccgctctcacctatcaattgtgggacgccaagatcatgatctgtgccatctatccccgacttggccggtacctgacagcatccgccattttcagggaaaagatcagcacctacgaagtgtacaatcaaatgatcaactcccataacgagagctctgactacttcgactattggattaccaacagcgttaaatccttgtgt

SEQ ID NO: 127078 - DNA, 268 bp, Glycine max
  Clone ID: PAT_MRT3847_85758C.1
caaacttctaaatctcttctgccatggtccgaggatctaaagatcgttggaagatgcatagattccatagcttctaaaactagtgtggacccagcatacatcacttggtcttacacttgtaataggaaattaaccgaacctgataaaattgtagaggacaagatgacatttctagagaaaattgagtctgttcctaaggattggtggggtgaagacatatgtgagctggacattgatctttacaaacgagtaatggttgctgtggaga

SEQ ID NO: 127079 - DNA, 296 bp, Glycine max
  unsure (1)..(296): unsure at all n locations
  Clone ID: PAT_MRT3847_85759C.1
agaaggggataggagcnacgcactagcacaagnncgaccaggcgaacccgggcgcggaggaagacncnccctcaaacaccagggaaaaccagcccagaagcccgcgacgacaaaggncacccagcagagagggccaaaaccggnggaaggaccgcngcggccaagaaaanaggagnggaagcangngagaggacaacgacaaagggcgnngccgngaacnnggngacaaaaangacgggnacgaagcannngggcagngccaaaacngccaacacggncaccaacggcaggggaac

SEQ ID NO: 127080 - DNA, 458 bp, Glycine max
  Clone ID: PAT_MRT3847_8575C.1
agagaagacgacagaagggcctccatcaggatcttcacaatatctgcaacaagaaaaactgttattatgacaagtacaaaaataataaaaaaagaaaaggccaatgtgacctctacatccacggacagtcagagagattcaatttcttttaagagaacaaatacaaagagtctctatcaatgatacaatcaacaacccatcccctattttaccctaattgcaacccaataaactgattcacattccaaggaagtacaaaaaaacaaatctttagattttgagctccaaaatattgggtcgggttttagttcaggacaatccattaacaaaaaattcaaggcacgaggaattctagtaacacactctttccgacatactttcttgtattagttaaaattattgacaactacaaaatcatgagaaaagttcatcgaataagatgtgaaacccacaaaaat

SEQ ID NO: 127081 - DNA, 113 bp, Glycine max
  Clone ID: PAT_MRT3847_85760C.1
atctctctctatctctttgtctctcatccagatcttgcaaaaaggtagaggcacaatggaagagagggctccgactcaaggggaagagtccgtgtaattggagaagtgggggt

SEQ ID NO: 127082 - DNA, 738 bp, Glycine max
  Clone ID: PAT_MRT3847_85761C.1
cggccgctcaggcggcggcgggattttttctcttccctttgtcattcaatgtaagagtggatatactagtaccacgagaagaaaggagagcccactccttccttggtgctatctaggactgttgatcccctgaaggacactgactatctctataatactatgaacaatgtttgcgtgctgggcaaagaccccaatgccgaatttgacctggaccaattctgcaaagatcccaagcttgtgaaagctgcaagatttctatccacatgctgaacctgcgactactggcgactcccctacgtccaccagtgtagtgcactcctgttctggatcaagcatacctgcactagaccctgtgcaaatagtctgttgaatcacatacactatgcacccaaaggatatagaccatccccatcaatctccatcctgatactcatagcttcatacaagtatgacgaaaataataatgccatcttcgtgacttactaatctgaatcacatctccactctgcacgcaaatctgtgaacgaccagagtagtgtcgttgtatctctcacaaatgtctcacctctcttgacctgctgagcgggctgcacgctcttggtgataacatgtgctgtgcttacactattgatccaggcactgatcctatggcagatgctgtgcacaagaataccgctgctattccgcctcagactgttgccaagaactaccaccagcacgagatcaccattgtgtatc

SEQ ID NO: 127083 - DNA, 134 bp, Glycine max
  Clone ID: PAT_MRT3847_85762C.1
ctcggaatgcgtctcgagcgggtattgctgatcacatgaacaaggacattagtgctcttgcacccagtaccataaaaatcaaggtggtcgcacctcctcagagaaagcacggcgtgtgtataggtggttctatc

SEQ ID NO: 127084 - DNA, 230 bp, Glycine max
  Clone ID: PAT_MRT3847_85763C.1
agcatgagaacggcactagccggcggagtaatgcctgtctatgacgatgctttggacattgattcacaccacgtacttcacgtaggctggcacacggctgatcactatgatgatccgtgactaccatagctagctgaatctagagagatactctcacagtgacatcatgctgaacccgtatctcacagctggaaagttgacgcttataacattcgtttctacaccacaca

SEQ ID NO: 127085 - DNA, 1536 bp, Glycine max
  Clone ID: PAT_MRT3847_85764C.1
ccacgcgtccgcttattcagagggaaaaatcgatctcagctatcatatcttctgtggcaaacatgatacccgagaaataccttcttgagcaacgagcagtcgttgatgttgatggagggacattgctgaatgaagactatgacatcagatctgttcttcaatacctgttagatgacgtctctgagtttctatccactaaattagttgaagtaaaagaggaaagggaaatatctgaagataagggctgcatttttgttctaaaagcattcattgattatttacttgagcgtgagaaagaaaattttggtgctcggaggaaggacaatgaaaactctgtgacgttgactaccattcatcaggcaaaaggtttagagtgggatgttgtcttcatagttaaggcaaatgactctgagatccctctattacatgatttcaagggcaccgtaaaggacactgcagccttacttgaggaagaaagacgattattatatgttgcaatgactcgtgctcgggagaagctttttattcttcatgttatgatggactcaaactggcagatgcttcaaccttcaagatttttgaaagaaatccctcgtcatcttacagaagttcagggtgaaataagttttcaagaactactgataaagcaagaagctcttcaaaaggaaactgcccattgtaccactgacttgttgataaaagagaaacaatctgaagcagatgtgatccctatgcctcatgaaatacttgataatcattctagtgagacttccaatgagcttgcacaatttgcagaggcaaacaatagaaatgatttcttaagaagttttttgcagatttagtgttgagaacaggtctattgtttcccatttattccatcagtgggccaaaaagaaagcatttcaagatccaaagagattgcttgacaaggttagttttgtaattgatgaacgcctcagacagaagagaaacaaaaacaaggatttgttgaatacattaaaatcttgtttaagctgtgatgaagcatttcagtatgctcaatatgttttgagatgggagcagattcctgctgataaacgtgctcatcttatgagagaaaaacaggaacatttcctgaaattaaagattgagaatgcaatgggttcggcaacaccaactgacaagcagatttcatatttgaaaaaactgggttgcaccgcaatccctacctcccgcctccatgcatctcatcttattgagcaattcaaatcattgtaagaatccagtgtgggaatcttctgtttctcctttccagtctctgtatattgaaggccaagttagtttgcaagcttgcatacaaatttggttaagcaaatagatatgaggacctgtatgaatttttattatctactaaagttaaaattttgcaactgttatgaatggcatttattttctgtagttatcacatttgttttctttgtaaatattcccttgaaatctatatatattaattgtaatgactgtatggttgtcataaaatttataaaagattattgt

SEQ ID NO: 127086 - DNA, 552 bp, Glycine max
  Clone ID: PAT_MRT3847_85765C.1
tactgctgcgtgaagacaacagaaggggatattgaagcaagctcatcactgtggatccttcgctggggattgtgaagatgaaggggaaaagccaaagccaaaggattggaaaaaagagtagaaaaatgaagggcgcgttgagtaccactaccaacaccactagacacttgcagcttcagctaggtcaagtgtccctcattccactccaacaaccgtcttctactactgctactacttcttccgcagtttcttgcttccagaaccttctagatgcagaagctcccaatgcgtcttcctctcgcgtggcgctcatcgacaacgctgccgccgccgccgccgacgacagagactgtattctcagccaggatttcttttgcactccggattacataactccggataaccagaacgttttcaacggctttgattgcgatagggaaaatacgccttgtcccaaatcgccggagaagctcaacactaccaaaagcaagagatgccgacctgatgctatgtcagtacaccctctcagccctaccttctctagtgaccatc

SEQ ID NO: 127087 - DNA, 414 bp, Glycine max
  Clone ID: PAT_MRT3847_85766C.1
ggctcgagagctgctcgacactggacattgtgcgccctgcatggtgatggcaaacctgagacgtactacagtggtgggccacattgactgaactatcttttacggggaactctgcatctgcgcgaacattctaggcagacagagatgctgtgcggaagcacgcaccttacgctgcatacgggttctgagacatgcgttgcctcgtacgcatgagccactaggtacccggactagatcgtgtccgacacgggatcaagcggtgtacgagtggggttgaggggctacatgcagtggttgccgcattagctgctgtacacgctctatatcaatctgaaccggcggttactgctgggaatgaataagagacactgactgtagtcattgcagccccaacggtgtcttacattgctgtta

SEQ ID NO: 127088 - DNA, 474 bp, Glycine max
  Clone ID: PAT_MRT3847_85767C.1
ctttttctcccattcatttatctggattgtgtttttgcctccattcagtcctctggcttgagctgacacactgttttgcattcagcatattatcttaacctgttccccaccgtgtttctggattcatatcacgtgggggttctgacatttttgtagtttctttgctgtcctgtcatggagtcttggagctatgttgctgaggagaaagggtatgtctccagtgaggcactatcacctcccaacacacttgagagaagcaaaggttcctgttttggttgggaactgaaaaccccatgtagtttttccaatgacatgttgggtttgggccagcaaaacgttgaggatcaaggttttggggagttgggttttccaggaatgttggggaagcagttgtgcggtgatgatcctaatcctattggtgctgttcagagcagaaaggtggatgatgttgttgttgactgcagaatcactagt

SEQ ID NO: 127089 - DNA, 215 bp, Glycine max
  Clone ID: PAT_MRT3847_85768C.1
tttaagcacgcgatctatatggagaggcgcaacactgttttttacgcgaagggatacgatgctgcatatcatattattgttgtgtttaggatgacttctttggacatttaatggactatgtttctcgccttagaacgtcggaattcacacgaggagaccatcaaactttaagcgaatcctcacaatgtacagtccttttgcgagagtcatgcatt

SEQ ID NO: 127090 - DNA, 544 bp, Glycine max
  Clone ID: PAT_MRT3847_85769C.1
ttgcaagagaggcgcttaatgaatgatgaagtgaagaacaaaacatatgaagacagtagtatgcctatgcaaaatgttgtgtctcctgattcatcagttgatttcttggtatctgatgcaacaactgaggttgttggcagatcacattataacccaaccaatcatcaatataaatcaacagtcttcttgtcacaagaaattgattctctgagttatacttcaaagaaacaggatacatcagattttcaagaagattctgtactttcactttgctctgaggctgaccccgattccatcagtagctttgaggaggcatatgaacctagtccaatttcagttttggaacccttatttggagaggacagtcgattcagctctaaatgtggcgatcatgtatatgattcctctgaagtggatgatgaagaatatgatttgaatgtttcaagtgatgaagattgtgagaatgaatatgtagatgaccctgaagaaaagaaagatatagcaggattatttagagctgaagaaagtagggatttctcatatg

SEQ ID NO: 127091 - DNA, 279 bp, Glycine max
  Clone ID: PAT_MRT3847_8576C.1
cagactgtccgtgttgaacacattgcaaaaatggcactataataagtctcaggacatcccaaaggcccatatggaggcatgatcgtttcccccaaaaatcctcctccatatacaaagctgtcaatgctttatttgtgggtaaaaaaaaaaatatgaataattgttcaactaggaaaagtttaaagggctttttatcttcatgtttcctggggcccccaactcacatatttaaaattttctggtgcaaaagatcatatattcttgccaggaatattctcc

SEQ ID NO: 127092 - DNA, 425 bp, Glycine max
  Clone ID: PAT_MRT3847_85770C.1
tttttaagaaaaatgttaatgcataactaagtctgatgatacaaaagtgacatattatcgacaagtggtgcatgaatatgacaaataggatacaataatgtgggaaaaaaaaatcttagaaaaacatgaaggatcactcgtgttggcaaaaggagcctaatctatcgcctttggaggttgaaggccttgattgagacagcaaaaataataacaaatagcactgcaaacccagaaaccataattgctgaaactcctacgaaatcatgtttgatacccaaatgacttcttatgaactcttgcactgacatattttctgatttcatcacattggttatatccccaaactgcgaggcaaccaacccgtatatggtccaagccactggacatgcccaatagtaccaccttcaccacacaagaatggtttg

SEQ ID NO: 127093 - DNA, 607 bp, Glycine max
  Clone ID: PAT_MRT3847_85771C.1
gagagaactagtctcagttttttttttttttttttatcttataaaagaataataattagatatcaaatatacaaatattttacattgtcaatacatttaaactaaaatctacaattaaaggaaacaaaaaattacattaacatttaacacctaagaacatattgaaattgaagttattgaactgattgtaaaaagattttttaattgtaaaaccagagaaataaatgtaagttattaggcaaaataatttaacacaacgtgaccaaacattgcccatttctttcattcatgtttcttaaccagaaagtttgccatgccttttgctaactgagggtagtcttcaagtagttttcgttttgaaagagtgtcatcctcattttgtggggtccataacaccttgccagctaataattttgagagaacggttctaagcttttgtaaggcctccttcaaatcttccgttccattgatgttaggaagcttatgtgctcctttagcagctaccaagattgttatcttgtgataattagtaattaaataattcattgctaaaaacatcactctgggtttaattttacttctgttttcttactaataatttgcttga

SEQ ID NO: 127094 - DNA, 298 bp, Glycine max
  Clone ID: PAT_MRT3847_85772C.1
atctatttttttaattaataataatgatataagcgactcaaagcaataaaagcaaatggcttactttcgagttcaaagtacggtatcaaacgcaatcaatgcgataggaaaactaaaaatggttggatattacattttatcctatcttcttaaaaaaagactagtcgtgaaatctaaaatttctcaacagaacattcaactgcacttttcttgttcctgaaactctccttcctaaatgccaattttttattacactgatttagagaattaccaggtacaaaaattgaaacacgctccc

SEQ ID NO: 127095 - DNA, 397 bp, Glycine max
  unsure (1)..(397): unsure at all n locations
  Clone ID: PAT_MRT3847_85773C.1
agaacagaccaagtgccattttcatcaaagccggcaggttattaccaaaaagatatcatccaatactaaagcctgttattggaagaaaaaaataaccccccacccaactgatctgtccaaaattaaccaaccaataccagcttatattataaatttggcccaacataaaatcaatgcttattccttaagacttgcttataagttcggacaggtgctaaatggtgttccagcaagacaaggtccttgaccgcgctgaccaagtcttgatgcataatccctgcgcccgaaaaaactgtgcggacgctcacgcattgtgttgtgctcactggaccctttccanacaagaaaactgtggttcccactgcattaacaaatctgcctactcacatagagaggc

SEQ ID NO: 127096 - DNA, 465 bp, Glycine max
  Clone ID: PAT_MRT3847_85774C.1
aaaaaaaaaaaaaaaaaaaaaggaaaaaaaatgaaaaaaaaaaaaaaaaaaattaccaaaaaaggaaaaaaaaaaaaaaaaaaaaaaaaaaaaaaaaaaaaaaaaaaaaaaaaaaaaaaaaaaaaaaaagggcaagtatagggggtgttcgttttttaggttttactttttagaacgtgatctttttttttttttattttttttttattaaattctaatttcattttattgcccgtcattttaaaaaatcttgattggaaaaaccttgttgttttcaaattaattcccttttttgcaatttccttttttgccagttaggttaatagcaaagagctttttacccatttgctttcctaaaattttgaaaagttgaatgcctattggaactgcttttttaacctcggctttaagggtttcgggctttttggttactctaatcgttacctttttatttgcctttgtttt

SEQ ID NO: 127097 - DNA, 216 bp, Glycine max
  Clone ID: PAT_MRT3847_85775C.1
agcccaaaatattaacttaaatgaaaaaaaaccaccaaattttaacaattttttccccacgaaaattaacacgaggatcaaaacttaagagaatcaatgaggaggattagctcacaggggtactacaattttgggggcctacaaaagggggcacattaacccccttaaatgggggagaccacttcccaatgtggaatacaagattctgccttcctg

SEQ ID NO: 127098 - DNA, 395 bp, Glycine max
  unsure (1)..(395): unsure at all n locations
  Clone ID: PAT_MRT3847_85776C.1
cacctttctttttcctttccacccatggctgacccctactccaatttcttctcttcctcttcacccttgttccgtttcaaccacaaccaatatttcccttcttcaaacccttctccacaacaccacaaccacaactttatcaaccacacaaaaaccaacgacaccgccggcaccaccgtctttttccactaccaccaacaccaaactactactgctttttcttgttttccaccctcaccttttttgtgagangaactccccctcttcgagctgcgtccgctctgcggggtgcgggtgaagtggtgcacttgttgtctctttcccctgttggtcccttggtgcgtggtttttggctccctcctttgtgggtttttttgtttgtgtttttttttggt

SEQ ID NO: 127099 - DNA, 271 bp, Glycine max
  Clone ID: PAT_MRT3847_85777C.1
agaacacaaaatgtgacttacaaggtcatgtttacgcttcacatcgacaagggtcttcttctatgtgcaattccaaggtcatgaatagtggctaacagatcatatatctctagtgtttcagtttcactttgctatatagatttctaatttgcaatatatgactctgccatgttgctaggtgaagaagacattattttcaagtgtgtttatgaatgtatatatttccaaaagccctttttttttgttaatgtttatggaatttcagactttt

SEQ ID NO: 127100 - DNA, 370 bp, Glycine max
  Clone ID: PAT_MRT3847_85778C.1
ggagaagaagctcaaactgtattcctactggataagctcctgttccttccgagtccgatttgctctcaacctcaaagcactcgaaaaattgttgaaagaccatgctaggagatatgcaactggagatgaaattttactggcagatttgtttttagcacctcagttagatacagcaattaagagattcaacgttgacatgaaggaattccctactctatcaagattacacgagacatataatgaaatggcagcatttcggaaggctttgccagagaaccagccagatgcagtacattagttgaacctataatttgggagtgaaatgtgacctgatattaggttggaactattgtagcaggagcgactggtt

SEQ ID NO: 127101 - DNA, 688 bp, Glycine max
  Clone ID: PAT_MRT3847_85779C.1
ggggaaaattttgccagattttcggtgatccccgtttgatcgatcttttaatggtgattggaagtgaaatactcttaggctagccagagtaaggaaattatagtccatatgtcggtcatgtttcaagagtgagtcatgccaatttaatagatggtttttggttaggattaatttaatattgaaatactattgttcatgtgtttcagcactcgaaaaattgttgaaagaccatgctaggagatatgcaactggagatgaaattttactggcagatttgtttttagcacctcagttagatacagcaattaagagattcaacgttgacatgaaggaattccctactctatcaagattacacgagacatataatgaaatggcagcatttcggaaggctttgccagagaaccagccagatgcagtacattagttgaacctataatttgggagtgaaatgtgacctgatattaggttggaactattgtagcaggagcgactggttggccatcattagtaactcttgcaataaggttgctaggtacaccatcatggaccgtggataatagactaatagtgatttggtttgtataactaaaaagctcgtgattctttattttccgtctcatattgctgctattataccttgatgcatgcttcttaatggtcacatgtttctttgatggttaaaaat

SEQ ID NO: 127102 - DNA, 253 bp, Glycine max
  Clone ID: PAT_MRT3847_8577C.1
aaaaaaatctcaaaataaaacaaccaaaccacacactttacaccctcttcaaaatcgctggcaaggtccaggacaagaagaaaccatgtcttggttcaatctaaaatggtggggtcctaaaaccttcctttccgaccctccaatttcttcggttgtctaacctttaagtcctacaaaccactcatcctctacgctctaacacaatagggctgaaacaaccatgtcggagaataaaacagttactggtacaggg

SEQ ID NO: 127103 - DNA, 247 bp, Glycine max
  Clone ID: PAT_MRT3847_85780C.1
ctttgttttttctgcgatcattttccattgggtggaagaaagtctcaacctttagtggaaagagcaaggatctgagtgagtgagcgatcatgtgtggtggtgcgattatcttcgacttcattccatcggttcccgccgtctgagcgcaacgcgtgaccgtcgacatactgtggccgaatttgatgcatcgtttctagaagtctttggtagacaggcttttaaaggctattttcatagacatggatga

SEQ ID NO: 127104 - DNA, 503 bp, Glycine max
  Clone ID: PAT_MRT3847_85781C.1
cttggaacctttgggctgatttatgtgcttgtttatgtgcttgcatggtcgtgagaagatgatagaaggggaaaaaaaaaagaaatacaccgggtagcgaacccgcaaacagggtaaaagcaacggacaaggaaccaaccctctcggacacaccagaaaattgaacctgaccgctcaacgacgaaatcaaaatgaaacacccaatcaaaacacacgacttcccttcgaatggatgtccctgcggataaactgaaaacgcccccctaattctaacttaacacgaaaaaaacgaaaaaaaaacattaccccgacaaacaaaacctacggcacttccaccctcaacaacatccacaaaaaaaacaacagcaaccacctagaaccagagaaaaaaacacacacacccgacagaaaactcccagcaatcataccccccacccctaactcaactagcaaacccctaaaaaaaaccacactaagtccgacccccgaagtatccctccaac

SEQ ID NO: 127105 - DNA, 311 bp, Glycine max
  Clone ID: PAT_MRT3847_85782C.1
cttttggaactttccatggggaaattaaaatctactcaagttattaacccaaaatattttacacctcgattgatgaaggcatagagaatctctatattactaggttatcttatgagagaagattcatagcgaggtcaccaggaaaaaacattgatgactacctctaagattatggctattcagaaggagtggcagtatataggagagaacatctgaatagagcttccgctgtgaccacatctacattagtggcaacattgatggtacaggaggagcacttcacatgggccatatgagaaagggaacttggt

SEQ ID NO: 127106 - DNA, 925 bp, Glycine max
  unsure (1)..(925): unsure at all n locations
  Clone ID: PAT_MRT3847_85783C.1
gtgggagggagtgctactgatactgaaattgaaatgctcaaactgtattcctactggataagctcctgttccttccgagtccgatttgctctcaacctcaaagatcaattcaatttcctcttttacccgtgttcagagtttcttaagctcaaccccattggatttgttcccgtgcttgtcgatggagattcagtaattgttgactctcttgccattattatgtatttggaagataagtatcctgaccctcctctgcttcctcgtgatattcaccaaagagccatcaatttccaagctgccactattgtttcctcatctatacagccttttcaaaattatactgtagtaaaggctttatggcactcgaaaaattgttgaaagaccatgctaggagatatgcaactggagatgaaattttactggtatgttaagagtccatggagttcaataggatcagattgcttctttccacaggctatgaaatgttactggcagatttgtttttagcacctcagttagatacagcaattaagagattcaacgttgacatgaaggaattccctactctatcaagattacacgagacatataatgaaatggcagcatttcggaaggctttgccagagaaccagccagatgcagtacattagttgaacctataatttgggagtgcaggagcgactggttggccatcattagtaactcttgcaataaggttgctaggtacaccatcatggaccgtggataatagactaatagtgatttggtttgtataactaaaaagctcgtgattctttattttccgtctcatattggtgctattataccttgatgcatgcttcttcatggtcacatgtttttttgatgggcaaaaaaaaaaaaaaaaaaaaaaaaaannncgccggcggttctggaggatccaagc

SEQ ID NO: 127107 - DNA, 1243 bp, Glycine max
  Clone ID: PAT_MRT3847_85784C.1
cttttataattattttaaaagtttaatttcaatatattattggtgactcgtaatttgtgaagttgtttatacggtcaactaattaaaaatcacccttaattttgaattattatattttatatcaaactcattgttttaaaatattttcatattgcataatttcctttatttttataaatagcatggtattttgtaatatacaaaatcttaggtcataaaacaatatttattgactaaattcgtgatccaatattccttttattgctttgctacttcttctggaggtgtagtcggctcaagaagaaagtgaagtgaaagaagggggtgggagggagtgctactgatactgaaattgaaatggaggagaagaagctcaaactgtattcctactggataagctcctgttccttccgagtccgatttgctctcaacctcaaaggactaccttacgattacctagcagtcacttcattttctgaccctgagtttcttaagctcaaccccattggatttgttcccgtgcttgtcgatggagattcagtaattgttgactctcttgccattattatgtatttggaagataagtatcctgaccctcctctgcttcctcgtgatattcaccaaagagccatcaatttccaagctgccactattgtttcctcatctatacagccttttcaaaattatactgtagtgaagtacatagaggaaaaagttggcactgatgaaaaacttccttggacccaaagtgtaattggaaaaggctttatggcactcgaaaaattgttgaaagaccatgctaggagatatgcaactggagatgaaattttactggcagatttgtttttagcacctcagttagatacagcaattaagagattcaacgttgacatgaaggaattccctactctatcaagattacacgagacatataatgaaatggcagcatttcggaaggctttgccagagaaccagccagatgcagtacattagttgaacctataatttgggagtgcaggagcgactggttggccatcattagtaactcttgcaataaggttgctaggtacaccatcatggaccgtggataatagactaatagtgatttggtttgtataactaaaaagctcgtgattctttattttccgtctcatattgctgctattataccttgatgcatgcttcttaatggtcacatgtttctttgatgggccaaaaaaaaaaaaaaaaaataacccaaaaa

SEQ ID NO: 127108 - DNA, 596 bp, Glycine max
  unsure (1)..(596): unsure at all n locations
  Clone ID: PAT_MRT3847_85785C.1
tttttgcctcatcacctccagaggtttcaacctttagacggatggtccaacctacctttctttatagaagcggctgctcctttttntgctcctccacccatggccaacaacaacaataataacagcaacaaccatcaccaccttcagttctcacctgtctttgatggccgcttgcaactgtgctatggcgatggaacaaggcattctgaccacaaggggaagggaaagaactaattaagttcccccgaggaacaccacttttcttcctggaattttgttctgtgtttttgtaggagcaacaagctgtgtccccttcccttctgcaaaatggaggataagttgttgtcatcaagtgttggtgtttcttcttggatcatttagtcattcaattacattgagtatttgaacatttattaacttatgcgtgcattgtactatatatgatggataaatgtaaaagaatgttgatcgtagatattttgattttctaccattaattctaaaattacctgtcccgtttagttggaaaaataacttcaaatttctacggtgtcctttccgttgacactttttttataaaggaaaattttctattc

SEQ ID NO: 127109 - DNA, 1532 bp, Glycine max
  Clone ID: PAT_MRT3847_85786C.1
ctcccgcacatgctcccttggcctcatcttgcttcgccttggtcatccttctgtgctctcaaaacctcctgaggctcacttcctctactggccggggccctttcctcgtgctccggcctcgtctgcgaggcgagcggttctggcgtggctcctctttcctcgccttccctctcgcatccccccttggcacccacgtccgccgcccttgaagctaagaaacagtgcaaccgtccactcctccaagctgtctgttttcctgtgtagttcttttgtctgctttcctttgtccttgagagggtttcatttttttgcgtatcacaaaaggtaacagagtcaaaaccctgcaaaaagtacaaaatgatgccaggcaatggacagttaactgttcctccgggcttcaggttccaccctactgatgaggagcttctctactattacctgaggaagaaagtttcttatgaagtcattgatcttgatgtcataagagaagtagatctcaacaaacttgagcctggggacctcaaagataagtgtaggattggatcagggcctcagaatgagtggtatttcttcagccataaggacaagaaatacccaacaggaaccagaacaaatcgagcaactacagctggtttttggaaagcaactggaagagacaagtccatataccacactaattccaagaggattggcatgaggaaaaccctagttttctacactggtcgtgctcctcatggccagaagactgattggatcatgcatgagtatcgccttgatgaagatgatgctgatgttcaagaagatgggtgggtggtatgcagggtcttcaaaaagaaaaaccaaagccgaggtttccaacaagaacttgaagaagaagagcacttaaccacccacatgagagcaagtggtccatgccaggttctagagcagaagcatcttcacatgcaaggaggaccatatgatcattacaactttgatgggacaatgcacctcccacagttgttcagtccagaatcagctattgcaccacctacaaattcttccttggccttatccatgaatgccatggacatccttgagtgctctcaaaacctgttgaggctcacaaccactggctgtggacttaatcttatgcagcaacaacaagaagagaggttcagtggtgactggtctttcttggacaagctactagcatcacaccatggcatggatcaaagcaaatgtaaccctcctactaatcatcatgctgcaactgctgtgggcacttctgctcaaaaattcccatttcattaccttggctgtgacaccacccatgatatcatgaaattttccaagtaggaagggatattgcattttaatgtgttattatacttaaggtgatcatgaggtgagaaatatttggtttctaagtatgtgtaatatgtagcaccttgttagatactcattgagattccactcattaatttagttatttcttgagtgtcaattgtatatatgtctatgatatcttttacgtttaattaaaaaaataa

SEQ ID NO: 127110 - DNA, 569 bp, Glycine max
  Clone ID: PAT_MRT3847_85787C.1
cttcttcttcatctttttcttctttttattattattcttttgagaccatttttgatctgacacatctaatccaattcctaccttccgcttcggatttccatcttcacccaccgaagaatctctttcttcttcttcttcttcttcttcttctgaatcgttgtggagtagtaacaggtggcagcaccagcagggggagccatctttggagtagacccaagttctgaattgattcttcagttaagaaaggaatttcatttcggcttctcaagctggtttctgaggtgcccaacaaaaaatggcaaagcgtggatacaaaatacaggaatttgtggctcattcagcaagcgtcaattgtttaaatattggaaagaaggcgtgccgtcttttcattacaggaggggatgatcacaaggtcaatctgtggacaattggaaaaccaacttttttaacgagcctatctggtcatactagtccagttgaatccgtcgcatttgactcaggagaagtgttagttcttggtggagcatcgacgggtgtgataaagctttgggatttggaagaagcaaagt

SEQ ID NO: 127111 - DNA, 558 bp, Glycine max
  Clone ID: PAT_MRT3847_85788C.1
atggccaatttagactaccaatccatcaagaaggctcaaaccgagaagaccaaggctaaaaaagccaaagctaaggctaataaagggaaacaaaatgagcatgtggaggatgatttggttcctcctcctcccatcagtcatgttgcttctaagaggaaaaaccgtggtccatctcaacatgaagctgcagcgaaaaggccaaaggtggagtcagtgtctagttctactccttcccctacggagagtaagtcgaccctcaactctccatggacttcattgctaattttctggcaaggtcttgttggatgcacgaactctgggtcgatgaattcgaaaatgatgagtccaagaaggctcaagttgaaggtcgaggagaaactgaggagtgatctcagtgaatctgtggccaagatcctcaagactcacgaagtcaacttattcaaggaatctaacctctccatcttcgacattgacaaggatgtgaaccatgaaggggagttggttcctgaagttcaagtagagggtgtcattgaaaagcctactaagcctgtaacttaa

SEQ ID NO: 127112 - DNA, 1923 bp, Glycine max
  Clone ID: PAT_MRT3847_85789C.1
ggctcgagctcgtgccgattcggctgccccttgctcttgttctctgattggcctagccagtagtagccaatttgttggagctggttgggaatggcgtcgaaaccgaaatcaaatggaaattccaaatgcaacaaaggattcgctgacagctatatgctgttgaatcctgaagacgctcatttcttcgatcttgttcatgtgctgtattcccgtaacttgggaaaccgaaaatttgtggacagcaatgctgagggatcttatgagggaagcttccgccaaagatggcttatattcgtctctgtggtgctccagaagcttctgttgctcatcgctaagccactttcgttctttggctcttgcgttgagttcttcatcaacctccttgtcctcaacggtggcttcatcatgatcgttattaacttcctcacaggtcacctggtcgtccccgatcgtaatgcaccaaattatttgtcttgcatcggaaatttggacgcgagagtaaagttggatgccatcacgcgtgatgactgcaggtactatgtttcattagctatgatggcttcaaaggcatcctatgagaatgcagcttaccttaaattctctaataaaaaaccactggaagatggaattcgtgagattttttgattgctggaatgattttcaagaaaaggccacaacccaagtcttgattgttttggacaagcatgagaaccgcgatacttatgtggtagctttccgaggaacggaaccctttgatgcagatgcatggtgcactgaccttgacatctcatggtacgggattcccggcattggaaaaatgcatggtggcttcatgaaagccttagggctacagaaaaatgtggggtggcctaaggagattcaaagggatgaaaatcttcccccgttggcctactatgttattagggacattctaaggaaaggtttgagtgaaaatcctaatgcaaagtttatcattacgggtcatagtttgggtggagcactcgcaatcttgtaccctacgatcatgttcttgcatgatgagaagttgctgattgagaggttggaagggatctacacgtttgggcaaccaagagttggagatgaagcatatgcacagtatatgagacaaaaattgagggaaaattctatcaggtattgcaggtttgtttattgcaatgacatagttccgaggttgccctatgatgataaggacttgctcttcaagcactttgggatctgccttttctttaacaggcgctatgaactcaggattctcgaagaagagccgaataagaactatttctcgccatggtgtgtgatacccatgatgttcaatgctgttttggaactaataaggagctttaccatagcgtacaaaaatggacctcactatagagaaggatggtttctctttagtttcaggttggttggtctgctgattcctggcttacctgctcacggtccacaagattatattaattccactcttctgggatcaattgaaaaacattttaaagcagattgatgtgtccgtatacatgatcattccataccactacgtacatgtgtatggtcatgcagactaaaatttacataatcaagatttttagttttagaaaaaatggtaataacacttgattatgtatcatgtgaagaatagttatgtatcataatgatcatgaataatataacagtttgtcgtcagtacgagttattgtatagtaattaataagctaggtttaaagttgtttcctttggtgcatggatttatcattaatgagatcaatgtgaagtttgtttatttcacggctggaatcgatcgaccaaaattgctaaccagcatttgcttgtgacattcagttggatattattgtcaatttttttgtcaaaaaattcaaaaaaggaaaccaaggctggccgaga

SEQ ID NO: 127113 - DNA, 321 bp, Glycine max
  Clone ID: PAT_MRT3847_8578C.1
ccacgcgtccgatcacgcgttcgagacgacagaaggggacagcacaaacaattaatagagatgagtttgaagatcaacatggtggtgctaaaggtgtgtcagacgcttcttttccttgcgggggttacagcttcacgcatggaactgagctttttcaaaagtgatcagccttcaagttatgatcatgatgagtcttcaaaaccatgctgtgatctctgcatgtgcacacgctcgatgcctcctcaatgcatctgttaagatatgaggctgtaatcatgccacttatattgctagtgctcgctgtgcacatgctcacagcca

SEQ ID NO: 127114 - DNA, 239 bp, Glycine max
  Clone ID: PAT_MRT3847_85790C.1
gcgattagcatcaaatgcaggtatcgcaacgaatcgtgggccctcgaatggttgtgaaaggaggggattcgaagaggttaaggttgttgctgggttggcgtgtattattactacttttttaatcaattaattaaattgactatatttatagaaagaaggaaattgtgggggcgaattggggatttggattgaagttgttgtggatagtgatgatactgacgggagagcgaccatgactg

SEQ ID NO: 127115 - DNA, 573 bp, Glycine max
  Clone ID: PAT_MRT3847_85791C.1
aaaaaaatgaaaattggttttgatggaaatcgggtaacaggggaaaggttgggcttgtttgggggacaatgataaataattagttccaaacccctcaggggcgggggttaaaaaaacctagggggaaaaaaaggaaaagggaaaaggatttcctttcccccctcccggtttccccagggaagggccttcattttttatgcacaaatagggggagggtttgggttttggggctgggggggcatttttgaggagagactttatctccacttttggactttggcggttcccttggcatccagttttttagattttaaggggcatttttgggttgacccatagggaccttgggcccaccctggtttaccttggggaaagcaagaggcccatggtttttaagggttcctgtttttgcacaatcaattaaaatggggactgtcccaaccccccaaatttgtttttgaccaaaccattccttggatttaacccactttgatttcccgacccagtggcatatgaaatctttttttcacaaatacacaacctctttgtttctttcctaagggggggggggaa

SEQ ID NO: 127116 - DNA, 318 bp, Glycine max
  Clone ID: PAT_MRT3847_85792C.1
gctggaatagaagaaaaggtgcttgctagaagtgacagtatgctgaagtgtgtcagatggtaggggactcaactacttcttcgtaactactccctttcatcttatcgagcttatgtatcacgagactaactacatttagtaactaattgcgtgcatatacaatggctgtacatacaggatatggctggaagttgtatagcatattaagctaaccatatagcagcatccgggtcatgactagttacatgactagcactagtagtacttagctgatgtcagtgtatagggattgtagcatgatacttgattgttaagtga

SEQ ID NO: 127117 - DNA, 791 bp, Glycine max
  Clone ID: PAT_MRT3847_85793C.1
ataattaaggaacatgatttttttttttgttgaattgaggaatgtaaactatctctcagcaaataaggtctaacgaacgcacatgtaaaaagaattaggagtttcactactaggaggagtctaaacgaatcctaacttgaatgatcacgactttatattcttttcctttgtaagtttgaccgttccgtagccatcttaattttcctaactgcaaaattcgatccttttcatcttgccaccttgcatcatcaaagggtcctagacatcttcatgggaaatactgcataatttgctgcaatcctcctagcccttgaacattccaatgaaactattgaatttctacaagctaaacgaatgattcgaactaaaaggaatttttaaaatacctacaaaaatctctacagcatgctcctatagaagccggagtagtatattttgctaggcaaggtagtattcagacaggagaacagctcttattaaaagagtcaagcactgcaagcatataatatctatcatcccaaatgatgattctgactaaaagtaaattttctgagttccacagtcccctttaaaacctctgactatcatagcctgagaaatttgctctgcatggctgaaaatatttttgaagatgcgacggaaagtagttaaagaaaatatcaattgtctccataacagtcagctgcttccaatttagcctacgagatacaatcccctacccaatgttcccctcctcatcccaaacaagactgataaacctcaatgacagtaaaagtgtaagcacaatttct

SEQ ID NO: 127118 - DNA, 692 bp, Glycine max
  Clone ID: PAT_MRT3847_85794C.1
aattaaggaacatgattttttttttttgttgaattgaggaatgtaaactatctctcagcaaataaggtctaacgaacgcacatgtataaggaatttggtttatctctacaagagggagtctatacgaactgtagcacgaatgatcacgatatcatgatcaatagctcaataagtttgaccgttcaaaagccatccaaattttcctcacttcaactttcgatccttttcatattgccaccttgtatcttcatagggcccttgacatcttcatgggaaaaactgcataatttgctgcaatctgccttgcccttgaacattcaaatgattagatgcaggagtggcatatattgttagacaaggtagtactcagacaggagagcagctcctattaaaagtgtcaagcacagcaagcatataatatctaccatcccaaaagatgattctgacaaaaagtaaattttatgagtgccacagtcccctttaaaacctctgactatcatagcctgagaaatttgctctgcatggctgaaaatatttttgaagatgcgacggaagtagttaaagaaaatatcaattgtctccataacagtcagctgcttccaatttagcctacgagatacaatccccaaagcaatgttccgaacctcatcaaaaacaagactgataaacctcaatgacagtaaaagtgtaag

SEQ ID NO: 127119 - DNA, 298 bp, Glycine max
  Clone ID: PAT_MRT3847_85795C.1
aaacggggaggcaaactatgaaaattcacattgcgtcactcctccgtcgttttctctctcttgctaaccttctggataatgtcactgcttcaagtgcaagcctaagaagcacagtgccaacacatcaagttttaacattgagccaaatcctttttccttcaaattttcgctttgaaattcgttcttctgcttaccagacataacgagcagcaactgtacatgggagaagaccaagcatatgggaaacctacactatacagcatactgaaaagatttgggatcagaacaccggtgacat

SEQ ID NO: 127120 - DNA, 243 bp, Glycine max
  Clone ID: PAT_MRT3847_85796C.1
aagggcttctcgagaaaagggtaaccacttttcctccaaagattccacttttctgatatctttcgactttcctttcgtccttttactgtccctcggggttcatccctcagctcagactcagaagaagaacctcacaccgcaaagctcaaacaccccacccccaagtggtcaaaatgtcaacaactacaatgtaccaacaacaagaacaacctcctcacatgatcagtgtgacacaaaattcat

SEQ ID NO: 127121 - DNA, 126 bp, Glycine max
  Clone ID: PAT_MRT3847_85797C.1
tgctcagagaggaataagaacatgattgcgtgttacacccatcttagtctggtacaaggatcctggttggtcaagagcacctagccctatttgaatgcttatgaagagctttgacttgcatgtagt

SEQ ID NO: 127122 - DNA, 844 bp, Glycine max
  Clone ID: PAT_MRT3847_85798C.1
tcctaatgggaggcttgatcagaaaaccatgtcagctcttaaattgaacaatggccacctgggtggtgaaggcctcaacctcggtgaagccaaaagagccaatgacattggtgccatgatgaatttggctggttttaatggtaataatggtgctaatgttggaagtgccactgttctagggggtaataataattccaatggtttgggaggttttcctgttcagtccaataacaatatgattcccgggtctgctgcagctttttcaaatggtggtctttctggtggccaatatccatcttctctgctaatgaacatgaatggctttaataaccatccatcaccatctccattaatgatgaacatgaacatgcagcaggcaaggcaagccatgatgcagcagcaaccccagatgatgtatcacaggtctccttttgttccccctaacactggctattactacaaccacagtagctacagccctgcacattactcctactcctatggcttgcctagttaccctgcagcaggagggggtggtgatgatcactctgcagctcacatgttcagtgatgacaatactagcagcagttgttcaataatgtaatgataggttgtagagccaaaaggttaaaaaaaaaaagcaaaaaaaggatggtgggtttgaccttaaagtcccatttaccaagctagtatagtgtttgactgtaattcggtggggcatatgaatgtgctagggatggatggatggatgtgagtgaatcatcagtgtggtactatgtagtggtaggttgagatgttgtttgcctttatttttaaaaaatgttgtccttggttgttctgtctc

SEQ ID NO: 127123 - DNA, 462 bp, Glycine max
  Clone ID: PAT_MRT3847_85799C.1
gtaatttttataaaccgcgaacacaggttgctgcaccttaaaaccggtaacaaaagcaaacgttacttgatttcaagaatatttcaatttctctctacttctttgtgtacgattttttaagggaaagaaaatcactctttgtgctggccacaaacttcgtgaattattttctttttcactctaagtttatttgttgaacactttcctattatgatataggactttgttgtagatttaaacttcttttgtctatttttcagttctatgtttaaattttaagtttaagctggtgaaatcttggattaagttcaaccactctcctatatggtataaggattccatggatagaactttttattatttccctttttataactctctatttttactggtccgctttgacgtttaagtgggcttattttaaaaaaatttgtggtttgttcaaaatttgtttcttaattt

SEQ ID NO: 127124 - DNA, 249 bp, Glycine max
  unsure (1)..(249): unsure at all n locations
  Clone ID: PAT_MRT3847_8579C.1
gccccgtgctttctcgctccttcacgttccanacncnanacnccgnggacnccanttacncaantgctnttaaagttcanaaatttcccaaaatnttcgaccccctnntgcntccaaaatccantaccagtgcctcctatcaccactgatttcaacngttgttccatagcttggaaggcagaagaagatggagaagcttaanttggnactcgnttcttcnccnaaagccnttgatgttgggaatgttcc

SEQ ID NO: 127125 - DNA, 364 bp, Glycine max
  Clone ID: PAT_MRT3847_857C.1
tgttccatattggtggagattatcaggaaaacaaatccaagctttccggttttgggaaaagatgaaccttgtgcttgaatatcgctgggcagggaccattgttacaactaccactttttacccaattacatggacatcctgtttttggtcatttactggtactagcaatcacactctgccctttaaatcttttcttctccgcatacccatgggggaaagttcaagcccaaagtttggataggaaatgcatgtagcttgcttgccttttaacaattgttttattttaacaaaagcccgaaagcctacctcaaaaactttattttttagagacaaaaagtagctccaacaatttttttttacccca

SEQ ID NO: 127126 - DNA, 537 bp, Glycine max
  Clone ID: PAT_MRT3847_85800C.1
ggaaaaaaagggcggccaattttttactttaacaatcaataccaagtcctttaccaggttttcaacccaagtcccttagggggtttttaaaaatccaaaacctcgttccccctccacaagaaaaaacctcaaaggcccaaaaaagagcttttgctcctccaacaagaaacccccctggtttcaaaaaccgtttttttcaaacctttttttttttgctcgagcaaaaccctaaatcgcagttaaacataaacatccggtaataatgggaaaacaaccttttttgaagtacccccttaaaaaaactttttggcaacgaatccaaaaaaatcaatgccccgggagctgtttcccccctcgttggcgccccaaaaaacaagcttcacaaagttttttttcaatgcaattccagcctttgcataaaaaatacttgatctgctttccccgataaagtcaggggaaaccacatttttttcagtgaaaccaaaaattcccttaaacttgccctttgattcctccttgatagcatttttaatttca

SEQ ID NO: 127127 - DNA, 763 bp, Glycine max
  Clone ID: PAT_MRT3847_85801C.1
ggctcgagatcatcaggcaaataatgagttatattgcccttgcacaagtgttaattttttacgcttactttcatgaacccagatggcagaaaacgaaggttcaacgaagccatcgttaatatgctatatccctctcccgattctcctcctcaaccacaacgcgaacaggagttggaacctgtggaagcagcttttatcgacgacgggtctggttctgacatcatttcagacaatttggacgattgcgacaacaacgcctccacgagcggcaacgaagaacatgatgactctgagacgacggagaagctcacaagggttcaacgaaagaaaatccgtaagaagaagctgaatgaagaagccattcatcgcggaaaactaattgggccgttgttgccacctccgatgctccagctgttcgatcaaatgctcctgaagaaggttatgccacgcacaactttgtttaggtgatgatgtggcggcttgtgctaaatcagtgaaagtgaagcaacggagaatggcaaaaaggctcgccaaagaaaagcaaaatgccactacttcggagaacgccaatcaaagttccactgtagatatcaaagaaacccatttataagtatatgccggcaacaatcacaaaatagagcatgcaatttatcagattacagttcagcgtttacctcgtgatttgattgtttgaagtagtttagattggatggatgtattaaaacgattatgcgtattgttaactctagaaattttcttggtt

SEQ ID NO: 127128 - DNA, 327 bp, Glycine max
  Clone ID: PAT_MRT3847_85802C.1
tgctcggtggtcggccgtcgtccttttttttgactaaccgggacctaatatgtgaaagatattcatggcatcaacacagtaacatagcatggccaaacaagacaatgacagcgtagggagaagactacaaacaagccctaaaagtatgaacgacacggcgctatacattggatggactagctggtattgtgagaaccaaacacgcataatattcacccaccacgccagcttgccatttaaagacaggagtggataactcttacacaattacaaaacggctacatgactagctcggatggttgcaacacttgcaaggtgaagtttgga

SEQ ID NO: 127129 - DNA, 241 bp, Glycine max
  unsure (1)..(241): unsure at all n locations
  Clone ID: PAT_MRT3847_85803C.1
cttctttttttaagaacagtggaactcgttagtcgttactaaattagaaattatacttcataattttgttatttataatcaatttctgttaaaaaaatgtgtttcaaagaatgtttaaggagtatattacttgtcaaggaaatctagctcaattgattggtgtgagtnattataaattttctgaatttttacagataaaaaaaaaagttatattactaacctaccaaaaaattccagtatt

SEQ ID NO: 127130 - DNA, 530 bp, Glycine max
  unsure (1)..(530): unsure at all n locations
  Clone ID: PAT_MRT3847_85804C.1
agaacagattgacggtnangcacgcgtacgncgctcgccaccctggtctgtgctaaaattttaacttattttcgcgtaacatacaatgactgcccttaataatgggggccgggatactatctatancccaaataaaccacgactaaaacctcagccaaaattcctcttttcactctatatctccctttaactctacattctctcgacacatccgttcctaaagcacatgttgaatttaaatacttaactgacgacagaaaataccaccattgacaaataagcattcccagcccccagtcgtgtctacgacatgaatatgctactaacgggagtttgttggatgtcaaatgatcttcaagacttcatatacagcaaaaagacagtctttactatggaacaaatatcccttgattgagattatgatggaccctggtcatccttggcacgcagctttgacctttacgagtgccatcaatttactctttatacctccgtaaacctggttcacttaagtcatcccatttctttta

SEQ ID NO: 127131 - DNA, 252 bp, Glycine max
  Clone ID: PAT_MRT3847_85805C.1
gaacctcattgagaaagctgagaaaacagccaaatctcactattggaattcttgtaccgggtgtgggtgcttcgtgtcaatggtctggatgctcatatttggtggcaagaaacctgtgagtagtgattttttttccctacgctcattcatagtatttctttcatggaattattattccgtattattttatttaaatcttgataccaagtctcttcttgtgcaggcaaaggtggagaagaaaccagaacgcac

SEQ ID NO: 127132 - DNA, 277 bp, Glycine max
  Clone ID: PAT_MRT3847_85806C.1
ctttgtttggtttttttttttttttttttttttttaggcaagtcggtagtatttgtattatggataattaaaaattcatggcataaataaaaatataaatataaataaacacatctatattttaagtaaacaaaaatcaccttactcattctaaagaaaaccgggggcacattctaaaagtcccaaagggggtaatcccataacgtgaaagaacgacgggtgggcaaaaaatagaacccagcctgaagtctttaaccagcctattcttcggggactc

SEQ ID NO: 127133 - DNA, 397 bp, Glycine max
  Clone ID: PAT_MRT3847_85807C.1
ggctcgagggagaatgtttggaattcaaatgttgagcttacgttccccagatttggcagatcacagatttgtgatctgccaatgctaaggtatcacattttccatcctgtcacacttgtataaccacatgctcataatcacttatgtattgataagcttacacccctcatacatcacctgccacttggtcatcatgaactcacacatgagtttgagtggagaattccagggaaaccacttaaacgagtcaaaagtatttgctctggtctttcattttgagtccgatgcatctttacaacgggtgcctattatatagaagcttgacgtgcgtgatggctacttcaacaagattttctgctttgatactcattatggggattaagatggattggtttta

SEQ ID NO: 127134 - DNA, 354 bp, Glycine max
  Clone ID: PAT_MRT3847_85808C.1
ctggtccttggggttaacatggaggatatgagccgagcgctcgtgagccgcatgctacggttggtgggggtacatagatatgggacacaagacaataacggacattgtcgctacacagactactgaaggaaacccctggaggaaatatcataaacgggagctgagccatccacacttgaagaatctaagacacacggagcaagcactaacaacccacatggagagaaccggtctgaaacgcaggggaaaaccatgatctcaatgaattttcactggtggaaacaacagcggaaagcacacagatgttgggcacacaaacccaaaaggaacggaatggagaggcaaaggaaaatc

SEQ ID NO: 127135 - DNA, 186 bp, Glycine max
  Clone ID: PAT_MRT3847_85809C.1
ctctaaagccaataaaatttcactgttgggggatcgattcgaaaagggatactgacttcaattgctaaagctacatcaataatccgtcccatataccgcctactattgttacatacaaaacatgaatttcatcatctggccttacacatgaaaaaactaatatggtaattgctttttagctacata

SEQ ID NO: 127136 - DNA, 299 bp, Glycine max
  Clone ID: PAT_MRT3847_8580C.1
cttggggcccctgggccacaattggttgtccaaatttcccctttaaggaaaatttgtttaacagggggggtaaaacaatttctcaaaacccagaaaaacaagttttctttgttttctttgcccacatggccaaaagtttgaaccaggaaaaaatattaaaatttttgaagggaaaaattcccaaatggttcaatggcccgtttaaatacttcaatttttgggggcatttttttcaaattccaatccaacacaaaaattggggaattttccccaatttccactttcggggatttattttt

SEQ ID NO: 127137 - DNA, 471 bp, Glycine max
  Clone ID: PAT_MRT3847_85810C.1
ctggcataggcccccaaaaaataatagcaccatcttctttgctctctttctgttttgtgcctggacgcaccttatacctacctttagccatcgctgatttagtgctcgaccatgaaggtcaccctcttgaaaaagggggacatattatatcttgacagacataacagcatttggtggaataagagcaatcccaacgggaaaagaaagatgccctctcactgtggagcaatctcgcaaacagctcgacaaaaggattggaacactcatctggtccccatatcaaatccgttttattgccaaaggccatcctttgaaccttaaattcgagtcatttgcagttataatgctgtgagctggaattcctaccaactggtctgttgcggaggatctaccaaaaagacctgccgtgtaaattggtgagaacaaaaatgcaatggatggttgtttcatacttgctagagttcctgatga

SEQ ID NO: 127138 - DNA, 1748 bp, Glycine max
  unsure (1)..(1748): unsure at all n locations
  Clone ID: PAT_MRT3847_85811C.1
gcttacataattcgctcaattcttaattccttcaaacatatccatggtttcacgttcatttgttgtgtttttattttcccacgcgtccgcccacgcgtccggttagttttattagaaatgtctgttgaaaaatttgaatccagtaactcttctcccttcttttctctcttcatcctttttcaatcattagatcaatcttaaatctattatatcttctgctcgtgttttttttttcttgtgtttgtgtgtatggacacggacatgtatgtacatgctgaaggttttactttccatgaatttgagaacatatatataccttggtttattggaaattatcgaaatatgttacgattggatttgcttaggatggtttttacgatttataagtattcaatacctatagtagagaattgtggagtaaaatattaaacagtttagaactaagtgaaggaaatttttgtgtgctaggttctgaatctaacaacagttttttttttttttcaaataatactaataataataagatcaatgatgatgatgcagatattagtccccttttggctaaggcagatgatccaaaaatggctgaggatcctggtgtgcttgaggttgttaaacaattggataaggcttgtacagaggcagggttcttctacgtgaaagggcatggttttcctgagactctccttaaagaagttagagatgtaacgcgcagattctttgaactttcatatgaagaaaaggcgaagatcaaaatgactccagctgctgggttcagaggttatcaaaggcttggagaaaatataactaaaggtgtacctgacatgcatgaagctattgattgctatagagaagtgaccaaggacatgtatggagatcttggcaaagttatggaaggaagcaatcaatggccacaaaatcctccaacattcaaagttcttatggaggagtatgttagtctctgcagagaccttgcaaggaaaattatgcgtggaatcgctttagcattaggtggatcgcccaatgaatttgaaggtcaaagagctggggatccattttgggtaatgcggctcattggttacccaggtgtatcatctgtaaatggaaccaatgttcataaaaatgacattggatgtggagctcacactgattacggtttattgacattacttaatcaagatgacgatgtaaacgcacttcaggtgagaaacctgtctggtgaatggataacagcacctccagttcctgggacatttgtatgcaacattggtgacatgctaaagatttactccaatggtttgtacgagtccactttgcatcgggtgataaacaacaactcaaaatatagagtcagtgtagtatacttttatgagacaaacttcgatactgcagtagagccattggacacacataaaacgagggcaaatggcaacaaggagttcaaaagagcagtctatggagagcatttaactggcaaggtcctcacaaattttgttgatttgtaaccttgtttttattgctctggtgtgtaaataaataaggcatcttgtcttgcaagctcatcgcatgcatgtctagacctacaagtgctgataatatttgaagtgcaattctcaatttatacaacttcaggacttaaaatgggaatccccatactcccagttgtcataaatcatagtctcagacagaccaaataaacaaccatctaagttcaacaggaaannnnnnnnnnnnnannaaaaaaaaaa

SEQ ID NO: 127139 - DNA, 272 bp, Glycine max
  Clone ID: PAT_MRT3847_85812C.1
ctgtggtccaaggccatttctgctggctataagcggggtctccggcaccaaagggagcacacagctcttcttaaaattgaagctgtttacgcccgagatgacacagaattctatttgggcaagagatgcgcttatgtatataaagcaaagaacaacacagtcactcctggcggcaaaccaaacaaaaccagagtcatctggggaaaagtaactcgggcccatggaaacagtggcatggttcgtgccaaattccgaagcaatcttcctgctaa

SEQ ID NO: 127140 - DNA, 241 bp, Glycine max
  Clone ID: PAT_MRT3847_85813C.1
aaaaaaggacaagaacgagttgccaccctaagttgggcgaggacaaataattataacagtacgcaaagaaaaacttcagccggttcatcacacctgcatgaatcgaattcttccaaagaagatcttcctttcagcaacaaagcctcactttctaaggacttcccaaagcctcagagttcaattaatattgaatgttcagaagcatgtaaattggccgagtcttttacctctcggaatcctc

SEQ ID NO: 127141 - DNA, 348 bp, Glycine max
  Clone ID: PAT_MRT3847_85814C.1
gtgctgaaacgcaaaaaggggtttaaaggccaaaggcgacatgttcttggggatggggaacagccaacgcttggccctgggaccaacgttgaagaggcttacaccacgctaacagttgaacttgagaaaagcgctcctacattggttggcattgaatgtcctaaagatgagaaactttctcgtcgcaaaatctttgacaaacctacgacgcgctgcttcactattctccctatggagccaaaacttgtggtccgacagaagtttttaaatgtcgagaggtacattatgaagaaaagggacctgatttcaggacaaggtggaaacaacccatactccatggaatggact

SEQ ID NO: 127142 - DNA, 264 bp, Glycine max
  Clone ID: PAT_MRT3847_85815C.1
gtatgaccctagtgctgttcggaacgataccccgcatttactcactagggggtcaaacaatctaatgcccacgagctcatacatcacgtgactgttgctgaacaggagtgacattgctaaaagtggacctctcgagatataggggcagtctaaccggctttatgggatcgagcacatgctctaggacattatgtacgcgcttaagatggggcttgaaccgattcctgggcatagcgggcttggaggcgcttactatttcagaaa

SEQ ID NO: 127143 - DNA, 484 bp, Glycine max
  Clone ID: PAT_MRT3847_85816C.1
atagagactattaaaccccgtaccttctccgtctaacgcacttcactccaattagaaccaccgcaagcatctgtctggcacccaatgggaaccacaaagggaaaaaaaacaaaaagagggaaaatagtgaaagatattaaccttctatgaagcacggaacgcctactaggtgacgtttctcgtttccgatactgaatgaaacctagttgacttatttggatacagctgatcaagacggaaacaacgacttcatttagtaggaacgtattagggacgtgtgcgtcccaacagtccacaagaaagtaattgcaacaaaattttggtagcagaccaattctgacttgaaaggcttctctcttagcttcagtggaagaaaaaggggaagaatctcaaagattcccccaaggttcaaagttgaaacacgccatggacggttgaagcagagaaaataagtgaagggggagttggggggacagtgaaaaag

SEQ ID NO: 127144 - DNA, 638 bp, Glycine max
  unsure (1)..(638): unsure at all n locations
  Clone ID: PAT_MRT3847_85817C.1
ccacgcgntccgtacaaattagaggtaccttggtaggtcatctcataaaatcacaatctagaattgaaagtggttagtgttccaatgattttctattttacctcagttttctcttgttaaggaaagagggtgcctccaattcctagtttgtattaccagcaatttgttgtgtctgctctataatcttgctcatgttatatctcacgtcttggaagttagttactctgcaatattcttgttctaattctcctgtggctaggaagttagtcatttggaatgtggaataaggacaggaatgtaatacgccactcaaggaaagctttggagttattatatactattaaaaaactatgtattgaccaatatatttcttgcatttacttcttaaaagagagcttgttccctaatggatagactttgctgatagtctaaagccaaaataaatatttagttaaatattacacaattgatttctcattcccatctccatggccccaccatgttctaaactatctttaataaatatttactatatcagatgtatcctctccagtctccacagccccacctccttttttaccttccccctacagatacataagctcaanttggtctttacttggcggagtctcttccta

SEQ ID NO: 127145 - DNA, 262 bp, Glycine max
  Clone ID: PAT_MRT3847_85818C.1
caaataaatggtttattttttatacatggggggcagaaggttttgttataaatgggcgggaaattaatgccttttttaaaaacagaacaactactaacaatggtttgttatatccttaaagaaatttggcaaggtttgaatggcaacttgggggggaaaacaaagaacaatttttaggtgtattatacagaatctttttgttaacattttttgggagggaaatgtggaaggcgccaatttattgtttctatttacctctcta

SEQ ID NO: 127146 - DNA, 699 bp, Glycine max
  unsure (1)..(699): unsure at all n locations
  Clone ID: PAT_MRT3847_85819C.1
acggctgcgagaagccaacggaaccgggccggaggcgaaagagaagatgggcaccgttccagggcagctcgtgtgggagatcgtgaagaaaaacaactcctttttggtcaagcagttcggaagggggacccagagcgtcgaattcagcagagagagcaacaatctctacaacctcaattcgttcaagtactctggtttggcaaacaagaaaactgttacggtacagcctgagggtaaagatcaggctgtgttgttggctacaacaaagacaaagaagcaaaacaagcctgctgcattgcttcacaaatctgtgatgaagaaggagttcaggaggatggcaaaggctgttgaaaatcaggtggcagaaaattactacaggcccgatctcaagaaggccgcccttgcaaggttgagtgctgttcacagaagcctcaaagttgccaagtctggtgtcaagaagaggaatagacaggccgtgaaggtcgccagtaggaagtgaaagggaatcgagaagagttagattgcattcaaccctcgttttttgccccctttttgtgtttttagaactccaatctagatttctcgagtttgttttgcaatgcaattatttattaactattcaatatgaaacttgaactaccatgttatagatttcaccttcattgatttgtaccnnnnnnnnnnngannnnnnnnnnaa

SEQ ID NO: 127147 - DNA, 446 bp, Glycine max
  Clone ID: PAT_MRT3847_8581C.1
gtcgcttcacatagcaagagtctactcaaggcctcaggcgaccccacaacctgccaaggatttcctgataatggaacagatcctagcatgtgcatacagcaaataaacagcagtattcccctgtttcacaacaaactcgggaaagtaagacaaaaataacttcagatcagttagttttgttgggggattaagagttctacaatagacaacatgactttcataggcgcattttagctgttttagcagcaattgttaataaaagcaaacagcaaacagttagtggtgtagttgaaactttaaaaaagaaaaaggatcgggctccttgaagggatagtttcgctttagagagtcaattgcaagtcataagaactaaagaaaacaccaaaggtagttgattctcacaaatcaatagtttattaccaagtttttatcaaaatcaagaacgg

SEQ ID NO: 127148 - DNA, 374 bp, Glycine max
  unsure (1)..(374): unsure at all n locations
  Clone ID: PAT_MRT3847_85820C.1
ggggccaggaacgctgtgagaggggtatgtgccgtttttacaaatgctctttttatgctaaactggtatggagatcactatgttgataacagcggaggctgntggagaggccttgtgctttttgatggaccaggaaactgggaagagggggggagaggccctttttttttacagattggggggttttgttgcacatgatgagttgtgtcgacagaaacacaacccctccttggtgttggcgtgggaggtgggagatgtgattgatggtgctttatatgtggggacagaattggttggtgagggatgggggtgtgtgtgtgtgtgggtggtgggggtgtgggtgggggggggggggtgggggtgtgggggggggg

SEQ ID NO: 127149 - DNA, 960 bp, Glycine max
  Clone ID: PAT_MRT3847_85821C.1
aatgagggttgtccctcacttggaaaaaaaaaaaaaaaaaaaaaaaaaaaaaagcggcccacgcgtccgcccacgcgtccgctgtgagtacggctgcgagaagacgacagaagggggtcttgcaggcgaagagatggccaccgttccagggcagctcgtgtgggagatcgtcaagaaaaacaattccttcttggtcaagcagtttggaaggggcacccagagcgtcgaattcagcagagagagcaacaatctctacaacctcaattcgttcaagtactctggtttggcaaacaagaaaactgttactgttcagcctgagggcaaagatcaggctgtgttgttggctacaaccaagacaaagaagcaaaacaagcccgctgcattgctccacaaatctgtgatgaagaaggagttcaggaggatggcaaaagctgttgaaaaccaggtggccaaaaattactacaggcctgatctcaagaaggctgcccttgcaaggttgagtgctgttcacagaagcctcaaagttgccaagtctggtgtcaagaagaggaatagacagggcgtgagagtcgctggtaggaagtgaaagggaattgagaaagaatctgctgttcaatcttcgtttttgccctctctttcgtgtttttagaactccaatctagatttctcgagtttgttttgcaatgcagttatttattaagtattcaatatgaaaacttgaactaccatgttatagatttcaccttgatttgtgtctcggtatattcgcctcatgattgttgctttaaaagtcgctcttccgacaaaatagctggctattattgcctcaaaggagggatatgattagtgtgtttagcattgaaaccctcgatttaaaagatatttttaattctacctttcttttataatcctatcataatgaacgtagttgtgtagaactcgaaagttgaaacaatagtt

SEQ ID NO: 127150 - DNA, 227 bp, Glycine max
  Clone ID: PAT_MRT3847_85822C.1
cccaagaccgtttcctaaagggggaacccccggggggtctaaatagaaaaaaaaggaatttggggccaaccccaaaatcccaaaaaaaaaaaaaggaaaagggggcccccaaataaaaaacccctcaaaattttcccaaggaagatccaaagaggagagttcgccgtccccagcccggctcaaaaaacccccgtgacaccaaaacgcggaagagcccggggttccct

SEQ ID NO: 127151 - DNA, 512 bp, Glycine max
  Clone ID: PAT_MRT3847_85823C.1
cgtacggctggagaagacgacagaagggaatgagggttgtccctcacttggaaaaaaaaaaaaagaaaaaaaaaaaaaaaagcggcccacgcgtccgcccacgcgtccggagacacaaaacaagcccgctgcattgctccacaaatctgtgatgaagaaggagttcaggaggatggcaaaagctgttgaaaaccaggtggccaaaaattactacaggcctgatctcaagaaggctgcccttgcaaggttgagtgctgttcacagaagcctcaaagttgccaagtctggtgtcaagaagaggaatagacagggcgtgagagtcgctggtaggaagtgaaagggaattgagaaagaatctgctgttcaatcttcgtttttgccctctctttcgtgtttttagaactccaatctagatttctcgagtttgttttgcaatgcagttatttattaagtattcaatatgaaaacttgaactaccatgttatagatttcaccttgatttgtgtctcgat

SEQ ID NO: 127152 - DNA, 317 bp, Glycine max
  unsure (1)..(317): unsure at all n locations
  Clone ID: PAT_MRT3847_85824C.1
gaaaacaaccgacagggaggaatgggctatcaagggctcagaacaggcactgcccgagactcttaaaaattatcccatgctgagatctccttggccttaatactttcttctgagccaagaagaacaccggtcacacaggccgtggctgaagcatacttaaagaaggctggcctcctcacataggaaaaattagtgcttacggatccacaagatccgctcactccaaatgcagtttcatgcacctacagnagagagagagatactgctatcgcatggacactacagtgttgggatcatcggagaccatcggagcgatc

SEQ ID NO: 127153 - DNA, 1720 bp, Glycine max
  Clone ID: PAT_MRT3847_85825C.1
ggctcgagaaaaatactaattgttatgttgtgaatcttgtgattttgatttattgaaattcaaggggcagagttttggagcttcccatcatacacacttgcacaaaaacaaacctcgcttcccaattccgatcctcaaggccgaacccgaaaacttctcataccacaatgctctttccgttgtttccacttcctctcccactctgagtcagttcccatttaaaaacaaagactccctctaacccttgtcctcttcctcatcatcgcattttccactcgttcgtggttttacattgctatataattatgcagccctgtagcagagaaatgccaaggccttaactccctcctaaactcttccgcccaaagttccctgcacagccattcagagtcatgcatctaatcacgctcaacgtgttcctaataagcaccaagagcaaagtgttggcgctatccaagccagtggtgacagcgacgcgggtgaggctccggctaacggtgctcacgcgggtccaaacccgggtcagccgaagcagagggttcgagctaggagaggccaagccacggacccacacagcatcgctgaaaggttacggagggagagaatcgcagagagaatgaaggccctacaagaactagttcctaatgccaacaagacggacaaggcatccatgctagatgagatcatcgattacgtgaagttcctgcagctccaagtcaaggttctgagcatgagcagattgggcggtgctgctgctgtcgctccccttgttgctgatatgtcctctgagggaggcggagactgcattcaagccaacggcaagagtaacggcggtggggcccaggcttcaaccaccaacaccaacaccaaccaaacgacagcgacaacaacctcaaacgatagcctaacgatgacggagcaccaggtcgcgaaactaatggaagaagacatgggttcggctatgcagtatcttcaaggaaaaggtctttgcctcatgccaatttcacttgccactgcaatctccactgccacgtgtcccaccaggaacgttaacgttaaccccttgatcaacgccgccgccggagccacccattttccgaccgcagccaaccccgccggcgaagggccgtcgtctccgagcatgtccgtactgacggtgcagtccgccatcgcaggcaacgacggcgccgcctccgtttcgaagccgtgatgacggtgtttgagtgactttataggaaaaagaagaaaaaaacaaagtgaacaaaggacagaaaatgacgtgtgtttttttttcttaaaaaaaaaggagccgttaaagtctacgaaaataaggcgtcagggatacggaggactcgacgacgccgtatttacctagactttgtttggctgatgctaactttcaaccaaccaattacaaactccaccatgccaattacctacttcttcgtcttctttttctttattattattgttaattgttaactgtcgctttgggtttcttctgttcattgtttttaaaaatctgtagtggaatttctctttttggtgtttcatttccgtctaaacaagttaatcttgtactggctagcgtttacgttttatgttactttttctttagcttatcccgttcgacagtccaacatttgccttatcttttggttaagagaaagaaaacaatctaatgttttatcttatttaattggaaaaatatttaaaaaat

SEQ ID NO: 127154 - DNA, 541 bp, Glycine max
  Clone ID: PAT_MRT3847_85826C.1
tgaggtacaaatatggcatttttcagatgctaaatgagcacaaaaatagatgaatatacgatggataggcaaaacaacatgatgaagacagaagtagagtgaatggttccattgcttgtctgttccatacatggtttgcctagacctctgtacacttgttcaaataaaggcagttagttaattggacaacttccccctagattaccttcattaggaagacaaaacaacttaaagaagacaaggataaatgtttcaaaatcatataatagtaactgtgcaatgtcattagactttcggcataactatgacagagtttcacttctgttccttttcatttgtgtagcgatattttcacgacatctatgttagataagtaaggatttttgtgttagttttattgttcttgttatgtagataagtagattttagtactttacatgatagtataatttttactgctgtaagagcttgcaaactccattctccatctcttgggtttatctctacctacatggttgagagctgtacaactttgttgcta

SEQ ID NO: 127155 - DNA, 223 bp, Glycine max
  Clone ID: PAT_MRT3847_85827C.1
ggatagaccaactcttggaggcaagcggattgagacccgcaaacggagtattgctgcgccgatggaccctgcatcatcctcggatgcagaggtgcagatctatgtggataatgctggtgatctggaactgattgctaacagcgtggaatattcggaccttaacttggcaagatacggcgatacctgtgctgaggttgtaatcactgagggtggcatacaaagc

SEQ ID NO: 127156 - DNA, 536 bp, Glycine max
  Clone ID: PAT_MRT3847_85828C.1
ccttccctttttttttttttttttttttttttttttttttttttttttttttttttttttttttttttttttgaaactttaaaaaaggacttttttttaacccacttaaaaaaataggcaaaacccccattatttccaaaggaggggcaatttgggaaaataatttttttttagggcccccggcccacagttttaaaaaaaaaggcccctacttttttttattttaaaatttttaaggaaaaaaacccttttttgggaagtaagggagttttttttaatgttaaaaaacttggtgggggaaaaacccttgcaaacaataaaaaagttgttttttcacaaactaaaaagccaaataaaatttttttagtggccccagggctttttttttatccaaaaacaaccctttgtttaaatcaaaattttttccagcagttttttcccccaaactcaaaaaagtctaaaacccttttgggaaaatgggggtcccctccaattccagttttttaaaaaattttccggaagaaggcgggaaaaat

SEQ ID NO: 127157 - DNA, 763 bp, Glycine max
  Clone ID: PAT_MRT3847_85829C.1
ttcccaaagatgttgatgttcggtggttagaagctttagccaacccggggttttataaagagtggttgcaagggagctttggtgctggtgcagcactggctgctgagactactaataaaactactaataagtttcctttggttttggattcaagtgtgagtgctcttgtgaagaggccaaagaagggaaggagtgagaaggaaaaggaagaggagtaagaggttttggtgatagaagggattgagtttgagagggatttgggtgtgaagtttgatgtgtatattgacgatcaggctgaagatgatggtgccaatggagtcacaagtgagcaagaaggaacagctaaaaagaagaataaaaaggatagtaatggagaagcattcgaggctggtgaagtgtctaagaagaagaaaaagaaatcaaaaaagaaggacatcgagtaaactatgatgtattgcagctttaactgccgaaatcgattttttcatcttatagttgtggacaatgttaaatttttatttgctttgaactttacctgttgctgcacttgtagactccatcgtggcaccatgatcttcagcctgatcgtcaacctgcatctcctgttccaatttcctcatttctttctttttttttctacctctctgattgatgatccttcacatgatcaccatttgtatctatagccacgtcatctttagcatcagcagctttttgtttcttctttaattatatggataatgctggtgaactggaacttatt

SEQ ID NO: 127158 - DNA, 432 bp, Glycine max
  Clone ID: PAT_MRT3847_8582C.1
agggaacaagggcgctttttttttttaaggcccgaaagaaaaaacaacattgggaagttttttacatgacttgttgacccacagttgaaacaacataaagggaagcttgggcccctttttgaacccattttttttcattttgatagataggagccagctttattgttgagaggggaaggaacttcttaattttgtacaggggattaggaagcttaaaggtcctttttttccctttggggcctccgaggagatcgctccattggtctccaaagatcccaacaatggtgtatccctgccttatcaatttttttttcgctggtgttttggatgaaacttcatttgggggggaaggatctttgggatcctttaaaattaatttttcccatgtgggggacccacccttttttaaatttgcttttgttaccgcctttt

SEQ ID NO: 127159 - DNA, 532 bp, Glycine max
  Clone ID: PAT_MRT3847_85830C.1
ttttactgtttgtggggttacgttttttttgtgcggggaaaagtcgaacctctaacttattcttactttctttgcattattgtctttacagaatgctgccctcaaacctggcggccaccaggcattcctgaatgtggaacctaggaaagtatgatagaaactttttgaaaaagaggctatttatctttaatgataattagtgtgaaatactcttgcacttggcgtactaaaactatttctttttctccccatgggctccaaattcaagacgaatgaggtaaatttctggaataaatacttcatagctgagtttctgcatagcaccaaaaaagctgttgcagcaactgctgaggctgataaagatgacgatctcgctgtttttctgaaagatgatgaaattttgaaaattgaagctcgaaagaagggattcgtcttctttgtctttaatagcaattgctaatgaagatcttttatcggcatgctgtatcccatttatataattatgtctgcttgcaggttcgacgggttgatc

SEQ ID NO: 127160 - DNA, 274 bp, Glycine max
  Clone ID: PAT_MRT3847_85831C.1
aagctagaatagatgcggttaaataataagggattatccattaaataccatagaagatcgaagacagaaaccattagatcaggttgttgaatttttaaaaagtaaaaacaatggggaatggagtttaggcacaaacaatcaaagcggggagggggttacaaacgcattgcaaatttttcagagtaaaaatactggggggtagatggcgacaaagtatgggtactgtgctaggcaaaagttgatgaattccaaggtactgatgaaagcgttgggg

SEQ ID NO: 127161 - DNA, 184 bp, Glycine max
  Clone ID: PAT_MRT3847_85832C.1
agcccgatatttgactaggaggaaggagcacgacttcccaaggctctggaagaactccgggtcctaggggactaatagaatcagctcaacctcgacccgaacaagctggacagcggattccgcctgacagaacgcgcaacacccttggaaccccagcgccagtaactcctaggacctaagcaga

SEQ ID NO: 127162 - DNA, 562 bp, Glycine max
  Clone ID: PAT_MRT3847_85833C.1
gctatgatgagttatatccatatcctactaataaaaaaaaaggtgtaaaagtggtaacttgtctagtggtatatataagaagaaaattgaaaaataaataaatgaaacaagcaattaccatccttatctctgtggcaaaagaaattaagagcatcgcttccttcatgcagtggtgagatgaaatccaaaaagatgtagataaaatgataaccatgatgctgaagtctttaaactgtagctgtgacatctttgtctgactctcttctctgcgcttctgagtgtatgctgtctattttacattttgggagtagtaaaaggagaaatgagtttagtgcagtgaaaagaacttgaaagaatctatacttgcaagttttattacctttttccaatcatcttaaaccacaaaagctctaagctagttttgaattctcatagattaccttatgtgattaagaaattgtcttaatattattgactaatctggagagtggggttatggaccctataggttagtattgaacttttccctaattttttgtgtcctttctcttgttcccattaa

SEQ ID NO: 127163 - DNA, 521 bp, Glycine max
  Clone ID: PAT_MRT3847_85834C.1
tacgtccttggtcgtcctttttttttttcttttttccacagaacatcgatgaataattcatgtatgcatacagctacaaatcgttgcttgcttttccgcttttatttcgtgaaaaagacgcaatgccatgctcctggcgaacaacaagcgccttgaacgcctcgctatgcaagtgaaatctctggcagcaggacggacaacctgcgtcgctcaaataccagaacagatccgcataccatctgcaatcacatgccagcccatctattcgtcatcctcttccagttcagcagtgttctcgtggaagtcctgcccgccgttcgtcgcaacaatgataccctttcggatgacaaagtcaccgaacctctcaccctcattcctctccaaagcatattgcttcaacatcggcttcaggatcgccagaatttcctcctccttgattgagcttcggtacagcttattcagtctgttgccgtggtagccacctccaggtacatgttgtaagcaccataggccttgccgac

SEQ ID NO: 127164 - DNA, 386 bp, Glycine max
  Clone ID: PAT_MRT3847_85835C.1
gaaaaattaagatcacgcgaacttataatttaaaaaagcttagatgatacaaaagctgaagctgaacacagtgaatattttgaataattcagtgtctgaattccccaccgaatcactccatgacttgacatgcggtacaagctatgacccctgcctgacagtatcgtgaccagtgaaggcattggagtggcagtgaggccgacatgctccatgaccaagatgaggaccttgaataatcttgtccatacgacgaactagtcttccggtatgtgctatgacccgtattagacatatcctcagatcccatgacctcatgaggatccatcttgtgtgccgtatttacaatgtcaactgcacctaatgagactgcagtgacaaatattggg

SEQ ID NO: 127165 - DNA, 405 bp, Glycine max
  Clone ID: PAT_MRT3847_85836C.1
aagccgaataacgcattgcaccactcctgtattgtaattataggtacacatttcagctaaactacacgaaatccctccaaaccagaaatcatattaacatgaatcagttaaagaaactttaacactaatatgccacaactataaatacaacatgaatactacaacaggtagaatgatcttcaaaaaaggatctgtgatggcattagacttctagccggaaatctaatcagctattgtataaaagttcgctccatctgtttcactatctaaacgtatacccgattatacaaatcggtccaatgaacacctcctataattaccatgaaaaggggtgttcttgtatttggtccgatcacaagcacaacttttggatcttacatgtgtgaaactgaatatcttttttct

SEQ ID NO: 127166 - DNA, 169 bp, Glycine max
  Clone ID: PAT_MRT3847_85837C.1
agatattgcaaaccccaaaccaagttttacctcccggcgcgggcacagtaataaccttttcaaacgggcaccaaaaattcaatctgtgggcgggcctttaaaaacacagaggacggggaaaacccggccttgcccccagtaaaaaaccgtgggaaacaccccttttccc

SEQ ID NO: 127167 - DNA, 155 bp, Glycine max
  Clone ID: PAT_MRT3847_85838C.1
gatagcaggctctgtcaacgaatggcgtgatcagtggaaaataggatcatagattttcacattacccttcaagctccaggattcatagtcctcgcagctgatgtatctaatcttgggatctatgtcttgactatgctgctaaccagtagacttct

SEQ ID NO: 127168 - DNA, 790 bp, Glycine max
  Clone ID: PAT_MRT3847_85839C.1
aaacattctttgtagttaggaagttaagtttgtcaaggattatatgctctataaattagaactttcactgtgtaatttttatcttttccaatcaattcattatgttacctcatgagtatcaatattttctctatctcttttatcagtttgatcttcattcctttgatccatgaattagttacaagtacatataagtttttaccctcttacaatgtgtcaccaacacattatcttagatatgagaggctccggatccacttaggcattgttagcaatatccttgggtcggtttggacaaacttttttgtaaatacctttaagattaaaatgagaaggaaaatcaaattaacttctccctaagctaattaatttgtaaaaattctttcataatagcttctccaaattaaaagtttattattaacttatgtctaagtcaatttagtacatgaacacatttatttcatttttttcttctaattatattctcttataaagtgcttaatatatagcatatctttattaactcccaagcaaatgttattctgaaagaaaaggttaggggtaaggatgattagcttatttatcatttcaattaattgacgagcaattgacacgtcctatgtttttttttttttttattggttttgttagatatttcactgaaaactcgttcactggaccaatacccaactgggtaggaaatgctaaacgtcccatgtggagttctatttcaaacgcaaattaattatatggttttgttgaattaaatgatttagaaattcttaatttt

SEQ ID NO: 127169 - DNA, 379 bp, Glycine max
  unsure (1)..(379): unsure at all n locations
  Clone ID: PAT_MRT3847_8583C.1
ttcgtcaatgatctgttcccccgctggtgctactgtcnaccgtggcggtggcggcatggttgctccattcgctggnctcgngtccatgggtggtttgcccaccggcgagacccgcgctgacattacctgcgttgctagcnccggtggaagagcgccatgtttttttttttggccacccgnnggcgcgaagaagggggagattctttcctacctgccagaggtgggggatgcacaattggcgaaggaagtagaatcccttcttaggaagggatggattccttgcttggaattcgagttggagcccggtttcgtgtcccgtgcgcccggccgggcgccccggatctacgatggacgctcccggagcctggggaagctggct

SEQ ID NO: 127170 - DNA, 209 bp, Glycine max
  Clone ID: PAT_MRT3847_85840C.1
gttcaatcataagagcacaaagagtgacacatgtccgcattactatccgaatttcttttgacgacaagaacacagatgcgtgcgtcatatgtctgcaccaagtgacacatgagtactgcagtgacatcattaaggctgctgcaatgttcaagcttaaccaatagacagtggcagctggtgggtcaatccctacggaactgagtcatagt

SEQ ID NO: 127171 - DNA, 157 bp, Glycine max
  Clone ID: PAT_MRT3847_85841C.1
ggaattggaagggttagggttcgggtttgggcgagttcttcgtcggacgaagcggggagtgcgcagtcgagagggacggagagagtgttctgggacggcggtgttggaaatgcatttggggggcttgagggacgtattgtgattgggcggtacagcg

SEQ ID NO: 127172 - DNA, 1528 bp, Glycine max
  Clone ID: PAT_MRT3847_85842C.1
ggctcgaggtgtggttcaacaagaggaattctcccaaattttgtatttttcacccaaatttttccacaaaacctaaccctcctcttgtttcacgcgcaatccgaatctccatttctatcttgtcctagggcgtccgcacgagttaaagcctcaatcgattcgggggtcccaaaaaaaaagtgatcccaacaaaagccgttcaaaacaacatcggaacctaagatccacagaaccttgtgctcgagtccgaagttgtcaacctaatccccgtaatgcgaggttggttggatcaacaagaagtctgcaatcgattctagtatgcgtcccaaaaaaacatccgaacccaaccaacatcctctttcataaccaccacgtctcttatcttccacagacctttcttaggcacaattcctgaattgtccgaaattcaccctcttttttattctcattgttttccggaaattcttgtcgtagggtgtgattgttattacgccatggaagctgtgtcggatcaagacactagtgtatgcactcactgtgatcgggctattcctgcggcaaatattgatttgcattatgttcattgctctcgaaagcttgaaaaatgccaagtttgtgacgacatgattcccgaaaatacttgctgaggatcactatctaaacacacatgcaccggtttcctgttcattatgcagtgaaacacatggaacgtgatattttagatatccataaagaggaaaattgccctaaaaggatgatcacctgtgagttctgtgagtttcctttgccggctattgatctggctgagcatcaggaagtatgtgggaatcgaacagaactttgtcacctttgtaacaaatatgttagactgcgtgaactatacaaccatgaagatagttgcaatacaattcaagacaattctgcagggtcttcaaggtatgtgaggccagctgaaagagatgagggtgctagaagaaggccgcagaatgatttctcaggaaagcgtctttttttcacaatagcattcactggcattgctgttgtcctcggatctatttttttccagaggaagacagatctcagcaatgtgcaatagcagcggagagtatacgtgttagtgtaaatttgcttgatctgtataatttatttgcatacaacagaaagtcgaacgagatatacttcaccggcgcataaaacacatcggcattgtcattgaattatcattttggtcttgtatttgatggtcagaactgccaagtaccaagagataaatgagtcattcattacaaagattaaaatatatatttagttatatacttcattgaaaatgactgtagctctgcatttgatgaaaataattgaaagttttaggaaaataaataatggagaaaatacattggcgatcgagtaaaaaaaacaaataccctaaagggggggcccgccctttgggatcccctccccccctaatttatttcagggcgtgcccttgtggggaaccattttttcctttgaggggctgatataaacc

SEQ ID NO: 127173 - DNA, 283 bp, Glycine max
  Clone ID: PAT_MRT3847_85843C.1
tattcaaccacaccaattctaaaccctaatctatcttctcttaaaatcaaaatcaaccatcatcactctcctttccaaaccccacaacttcataacaccccattcaaacgaacactggagaaagattcgaaccctaaaacaatccaagatcgcaaattgaacagtttaagagtcaagactactctgtccatgttgagattctaccagatggaaattccaccaattctaccaaaaagctgtctatacattccaacctgcattgacaattccatggatgcatata

SEQ ID NO: 127174 - DNA, 394 bp, Glycine max
  Clone ID: PAT_MRT3847_85844C.1
ggtggccttggtttttttttcttttggggaacggggtatgggaaaaacctggcccttaaatggttttttcaaccggaaccgggttttttttgggggaaaagtgatctttctttttatgggggggggaattaacaaaaaactttttttcgggggtttcaaaaggggggtattcttaccttttttaaaaaaatttttgccccaaccaatttttccgggggcttttttgaaagggggggggggggaatttgggggtggttggggtttgaaacctggaaagggttggccccgtaaaccgggtttggttggaagggatttccccctcaaaaagggggtttggttaatccctattggggggggtggaaaaaagggccaggctttttttggggaacaaaaa

SEQ ID NO: 127175 - DNA, 257 bp, Glycine max
  Clone ID: PAT_MRT3847_85845C.1
tcgaagaaaaatgtgtatggttcgggtattgacttctgttcatgattttaatgttcccccttggttgtaataactcattttttctcccaatataaattgaagaagaaaaagagaagtgtgaatgaaatcatatgcgaggtggtggaggcagatagatatttgacagtttggatgctttttcgacttgacatcattagtgctccccatgtattttcaagataatattgaattttgaataaaagtttggttgagttgta

SEQ ID NO: 127176 - DNA, 316 bp, Glycine max
  Clone ID: PAT_MRT3847_85846C.1
tttgattatatcatatttggtgctggttcacattcttgagaagatttacctgaaaaggaagatcaagaaaaacccaaaaggattgatgctctattgagacaaagaatagatcctcaatacaatgaggttcaggcgtcagatggaaacaaatttgtttaaattgtctcttgatgaagatgaaactccgacatggaacctttaggagtgtcaacatcatcaagagacaagctagactactaaaggttgcttgtgggatcttaaaatttgtcaagctaagattgcacttaccaagagcacagttggaggaaccattatg

SEQ ID NO: 127177 - DNA, 1447 bp, Glycine max
  Clone ID: PAT_MRT3847_85847C.1
agaaagcatctcattgtcatccatgtctgtaatcattttactaaaaattaaaagatgaaaaaaacatgttccaaattatcatgtcttttatctcaatggaaaaaatctctgttcaaaaagcaaaatcccaacacacaaatttctccctctaccaattaaacccaaatttgaaaagtgaaatcaacttaaaaacaaagctctaacatattgtgagataaacaaaaatccctacaaattgcttggcttcaaccatacaaactttgtattctgtagctttatattttagaaagatcagtaaaacaagagattagtcaacactcattatgtgtctaatgctactttcacaagatacaaaatgaatcatgataacttcatatatcgactgttcaataatatcacttcaactggacatgaaaaatacccacctgtggaaatccaactgtaaagaggaaaaaagacaatcatcagtacattaaaaaataacacaatgtgacaaccaaaccaaacctaccaaagcagttaaaaatatttagcacctgccctggctccagaaccttgagcagcatacatatttcctgcatcaccatatccaggttgtgaagatcgacctttctgctctgtaggcagattagggtttgtgaagtcccttgaacgatcattattgtagttcacttgtagttcatcaaggtttgagaactgaatgtccagctgacaacaaccatcataaatattgcgtccctgaagagtacttctggcagtaacagcactttgacgggattgatactggattagagcctgaaagccagctgacttctgaaatgttacaatcttttccacaaatccatggggagaaaacacttgatgtagcacatccgctgttataggatacagcatgtgatgaactgtaactaagagaattcgatttggctcatcttctcgtgcttgattttgatccattgtagttagttcctgatgtgaggaaaactggacataaacatttctcccccttatgcttggctggacatttgcataaaattgtaaagcattaactgcagaaggaacatcttgcatttgaagaagagcctgatttttggcacgcaacatcacaagctttgttattactccaaaaggctgaaacagctgaagcaaatcattttcagatatctcatgccccacatttcgaacgtgaatgaccttggaaggttcagccattgcaaattaacctgaaagagggtgacacggaaagagagagagagagttttagtcttaaagaggagtggcacgcatgatgtcgtgaatcgttactaggtcatgttataaaactcccttcccttggagcattttacaagagagagaaccttaattgaatttaaggttccaagtgtgaagatttgctcgcgcttttttggtctctcatcacaccgctaccaaaacttatccatctgtc

SEQ ID NO: 127178 - DNA, 981 bp, Glycine max
  Clone ID: PAT_MRT3847_85848C.1
gcgcagatggattccaccgagctcttgtctatgatttcttcccgaatggttctcttgaaaagttcttagcaccaccggacaacaacgatgttttcctcggttgggagaaattgcaacaaattgctcttggtgttgccacagggattgagtatctccatcttggttgtgatcacagaatacttcacttcgacatcaatcctcacaatgttttactagatgaccacttcctccccataatcacggattttggacttgccaagttgtgtcccaaaaatcaaagcacggtgtctatgaccgcagcaagaggaacgttagggtacattgcccctgaagttttctcaagaaacttcggtaacgtgtcttacaagtctgacatttacagctatggaatgttgttgctagagatggtgggaggaagaaagaatacaaatatgtcagctgaggaaattttccaagttctataccctgaatggatccataatttgctggaaggtagagactttcaagttactattgaggatgagggagatgttcaaatagcaaagaaactggccattgtaggacttaggtgcattcagtggaatccaagggaccgcccatccatgaaaactgtggtacaaatgcttaaaggagatggagatgatttaattgcacctcctactccttttgacatcactggttcttctagaacaaatgctcttgttccaacaagacgtcagaatttcgagttggaagttattcatgaaatagaagagtaaatgatgttgatagtctattatccgtataggcttattattctacatgttagtttattttttcttattcttgcattaagcttctagaattatactttgagttttagtttctgacttcatgtctgaatagaagatgtattttatagaagttgtaagacctatcagcactgttaatagtctgttatccgtgtaagcttaacaatctacttgtttattgtttgttaaa

SEQ ID NO: 127179 - DNA, 798 bp, Glycine max
  Clone ID: PAT_MRT3847_85849C.1
agaatataacaatttaacacactgaccccactgaaatgggacagtccaagaaaccaatacaaagatatggagaggaatatcatacaaaaaaggaaaaaatacaaataccagaaagaaaaaggtcaatcatttctctctgcttttgtaagcaactgacaagataaagcatacagttttcaatccaaaaggtaaacacaaaaaaggccaacctcatctcctcgtccttgactttgctccattgttgttaattcctgatgtgaggaaaattgaacataaacattcctcccccttatgcttggctgaacatttgcataaaattgtaaggcattaactgcagaaggaacatcttgcatttggataagagcctgattttttgcacgcagcatgacaagctttgttatgactccaaaaggctgaaacagctgaagtaaatcattcccaaaacttatctctcctctatttcctcgccctcctccttattttccttctatttcatcgctacgaaacacgttcagatatttcgtgccccacatttcgaacgtgaatgaccttggaaggttcagtcattgcaaattaacctgaaagagggtgaaaaaaatgaaacttttatctcacactcaatcaaactcgaacgaaactcgaatagcccaattggagacctgaaagagggtgacacggaaagagaaaaaggatgagagagttaaagaggagtggcacgcatgatgtcgtgaatcgttactaggtcatgttataaaactcccttcccttggagcattttacaagagagagaaccttaat

SEQ ID NO: 127180 - DNA, 157 bp, Glycine max
  Clone ID: PAT_MRT3847_8584C.1
acgaggccagccaaaatggtcactttggtcttttgggcggaacgcaggctaaacaaaccagatttggatggtcttcccatgcaagcaaaaaaacgtgacatacaggatctaaacatacatttgaaagggggtcataccccttaaacaaggtaataaa

SEQ ID NO: 127181 - DNA, 473 bp, Glycine max
  Clone ID: PAT_MRT3847_85850C.1
accagaaggccaccgaagggggagaaccttgaccaaaagatataaggggggataattatgcacgcttcttttaatttcgggggcggggggggtggttgaatctggggaaggatggcaattggtccaatcacaccacgggggatgcccacgggttcaacccctttggtttgggggggcaattcggggatttttcttttccttctttcattttcgggttttttcccgggttggaattcggatttggattcggatcattcctgaacacccctgtggactggagggagacttccaaaacgcacgtgtggaagctggtgctttccgggttcttcaacgaggacctgctggttgagcttccagacaagagggtgcttcaaggcaacggggagagggggaactttgtcacgagggttaagggccccgacaacgggaacctaaaacaacttaaaggccacatgccttacgggggtcttggt

SEQ ID NO: 127182 - DNA, 494 bp, Glycine max
  Clone ID: PAT_MRT3847_85851C.1
ggctcgagaaaagatccactcaataaacaatcaatatcgtctctctatctgaatgggtgggcctattgctgtaagaagcgctgccacactattacgcttctgtggaaccatcgatcccactcaatggacgttcctcatgtctttcatgattccttatctcaggatccatttctgacgtgcaaaataagcataaccgttttgcacattctcacgagcctggcgcaaagtaccacatacgggtgagctacgtgtcaggtggcttagtgatatccttagatgttcttcgcggacagaatatgaatgggttctatattgtttaacacagagctaggacctgaatcactgattaggaggatgagattgaagatatattttctatagaagcttattaatttcactcgtgactacattgatttctattattatcacgtccgacaattggtctagaagaaacttggcgatagattcaattcgaagctaatctcgaccacgct

SEQ ID NO: 127183 - DNA, 505 bp, Glycine max
  Clone ID: PAT_MRT3847_85852C.1
aaggaattccgaaattgggacccaaaaacttggtaagaaaacacatgggaagcctttactcggggcctaactcggaaaaaagcaaaaatggccccaatgggtgggctcttgccttccgccttaataaaaaaaacttcgggtatttaaaaaggtgggggggctttttggggaaaaagggcactacccttttccggataatttactaaaacagggatcccattattggttattttaaaaaaaccgcccataaaagccatgggtaaccatggggctttaaaaaaacgtattctcaaaaaacctatatctacggggggggcaaaaggcccaagatttggaaaaaccccaattgggccgctattaaaaaaaaaaaagatttccttcacttccgaatcccaaacaattggaggggggggcagaacacaaaaatttaaaggcatttcttcaaaagggtctccatttcaaaggtcgaagctttcgcagaagcttcatcgatattacctaccaa

SEQ ID NO: 127184 - DNA, 411 bp, Glycine max
  Clone ID: PAT_MRT3847_85853C.1
aggaattccgaaattgggaccccacaactgggtaagaaaacacatggaaagcccctacccggggcccaactcggcaaaaaacaaaaatggccccaaagggtgggctcttgccttccgccttaataaaaaaagcttcgggtatttaaaaaggtgggggggctttttggggaaaaagggcactacccttttccggatcatttacaaaaacagggatctcattattggttattttaaaaaaaccccccatcaaagccatcggtaaccatggggctttaaaaaaacggattctcaaaaaacctaaatctacggggggggcaaaaggccccagattgggaaaaactccaatttggccggttttagaaaaaaaaaagatttcctttccttccgaatcccaaacaattggaggggggg

SEQ ID NO: 127185 - DNA, 271 bp, Glycine max
  unsure (1)..(271): unsure at all n locations
  Clone ID: PAT_MRT3847_85854C.1
aagcantgaattcnaaaacttaagttcattccttgtgttttgctgtcttcctcaaaaccanacatgtcgancacatgcggcaantgcnactgcgctgactagactagctgcaccaaggganacagctatggtgntatngtagagactgagaagagttacatcgagactgtngtcatggatgttccagcagctgagcatgatgggaagnncnagtntggcacnaactgcacttgcacggnctgcacctgtggccattaaggnntatgnntga

SEQ ID NO: 127186 - DNA, 556 bp, Glycine max
  Clone ID: PAT_MRT3847_85855C.1
ggctcgagagcaggtcaagcacaatcacacccaactctgccttttctctcttctctcacaacccctttgtctctacacagacaaacttattattctctctctttcttaaccaaccaatacataaacacacagaaacatgctactgtgcaaatcattgggtttctctgcacagaaccaccccgccccaattcatttcacttgttaaattctcctcctttttcactctccacactcaatatgaatttgaggtaagttttttttctaggaagtgctagtctttctggatttttgctgcgttttaccatcgggggttgccgggaattgccgcacgatcatgccgccggcgctgtccgatccgctgtcggtgactccggcgagctccgacgctgttttgcagcgatcggcgccggacaatcggcgattcggtgatcttagagggctgcagtggcggataaatcttggggtgttgccgtcttcctcttcgacttcaattgatgatcttcgtcgagtcaccgctaattgaagaagaggtatgctagcttgagaaggcgcctac

SEQ ID NO: 127187 - DNA, 169 bp, Glycine max
  unsure (1)..(169): unsure at all n locations
  Clone ID: PAT_MRT3847_85856C.1
atttctatattttggttctctgtntctctacgatcaggatccaacggtccaaaatgttcggggcttgtgnngtttgntttnccaaggtttaaaagnncaaaacnttnagntcnacntaattcgnctcnagatcttccttcnnggataacgttttcgggttcnagaaggc

SEQ ID NO: 127188 - DNA, 399 bp, Glycine max
  Clone ID: PAT_MRT3847_85857C.1
ctttgcgttttgtacagaagcaatgactatgtcattaaatgcaaacccgtgctctgcagcatggcaggcgggctgggtgcagcccaccggatatcatcgagatgtcgctggtgcacctggatgggctgccactccagtgcaggatgttcaagccacacccgcaaggattaccgcctctcaggaacagcagcacccagacctatagtgctgaagctccacatcagccggttagcgataataggagaagggggaaactgactttgccacagggcactggccgatgtggtacatgaaggccgctcattataaggggagaggggcggagcccacaataggtaggctcaagaatgcgccctgagctgttgcttgattgtggggaactggggaaggagagagcac

SEQ ID NO: 127189 - DNA, 517 bp, Glycine max
  Clone ID: PAT_MRT3847_85858C.1
cagaaagggaaaatctataagaaagatgatcaataatgggggatcagctacgatgactagagattatttgaaacatgcgccgaaaaaatgcatgacacgggagataggaacttggagagaaacatgcacaagtgttagggcatggtggagatgtcacaatggtaccaaagaacacgatcaatgaccactgaaaggaggacacagtagctggaaaattgtcaaatgcatagttgaagctaagatggagaaagaaatgatctaaattaaggacccaactggaagaaggctgaacttgcatgaaggaatcacatattggaagggagttaaagcaccaagagaagtcagatggttcacatggcatgagatgcaattaatttgaaattaaagtagaactccaaattttagggaatttggcaatttgatatattcgcaagagttaatgagcatgtaccgttagcgtaaatttttttacgctacaatagttaataaacttatcatacataataatttgtgattg

SEQ ID NO: 127190 - DNA, 283 bp, Glycine max
  Clone ID: PAT_MRT3847_85859C.1
ggtccggattcccggtcgacccacgcgtccgcggcatctgggctgacccctctgcgcaaggaaagtagggtggggctgtgctaaaaaaatattcgaactcgctctggatcatagctgagacatgatttttattcttcgcatttacacattgtttgggttgggtagggaagcacaatcgctagaaaaggacatgggctgatccataagagcacgttgcgtggtatcgttgaattttctggcgccatgggctaaagctgaagacccttaaagatgccaagcttgg

SEQ ID NO: 127191 - DNA, 298 bp, Glycine max
  Clone ID: PAT_MRT3847_8585C.1
tccagccacaaaatacgcaggagagttttgagagatcaaatgatgcgtgaggtgtccattcatagcggactttagtaacattattaattcactccattcgctatgtctagaatacatttatactgggtgccaggtgtttggcgcggaatcaaatggggaacatgtaatagtattaaggggaaatccttcactttattaagtcgtaacgatgtttattgacatccatttttgacttcttttaatgtacaataatggaatataaagtgcaaagaaataaaatgcagaggctagttttatt

SEQ ID NO: 127192 - DNA, 409 bp, Glycine max
  Clone ID: PAT_MRT3847_85860C.1
cccactcttacacctcatccccattcaccatacccacccttcacatcttcaccatcatcatcatcaccatggtcatcaccatcatcatcatcattatccgacccatgcacctcatccttcagttctctctcttaaccatgctccagctccgactcctgcacatcattataaaaaaaacctgctttgcaacgttgaacctctgatgatgtttgagcgcaaacatctccaataaaaatttatttgcgttgtgggagttgtttttatttttttatactcagttatgttaaattgattgatatatgcttccatttttttattgtttcagggatggaggcttatgagcctaaagttgtaatgatggaggttcaatgcttaaattatattgtaatagattttatttgaaacaaaa

SEQ ID NO: 127193 - DNA, 291 bp, Glycine max
  unsure (1)..(291): unsure at all n locations
  Clone ID: PAT_MRT3847_85861C.1
ttcgaattcggactcgaggaatttaattctccaaaaaaaacatagatattgtgcaagcatggcttcaagacccggaattctctctgattggccatggaagcctcttggaagctttaagtatatgttactagctccttgcatcgttcatagctcgtattctatgatggtgaaagataacagtgagaaggacatgtttaactttctcatattaccctttttgctatggcgtatgcttcataaccanatatggatcactttctctcgttaccgaactgccanaggcaacgcaag

SEQ ID NO: 127194 - DNA, 389 bp, Glycine max
  Clone ID: PAT_MRT3847_85862C.1
caaagaggaataccatttttctaaacccattggcaagctttccctttaaatatttaattatgaaactggcattacacaaaagacaaagggggtttaacacatcatccggatttcctttttgaaaacgataaacggtaacacacagcttacctaactagggatattggaggctggacaataagggcaattgcataggaacctgatacaagtggtctccagggttaaagcccattttacaccatttagagcccgggcaatgcaaaattgaatgctttaaacatggttaaagctcaactccatgcagctttcagccaacttttttatcataagcataaactttaagggggcaaattttaagctggacaaacccgatcacgccaagacccctt

SEQ ID NO: 127195 - DNA, 734 bp, Glycine max
  unsure (1)..(734): unsure at all n locations
  Clone ID: PAT_MRT3847_85863C.1
tannagtgaagannngcgtatnnnaagtggtggtgnnnnnaagaaaaagaaaaaaagaaagangnaggaggttaaagatctcaggtttgaaatnnnagtggataannnaagctcccagttaaaaagaaaggaacgtaagaaaaagtatttcgaagcaaaaaagaggaagcacaaaaaatccaatgaagaaaaaatggacttccctggacaagaaaaaataaaatttggagatattgtacaagccccaccaaagttagctgttcctcctaaggcattcaagaatgcttctcaagagagacttagactccaggctatagaggaatacaggagtcgcaaaggatgggcgtcaaggctaggaagtcaccttccacctcctgcgactactttggacccttaaatcactctcagcatgttgtgaagcatactatgcttacctgaactagtcttggatatcatgcagagtactcatgaacaaagaaactgtcatggctatttcattttttcttggagtatcttcattcagagacaatttatgggttcttatgggaagtatggtctgacgacacatttgtacatgtgtggaagttatttgttacactttacaatctatgcaaagccaattattgagctgataggatagctaaattttgttagaatataaagaaaatatcaactcaagtcgccatttacattttgtatctccaaatattctttaatctattttttccttggtt

SEQ ID NO: 127196 - DNA, 232 bp, Glycine max
  Clone ID: PAT_MRT3847_85864C.1
ggatattttatagacgctgttcttgtagctgatcacttgcgtgctctcagatttgattacgcatatattcgtacgctattatcgatgtcgcgatccgtgactattatgtctgatctgctttgtaaatacgtatgatgttagtcttcattgattttagtatttctctcagttcaaattgccaagaggcttgtcactctgcacactaattctcgtctcgattgtgtggatctag

SEQ ID NO: 127197 - DNA, 488 bp, Glycine max
  Clone ID: PAT_MRT3847_85865C.1
cgggggggaaaaaaaaaaccaaataaaaaatggcaaaccggggggcccccattaaaaaaccccccccccgttccttcgaaaaaaacccttttaaaaaattgggggcccccagtttaaaaaagggcaacttggcaaacccaacagttccccccccccccgggggacagttcgaaaaaggcccccccccggacaaaaaggggggacgccaggcaagttaaagccgggggaaaaagcgatgggtccccccccaatggccccaaattccggaaaccaggcaggaaaaaccgggggaaccggccccaaggaccggaaaggggcgccgaccgggggcgggaaaggggaaacaacggccccccctgtaaaaggggggccccagggggggccattaggggcccccacaaaaaacccaaacaaaaaccctttggggaaaaagaaaaaacaaattttaagggcttgggaggggttaaggggggggggcccgacccaaa

SEQ ID NO: 127198 - DNA, 444 bp, Glycine max
  Clone ID: PAT_MRT3847_85866C.1
ttgaaaagcgcatgggacaaccaacaagtgcatgtcctattagttcaagtgttatgttcaggccccaacaagctattccagtacagaagctagagtcatttgctgcatccattgctcagttcataggcttggagttacctcccgtgaacttttatgctatagcttatctttttcttcaaaagttatcactgcctgttgaaaagattcttccttatgcatgccgcatatatgaatggtcgatgcctcctgatttgtggttatccttatccagtaattattttaggctacctactcatgtatgcgttatgtcaattctggtagtagcaataaggatattgtataacataaatggctttggagagtgggagaagagtttgtctcgtgatgatgatgccaaagacaacagtgaaatgggtaatgcttttgcctctgataatggacatg

SEQ ID NO: 127199 - DNA, 843 bp, Glycine max
  Clone ID: PAT_MRT3847_85867C.1
gatgaggctgttataaggaggcttcctcgacgattaatggttaatttgccagatgctccaaacagagaaaaaattctcagtgtcattttggcgaaagaagatttggcacctgacattgattttgaagcaatagctaatatgacagatggatattctgggagtgacttaaagaatctgtgtgtcacagcagctcactgtccaatacgagagatcttggagaaggaaaagaaggagagaagcttagcattgtctgagaacaaacctttacctggattgtgtagcagcggtgacattcgtcccttaaagatggatgattttagatatgcacatgagcaggtgtgtgcaagtgtgtcatcagagtcaacaaatatgaatgagctactccaatggaatgacctctatggagaaggaggatcaagaaaaatgagatctctgagctatttcatgtaaagctctctctctctctctctctctctgtatagcatttcttgcttaggctattcttctatcaccacctaaagggtgcagcaaggtcagcagtgacctgtttgatgtggaaatcccatctttggttctgcctctagtgtattatatcatcataggttttctttcccctttttccaaccctcaccatcctctccaaattttttcagatattagtagaatttgttgactatttcaattgagataaaaaagtttaatttaggttcccagctgatccaactctccctccccttattcttgcttgtatatactgagttttttttttctcgtaaaaataaaataattcttaattatttcttgtaaaacctgtggctaaatggcattgtatttctgattttc

SEQ ID NO: 127200 - DNA, 2550 bp, Glycine max
  Clone ID: PAT_MRT3847_85868C.1
cgcctgaaaacccttcttcgctgtcttctgaggcttcttcccgggctgccacgcttctactttcggcaccaagctctagtgatggtgatgaaattgtacgtggcacaccgataaggtcccagaatatgaaaaagccagaggctgccaccgcaacgtaaaatggctctgctaataaacgccgtaatcgagttatctcttgggctgactttcggtccaccttcgacgatatccgaactttagattctgtgagggacaagttgaagctatgggtcaaaacttctcactgtccaataagatagttcttggagaagcaaatgaaggagagttgcttagcattgactgagtaccaaccattacctcaggttgtacagcagttaccgacgttcgtcccttaaagacggaagattatataaatgcacatgaaaaggacagtattagagcaacatagtattgtgcaagaataaattatctcctagaatgcgtcgccctggccggcaaaagtgcttcaagagatattattatttaggacgttcacaggatgagatgaaggcatagtatttcttgtgaatataaggctatgcgtaaaatgatgaagtaattaacacttatatggggtaggaggagaacaaaaaatgaaatcactgtgcttgttcttgttgagacatatatatcttttgatctcgatgaatctgatttttaggatacctccatgctaactgatggttaagagtgcaacaaggtcaccactgagctaataaatgtacttgttcgttttttccaagacaaagtggcatttcatttgcctctggacgaggctttactttctgattggaagcaacatttagaacgtgatattgaaactatgaaagctcagtccaatattgtcagagtttgcacagttctcaacaggattggattggattgccctgaccttgagactctttgcatcaacgaccaaaccctcacaactgaaagtgtggagaagatcattggctgggctataagttaccattttatgcattcatctgaagcttctatcaaagattccaagcttgtgatatctgcaaaaagcattaattatgggcttaacattctacagggcattcaaaatgagaacaaaaacttaaaaaaatcactgaaggatgtggttactgagaatgaatttgagaaaaaacttcttgctgatgttattccgccaaccgatattggggtcacatttgatgatattggagctttagaaaatgtgaaggacaccttgaaggaattggttatgcttcctcttcagaggcctgaattgttttgcaaaggacagctgaccaagccttgcaagggaatattgctttttgggccccctggcacaggaaaaacaatgcttgcaaaggctgtagcaactgaagctggagcaaatttcattaacatttcaatgtccagcattacatcaaagtggttttgtctaattccataaactatgtcaaagctgtcttttctctagccagcaaaattgctccaagtgttatttttgttgacgaggttgatagtatgctggggcgacgtgaaaaccctagtgagcatgaggctatgcgaaaaatgaaaaatgagtttatggtaaattgggatggtctgcgtacaaaagataaagagcgtgtacttgttcttgctgctacaaacaggccttttgatcttgatgaggctgttattaggaggcttcctcgacgattgatggttaatttgccagatgctccaaacagagaaaaaattctcagtgtcattttagcgaaagaagatttggcacctgacgttgattttgaagcaatagctaatatgactgatggatattctgggagtgacctaaagaatctgtgtgtcacagcagctcactgtccaatacgagagatcttggagaaggaaaagaaggagagaagcttagctttgtctgagagcaaacctttacctggattgtgtggcagtggtgacattcgtcccttaaagatggatgattttagatatgcacatgagcaggtgtgtgcaagcgtgtcatcagagtcaacaaatatgaatgagctactccaatggaatgacctctatggagaaggaggatcaagaaaaatgagatctctgagctatttcatgtaaagctctctctctgtatagcatttcttgcttaggctattcttatatcaccaactattgatgtggaaatcccatcattggttctgcctctctctattgtattatatcatcataggttttctttcccctttttccaaccctcaccatcctctccaaattttttcacatattagtagaatttgttgacaatttcacttgagataaaaaaaagtttaatttaggttccctactgatccaactctccctccccttattcttgcttgtatatatcaagttttttttctcgtaaaaataaaataaatatttatttttattaatttcttgtgtaacctgtggctgaatggcattgtatttctgattttcagtttgtggtgtgtatgaatatatatgaacgctactcaatttttctaattgtattgt

SEQ ID NO: 127201 - DNA, 364 bp, Glycine max
  unsure (1)..(364): unsure at all n locations
  Clone ID: PAT_MRT3847_85869C.1
tttttcctgnatattaataataatataatttaaaaattcccactttggatgtgtactactcaattgtaaatgattttattagataaataataggatgatttgtgagaaaataatgtataaggagttataatagtaatgaacaaatactgagtaagtttgttgctgataaatagggattattagttaaaaggaggatctgtgagtgagtgagtaaagtgaaggatgaaggaaggggaacagcaacgagtgcctttgagggagagagcggaatggtcagatgttacttcgcttcctcaaaacgactgccctaaccctgtcgttcccatccagtacacggaagactttttccaagtttggattactt

SEQ ID NO: 127202 - DNA, 256 bp, Glycine max
  Clone ID: PAT_MRT3847_8586C.1
ctgaggaaaacacaaaggggtcaaactaccacctattgtccaaaaataatccaaaacattgggagggcactgaatttggcaacccatatcctttttccggggggtataattgtgcacccagaatggggccccccctggggggggggcccccccctttggttgcgggccctttttttccccccaactttttttttaattacacccggggaaacaaaaaagggggcccgaggccaatccatcatacgctaggggggga

SEQ ID NO: 127203 - DNA, 306 bp, Glycine max
  Clone ID: PAT_MRT3847_85870C.1
gaactctacaaaaagaaagtagacatcttaatgtatcagagctaccatagcgcactccaagggcaagaatatcgctgcgcttatcaatatcgaaaggaagaattcctagaaacccaacagatctaaacatcagaaaataaaagcaagtttggcacctggagctcaagaacccacatcttggaataacagatgcgagatgactgaggagatttcaatctactgcccgatgaacagtctgcctagaaaagcctacctaggagtacaccagagaagccaacattgattgatacctaccatagcctgacg

SEQ ID NO: 127204 - DNA, 461 bp, Glycine max
  Clone ID: PAT_MRT3847_85871C.1
tacggctgcgagaagacgaccgaagggcatgcagagacatcatggctatccaattttatcactttcaaggcactaaggttttttctgatgcccctgatgctcttttctgctctttctaattgacaatttttgctaattgagctattggtcggtcaggtgaaggttcagctcgaacgaaatttgtgtcttatctttacttctcttttatcttcaataaaagataagtaaagaggggcaactatcataccctaattttgttcggggacatttgttgttggtatgcagaccttggctgataactttgggacacttaaacaagcatcatcgcgtaatccgtaaagttccatgacgttacggaaagaaatcaaccaaaaacatgaaaatgggggtgtatttaacaaaatgcagggtgtaaatagcaactggacccatttgggcccatccaaaagattctggagaaa

SEQ ID NO: 127205 - DNA, 482 bp, Glycine max
  Clone ID: PAT_MRT3847_85872C.1
atggttactattattgctaaaactgtggtcgatatcaaattctaggtcttttgccaaaagttctttgaacaggtaagataactttgatgagtagcactccagcgaactcaaaagctccttctcgaagaccacagtggcgccaacgccaaccaaccaccatgaagaataatccaagttgcctcaaccgtacagcgttgctctgtggatatttggaagccataaatagctcttccattaacgaattgagacaacttcattgctgaacaaaaatgtcaacatgtttcccaagatcagtaggtaaaacattccattgactgtactttttccaactgtgctcgctcaaaattatacagaacatctcatgcaatcaagagacacgtgtgtcatgtcaaagtcaaagctctattggttcaacttcaattgacgcaactataaaaattgagttggtgaaaaaattgaaaactgtcaccatcgcactaatg

SEQ ID NO: 127206 - DNA, 1095 bp, Glycine max
  Clone ID: PAT_MRT3847_85873C.1
ggtagtgtgtccctaagaatgcgcgggtggaccccacactccacaacaaaacaacaacgatggtgggcgggtacgacctctccgacaccgacaacgacaacgactccgccatcctcgctggcccaagacgcagtcgttttggagcaagtctccgccatcaacttctccggcttcaccgacgaatcccttctcccctcccacctcgaaaccgtttccgcaacctcaaattcttccctccctccaaaaccaaagctctcactttttcttccacaaacaaccaaagtcccaatcttgatccatccaaacacaacccaaatgaaaaacccgagcaagggtctgtttcaagtcccaatttttcaccatccaaacataacccaaatgaaaagcccgaccatgggtctgtttctgtttctgtttcttcgcccccttttggttctgcctctgcgtcttccccttcctctgatgaaagttccatgtcttccattttcaaaccgacgcaaaaggaacaaggttccaaacggaactctgtctctgagatcttcgaattccccttcgcctccacggaggaaggattgtttgtggttctctcccaagaaaaaaagcaaggagaattggggtgatgatcacttgttgtcggaattaggaagcttctcgaggaaggaacaacaaaaaatgccgaagaaggcgatgaaggaagaagagaaggttagccgcgaggctgaaaagattgttcagtgggccaagcaagaatctgcaaggttcaaccttggggatcagctcagtgattgatgatgagtagagtacagactacagtgcactatctatatcattttaggcttcgtataatcgtagaagaagaaaattaggtgttataagctgttgcaaagtatatagcgttttctggtttcttttggggacagtgggagactatcaatttgtctgtgtttagatcgatacaaatatgtttacatagtttgtttgggaatggctgtactgcctttatacaatgaagaacggagatattttggcaattttattttgatttgatgatctgcatagtgtcttcgatatatttaaatgataattactttttgt

SEQ ID NO: 127207 - DNA, 299 bp, Glycine max
  Clone ID: PAT_MRT3847_85874C.1
atatatgaatcggagctatgcagatctcttattacgctctatcctgaagccaaaggaaatgacatcggaattcctcggtgaattccaattccacattttcaataaataaggaggcaaaaatgttcatatatgaattggaattatctgttttcttattatgcctatcctgaaaccaaaagaaatgagatcgtaattcctcggggaatatcaattccacattatcaagaaataatgaggcaaaaatgttcatatattgaattggaattatttgttttcttattaagcctatccttgaacca

SEQ ID NO: 127208 - DNA, 339 bp, Glycine max
  Clone ID: PAT_MRT3847_85875C.1
cacgcgtcaatccaggcgtcagaagatacataggggagaggagggggttagtgtggtagcttcactaagtcgaaaagtctctcgatagataaatggcatcaaatcgccggcttcatttgagaggtcaactttccgttcatgtctcgatctccgttgttcatccagtcacgggtgtcatctccacacaggctcggtcgccgttcagtgtcgctgccagtaaatctcgctcgcgaatccagactcaggtatccctttgaattgaccgtttgtgtgcaatccatgcaaccgtaccacaacgctcctgcttctgatgtgatgacttcgatgccaaccttctcg

SEQ ID NO: 127209 - DNA, 821 bp, Glycine max
  unsure (1)..(821): unsure at all n locations
  Clone ID: PAT_MRT3847_85876C.1
gaaacacaaacacaaacatagggtaactcgaatgcaatgcaaaactttgatccaaatcaaatgctgataaaattgaagggtcccttagatcttctttgaggtcactgttgcatctctcacctttgctccaacgccacgttgctttggttggagggagatgattgatggagtccagtgaggatgggagcatgtcatatagagagttccatgcgaatggaagccgcatggttacatcagaagttgaggccaagcttgatgaaggaaatattcaagaggcagaagatgcattgcgagaagggttgtcgctcaattttgaggaagcaagagctcttcttggaaagttggagtatcagagaggtaatgtagaaggtgctcttcgtgtgtttgatgggattgatctccaagctgccatacagagattgcaaccttccttttctgaaaaaacaccagtcaagaaaggtcgcactcgcactgaatcaccctcctcagtctctcagcatgctgctagtttggtgcttgaagccatctacttaaaatcgaagtctctgcaaaaactggggaaatttactgaggctgctaatgattgtaaacgtattcttgatgccgttgagaagatattttatctaggtgttcctgatattcaagtggataatagattgcaagaaatagtcagccatgcagttgagctccttccagagctttggaaacaagctggttgctacgatgaggcaatctctgcttataggcgagcccttcttagtcaatggaaccttgantatgattgctgtgcaagaattcagaagtcattgntatttttttgc

SEQ ID NO: 127210 - DNA, 287 bp, Glycine max
  Clone ID: PAT_MRT3847_85877C.1
cggacgcgtgggctgacgcgtcagcaagtatcaaaaatgtacattcgaggtcctgtatgatcggctggaaccaaattacgcatgttggtaggtctgccggaggcctttactagcaactgggcggacgacacctgcacgaacaacatgtacatcgtatcttactagggaatcgagggaccgctgaaacggttgccaccatgacgaatgccatacatgagtatgttcacctagaagaggggaaagcaatatcctcgtaagatggggctgtcggtcatggttgatccaca

SEQ ID NO: 127211 - DNA, 222 bp, Glycine max
  Clone ID: PAT_MRT3847_85878C.1
tacggctgcaagaagactacagaagggggaatgtgagaaggctgatactcttttgatcagggggggttaaattttgactgagagcaaggactaagctttttaggcgtctgccttagcctacaatagataaatcgtaaacatacggtacacctgtgaaaggagctctgcatgatcattaaatccatacattgcaaggtggataatctggatatttcacatgac

SEQ ID NO: 127212 - DNA, 1247 bp, Glycine max
  Clone ID: PAT_MRT3847_85879C.1
cactcgagccgaatcggctcgagtgtcaaccaaagacagcacatgggagtagaagctgtgtgctgagttgcaaagccatcatcaatccaatcttgtgttactataagtatttaacagcatagacacacaccctttggttctggccaccctcaggtgtgaatactataccttagcatgaaattcaactttgtgggactacatgttgaagtttgattggtgaacgagatctgatctcttgatccacaaaaccatggctgaaaaggtgaccatcatgaaactcaaggttgaccttgagtgtgagaaatgctacaagaaggttaagaaacttctcggcaagtaccctcaaattcgggaccagaagttcgatgagaaggaaaacattgtgttcatcacagtggtgtgttgtagccccgagaagataagagacaagctttgctacaaaggtggaggctctatcaagagcattgagatactggaactgcccaagcccaaggccgagaagcctaaagcagaccctcccaaagctgagaagcccaaggccgagcccgagaaaaagaaggacggtggcggcgagaagcccaaggccgagcccgagaaaaagaaggacggtggcggcgagaaacccaaggccgagcccgagaaaaagaaggatggtggggagaagcccaaaggggatgctccgaaaaaggaagccgagaagcccaagcccgggcccgagaagcccaaggacaagcccgcgccagctcccttacccgtgcagccacatatggctgcacctatggcggttccagttgggatgctctatgctcctcctccgtgctacgaaggcaggcccgttgggcctgggtacgaatacggtgggcccatgttctgttacgacgggtactatgcaaggcccgtatatgatagttacggtggaggcagaccctgttatgtgaaccgtggtgatcaatatttcagcgaagagaatccacaaggctgcataattatgtgacaattacgtccacggcgttgcattattgggttctgtaaatgatggtggccattcacaatttgtctcaattatcatcatgtttaatcacgtccaatccaatgtttttgttatttaaaattcaacgaccaaaaaaaatgaggggggaaacaaaaataaaggttatgtaattaatggttataaatgctatactgtcatgatgtttcgttttttacgtttgatgagttaataaaataaagtgtttctttaccaaaaa

SEQ ID NO: 127213 - DNA, 377 bp, Glycine max
  unsure (1)..(377): unsure at all n locations
  Clone ID: PAT_MRT3847_8587C.1
ntccgccacgcgtncggcaagaagaagtttgagactctttcctacctgccagatcctgatgatgcacggttggcaaaggaagtagaataccttcttaggaagggctggattgcttgcttgcatattgatgtgcagcacgcgtttgaatacacatgagcgcaacaagtcaccaggatactacgatggacgctactggaccatgtggaagctgcctatgtttggttgcactgatgcttctcacgtgtcgaaagaacttcaagatgataatactgaatgacacaacccattgatacggctgatccgactagagcaagttcgccaagtgcagtgcatcatctttatcgcctacaagcccgcatgcttctaagtgtgaaaaa

SEQ ID NO: 127214 - DNA, 442 bp, Glycine max
  Clone ID: PAT_MRT3847_85880C.1
tacggctgcgagaagacgacagaagggtgaaacagaaaattcaaatatagttccagaagcaattataaacccaattagttctaaacactggaaaaccccatctaaattataccaacgtccaactgcccctgaccttctactagaagaaagaggagaaaataatttcaagagtttttctacaaataacatctatgaatggaatatagatgcttaaacagaatacaatatcatgaatacactccaacatatgacaatggtagccacgacttaccaaacctcccatgaatgttcggaagaaaccattataaacattttagtggcaggattttccggacaactaaaaggttggtgggataattatctcaccaatgaagaaaagtaaaaaatttacagcgcaatcaagactgatctcaatggtaaggtcattactaatgacgatgat

SEQ ID NO: 127215 - DNA, 424 bp, Glycine max
  Clone ID: PAT_MRT3847_85881C.1
tttgtctgcattacacctgagcctcagatctcatctcttatccacaaaaccatggctgaaaaggtgaccatcatgaaactcaaggttgatcttgagtgtgagaaatgctcctcctccgtgctacggaggcaggcccgttgggcctggctacgagtacggtgggcccatgctctgttacgacggttactatgcaaggcccgtttacgatagttacagtggaggcagaccctgttatgggaaccgttgtgatcaatatttcagcgaagagaatccacaaggatgcacaattatgtgacaattacatccacggcgttgcattattgttgggatctgtaaatgatggtggccattcacaatttctctcaattatcatcatgtttaatcacgttcaatccaatgagctagtatttctctgtttttgtta

SEQ ID NO: 127216 - DNA, 1208 bp, Glycine max
  Clone ID: PAT_MRT3847_85882C.1
ggctcgagctggagccgaatcggttcgagcattagagttgatgctagagagacactatgcgttgagacacgtgtacggtcggcatgcggtagtgcatgatcattattgcacacaacaaaactcattaacaccataaagcaaacatgaataaatatattgaaaaataatcatggtaagtattctgtaggcatataattgagtagtatgtatagggattgaggaaggtgcattgagtcaacaagatttggcgtgacaaccaaaacagcacatgggagttatagaagctatgtgctgagttgcgaagccatcatcaatccaatcttgtgtgttactataagtatttaacagcatagacattagacacattcttcggttctggccaccctcaagtgtaaatacaaccttagcatgaaattcaactttgtgggactacgtgttggagtttgattggtgaacgtggtgtgctaatgccttcttaagttttgcttttctgtcactttccctctgtgttggtttgctctcatcacttttgtctgcattacacctgagcctcagatctcatctcttatccacaaaaccatggctgaaaaggtgaccatcatgaaactcaaggttgatcttgagtgtgagaaatgctacaagaaggttaagaaacttctcggcaagtaccctcaaattcgggaccagaagttcgatgagaaggaaaacattgtgttcatcacagtggtgtgttgcagcccagagaagataagagacaagctttgctacaaaggtggaggctcaatcaaaagcattgagatactggaaccgcccaagcccaagcccgccgggcccgagaagaaggaggccgagaaacccaaggccgagcccgagaaaaagaaagacccagagaagcctaaagcagaccctcccaaagccgaaaagcccaagaccgagcccgagaaaaagaaggacggtggtggcgagaagcccaaggaagagcccgaaaaaaagaaggacggtggggagaagcctaagcccgggcccgagaagcccaaggataagccaacacccgcgccgttacctgtgcagccacatatagcggcaccgatggcggtcccagttgggatgctctatgctcctcctccgtgctacggaggcaggccccgttgggcctggctacgagtacggtgggcccatgctctgttacgacggttactatgcaaggc

SEQ ID NO: 127217 - DNA, 1060 bp, Glycine max
  Clone ID: PAT_MRT3847_85883C.1
gtggagaagtgtttgcgggatgccaagatggataagagtaccgtccatgatgttgttcttgttggtggttctactaggattcccaaggttcaacagttgttgcaggacttcttcaacggaaaggaactttgcaagagtattaacccagaagttcgatgagaaggaaaacattgtgttcatcacagtggtgtgttgcagcccagagaagataagagacaagctttgctacaaaggtggaggctcaatcaaaagcattgagatactggaaccgcccaagcccaagcccgccgggcccgagaagaaggaggccgagaaacccaaggccgagcccgagaaaaagaaagacccagagaagcctaaagcagaccctcccaaagccgaaaagcccaagaccgagcccgagaaaaagaaggacggtggtggcgagaagcccaaggaagagcccgaaaaaaagaaggacggtggggagaagcctaagcccgggcccgagaagcccaaggataagccaacacccgcgccgttacctgtgcagccacatatagcggcaccgatggcggtcccagttgggatgctctatgctcctcctccgtgctacggaggcaggcccgttgggcctggctacgagtacggtgggcccatgctctgttacgacggttactatgcaaggcccgtttacgatagttacagtggaggcagaccctgttatgggaaccgttgtgatcaatatttcagcgaagagaatccacaaggatgcacaattatgtgacaattacatccacggcgttgcattattgttgggatctgtaaatgatggtggccattcacaatttctctcaattatcatcatgtttaatcacgttcaatccaatgagctagtatttctctgtttttgttatttaaaattcgacgagagaaaaaaaaaacaatgaggggggaaaagaaaaataaggttatttaatcaatggttataaatgctatactgcagtgatgttttttttttttcgttccatgagttaataaaataaagtttctttaccaacaaggaaaaaaaaaaaaaaaa

SEQ ID NO: 127218 - DNA, 942 bp, Glycine max
  Clone ID: PAT_MRT3847_85884C.1
gcacgagggtgtgaatacaataccttagcatgaaattcaactttgtgggactacatgttgaagtttgattggtgaacgaggtgcgctaatgccttcttaagttttgcttttctgtcactttccctctgtgttggtttgctctgatcacttttgtctgcattacaacctgagcctcagatctgatctcttgatccacaaaaccatggctgaaaaggtgaccatcatgaaactcaaggttgaccttgagtgtgagaaatgctacaagaaggttaagaaacttctcggcaagtaccctcgtgagttcatcacccttgcttcttctttttttatgttatgtactttatacatactagaatcagaattgtgaaatgaaaattttgcaatttgcatgcatttatttggggttgcaagagggtatcaaattgagttaatttttgggtgttgaaattttgtgaacaagagaaattcgggaccagaagttcgatgagaaggaaaacattgtgttcatcacagtggtgtgttgtagccccgagaagataagagacaagctttgctacaaaggtggaggctctatcaagagcattgagatactgggaactgcccaagcccaaggccgagaagcctaaagcagaccctcccaaagctgagaagcccaaggccgagcccgagaaaaagaaggacggtggcggcgagaagcccaaggccgagcccgagaaaaagaaggacggtggcggcgagaaacccaaggccgagcccgagaaaaagaaggatggtggggagaagcccaaaggggatgctccgaaaaaggaagccgagaagcccaagcccgggcccgagaagcccaaggacaagcccgcgccagctcccttacccgtgcagccacatatggctgcacctatggcgggtccagttgggatgctctatgctcctcctccgtgctac

SEQ ID NO: 127219 - DNA, 439 bp, Glycine max
  Clone ID: PAT_MRT3847_85885C.1
ctgggcgaggttcatcagttgagcaatctgaattagcttctacttcgtggtggctcgagatggcaacagcaacaggggcctcaacacggacacggccttttgttgcttcgaaggtctctttttcggtggtggttgttttcattctctctcttttggtcgcttagctttctgggttcctctctcccaatgacgtctcaacaacatccttatcttccttccctttcacacagacacaaaaagatcaatagcattgttatctagtgacaaaaaagagtaccattgtgattgttaaattatactatagtacatgtaaattgtaaagtggtagtagtacaagcgtttcaatcattttgttgagggttattctgttggttacgggtgagttctttaattgtggacctttggaattggatgatattttttattagaatgtgaacaa

SEQ ID NO: 127220 - DNA, 260 bp, Glycine max
  unsure (1)..(260): unsure at all n locations
  Clone ID: PAT_MRT3847_85886C.1
atatttcctgaattgcccgagtcatctcagttgatctcacaagtcaaggatttcgtgaccagagaaaatctctgattttcaatcaaatatatattaaagtcatagagggaggctagggggtatggctatgcaaggtcttgcctccagccttgtagacaacaaaaaagcgtttactctttttagaaaatgaaagagtttattactatcatatcgcaggatctctccttaatgtaggaaggactattttggtttgtttcaan

SEQ ID NO: 127221 - DNA, 267 bp, Glycine max
  Clone ID: PAT_MRT3847_85887C.1
aacaaaaaacaaaataaaaaaaaaaacaacaaataaaaaaaaaaaaaacaaaaaaaacaactaggaaaaaagaaatacttacactaatcaacaaaacaaacaaccaatacttaaacaaccataaaaaataccattcaactctttatacattatatctcaaactcataaactcaaaccttacaaattcctctatcacacaaatacactccattacctacaatttcaactacaaaaatacacactcttacccacctcaactaattacct

SEQ ID NO: 127222 - DNA, 400 bp, Glycine max
  Clone ID: PAT_MRT3847_85888C.1
aggcaaagcactcttggacacacagccaatctctggttgtgatatttccccattgattccttccttgttaacaaggtcattttaatggttcaggtgaggacagcagccagattcaaagtccagaatttgtgctgttacatagagttcacactgtcaaataacattgaatttaataatgatcaaatttttctagtagtctttggcagagtgtataatctcattggcatgattggtgaatattactaatctctttataatgaaagatgctttacaaataccttatatttgctaacatttcaaaactactaaataaatgaaatagccatgtgtaccgattcgccattctaagagagcatctgggcactcccctggttgattccgttttcctgatagggctacc

SEQ ID NO: 127223 - DNA, 158 bp, Glycine max
  Clone ID: PAT_MRT3847_85889C.1
gagtttatggccctcgtcttttcttcgctacggaacacatgctcaaaatcggttcctcttatgtagatctaccttcgtcgtcgagctgatgcagtgtgtgggaaggtaaccacctgatggacgccgctatcatcggccaagacggaagcgtatgggct

SEQ ID NO: 127224 - DNA, 404 bp, Glycine max
  Clone ID: PAT_MRT3847_8588C.1
ttcgtacgcccacgcgtccgggcaagatgttgaagagaggacgcggtggttcggcggggaacaagttccggatgtcgttgggtctgccggtggcggtgactgtgaacttggctcgacaatacgggtggtaatgaacctttacatcatatcggtgaaagggatcaaagggcgtttgaaccgtctccccttggcttgtgtaggcgacatggtgatggccaccgtgaagaaggggaaaccctatctgaggaagaaggatttgtcagcatgcattgttcgccagtgtaagcctatggtccaaaaggacggagtctacatgtatttagaagataatgctgttgttattgtcaattccaaatgagaaatgaaagggtctgttattactggtcccatggaaaagagagtgc

SEQ ID NO: 127225 - DNA, 665 bp, Glycine max
  unsure (1)..(665): unsure at all n locations
  Clone ID: PAT_MRT3847_85890C.1
nnnnnnnnnnnnnnnnnnnnnnnnnnnnnnnnnnnnnnnnnnnnnnnnnnngcacaagctctcccccctctcccccggccccaggttgtccaatgacctgcccaagctccatgtcccggccaagcttgttataccctctcccggggcgtatcccatggatgaggttgacatggtgtttgttggggcggatggagttgttgaaagtggtggcataatcaacatgatgggggcttaccaaatctcattggttgctaagagtatgagcaagcctgtttatgtggctgctgaaagctacaagtttgctcgactttaccctctggaccaaaaggatttggctcctgccttgcgaccagttgattttggtgtgcctattccatccaaggttgaggttgaatgttttgcgcgggattatactcctcctcaatatctcactctgcttttcacagatttaggtgttcttactccatcagttgttagtgatgaactcatccagctatacttgtagtcattcctgtataattttcttccgattcctttaaaatgttggcctcccttcaagattctgtgtcttgtgaaataattttgtaacaagtacatgcattagcaagttcagtataactgaggatctatgaagctcggatgctctgaaaatgtcttagtttcgg

SEQ ID NO: 127226 - DNA, 383 bp, Glycine max
  Clone ID: PAT_MRT3847_85891C.1
ccggactctgattaattccgcgctcgaccatctcctagtctgcggccggccttatttatttgtttgttcttttaaatattttttttttttctaaaccctaactcattgccaaaatttttttttatttataatagactacatgcctcatggccctctctaagccctgctgttgctcattctttattctactgttttgcttctgaaggaccttttggcttgtgtacttttaaataaaacaatttttccaactttgctttgcgtttggaaaaaacttttttatttaaaagtacatactggtaattgggtcggccccaatttcgagctttcgtccccctggatattaattcctaaccgttccctgggggcgcccaaattttctttat

SEQ ID NO: 127227 - DNA, 822 bp, Glycine max
  Clone ID: PAT_MRT3847_85892C.1
gccacggccgtcggcgcctggcctgctcggttgttcggagaagaagagaagggggaggttgtctgttagcagaaaatcattgagcttggaccagttagtggtgccggaaactgtgtttgcactcactgaaaaacctgtttgctcctttaagggccatctccatgatgtgcttgacctttcttggtccaagtctcagcgcttgctctcatcttcgatggacaaaacagtgcgactgtggcatttgtctagcaagtcttgtctgaaagttttttcccacagtgactatggtgcgcgcatccagctttttcctcttgctgtgcgcctctgcttttcccgagagacgacagaagggggtttaactgctgggttgttagatttccgcacatctgaagggctaatatggaaaaaaaaataaaggcaaattattgaaggcttgacaactattttaatttttctttgactggtaataatgcttgtgcctggtttcctactgattttcatgaacagtttgtgcctggaagttcatcagaagtacttatcacttcttctgattctcggattcgacttgttgatggtattgaattagttcataagtttaaaggtaggtaaatttagttctatatcaaatgaatttattaatgatatcataacaagtgaatatatgtaaacattgttgggtacctgatgagaatttttgctgctgtcaatgataaaagtaaaattattattgagatgataaatgctctgaaacatatgaagacgatttctgtcaaaaaataatgagaacaagtgaccgacatacgtgtgtctgtgtaaggtgtg

SEQ ID NO: 127228 - DNA, 212 bp, Glycine max
  unsure (1)..(212): unsure at all n locations
  Clone ID: PAT_MRT3847_85893C.1
ccatgaattttgcttactcagcagcagcaagctatggtttgaantccaatgttgagttggtgcgttnttggtccaaagttcctcagtttctgagagcttcaccgccaaaacaacaacccaataatcagttgcatttcaccaacaacgcancactttggaacgcganttctgagcctgctattaaggattntcgtccagctatcacccttntt

SEQ ID NO: 127229 - DNA, 258 bp, Glycine max
  unsure (1)..(258): unsure at all n locations
  Clone ID: PAT_MRT3847_85894C.1
ggntgcttataacatactacncatattttataanacanaactggncctaacttatcatccaaaactgnctacatanccagtatattnccanttatanatataatcnntattnagggngcccaatcccatctnagtaactaaagtgatcattaggctgtttcatttaatatgattaacagactcattnggnaccggtttctaattcaactttctcctgtatgttttcntcttanggtttaataacacttgantgcgtga

SEQ ID NO: 127230 - DNA, 615 bp, Glycine max
  unsure (1)..(615): unsure at all n locations
  Clone ID: PAT_MRT3847_85895C.1
ccgggcatgcagcgcctccggaatagtcagagcctcggtgggcggcgcagcactagggctctcttggtcatttcagctctctgcgccattctcttgcatgagccttcctactgataccagtttaaggagctgttagcactggcaggtcccagcgggattgggaccatactctcatgcaatgaagagcacaccaacctttctcgtaagtgtcagtgaggtactctcgtccttttttccttggacagaaggaggtttatggtctgataggctgaagatagacagagcaggttctcaaaaatatgggagagatcctaaatcgagcggccagcattcatcagttgtcagacactattttgttgnctgacttgaaagacttcaagaaaggaatggagtccctggtaaaaaactgcccttcaacttgccccggcctcgggcaaacctatacaggaactcggctttgcccaatgggatgcccaagatttgaaaatcgaagcgcatagcccgcactttgggccaccatttctaataggtatattatgaggtcttctcacaaacttcaggttaaatattacggggagggacattatccaaaccaattggcttggtttggcatct

SEQ ID NO: 127231 - DNA, 374 bp, Glycine max
  Clone ID: PAT_MRT3847_85896C.1
ctaagatccactcaatcaatggaacagtcaatatgttgtactaatatctggcaagtctattgaagggtgaatgatggcatgaacattgctattaactctaaaatcagggaacgagggacacacactcaagctaagagaccaaatttacaaggctactgtaaacacatagattgaacaagacccatacagcaaggttgccagaaaaacatgcaccaagactaactaggtgatgggcattcatagcgatcagcagcacagccaaactggactccccacagatatgacgtgacacgttccggaccatggggtatgggtgaaactatgtgggactaggtgctgacaactgcatggtcctagtgacacattgagcagga

SEQ ID NO: 127232 - DNA, 373 bp, Glycine max
  Clone ID: PAT_MRT3847_85897C.1
ttgttattatcgaaaccgagaacctgcaactggggtgcgttatagcgaaacagcgcgcagctacaacggccgttgaaagggccggaattgccaaagatgttaccgcattgattggtaaaaccccattattatatctaaataaacttgctgatggctgtgtcgcccgggttgctaccaaactgcagttgatggagccatgctctactgagaaagacaggatcgactatagtctgattgctgatgcagaacagacgggacttattacacccggtaagagagttctcatagagccaacaagtggtgatacttgcattggattagccctcatggcaacaacccagggttacaagctcataattacaatgcctgcatt

SEQ ID NO: 127233 - DNA, 263 bp, Glycine max
  Clone ID: PAT_MRT3847_85898C.1
ggcacccacaccagggggcccgttaaaggacaaggcccggtcctgcaccccagagaatgggcggccaccgcccgcccggcaaacggaacccgactggcacaatgacacaaatcctgaaatcgccactcagccggccaggcccaccaagcaccaaccccatgcaaccccccacaaaactgaaagaaccgctgcaaaagcgcccagcgccccatccccggaacagcacaccggacccatacgaaactaaaaccactacaaatcag

SEQ ID NO: 127234 - DNA, 416 bp, Glycine max
  unsure (1)..(416): unsure at all n locations
  Clone ID: PAT_MRT3847_85899C.1
cgaaaacganacgcaacaacaattgccgagcgcgttccttccgttccgaaccaacgccaaacagggttcataacacctccatttcattcccttcttcgaatcgctcacaactaagaagttttgcagttaaaaatactgcaaagtacggttattccaatattcttctccgaaggcgtaatctagcgcacgagtaagatgaaacggagaaagcgcagccacagcgagagcagaaacgaagaagacagactgagcgacttacccgaatgcgttctcctccacatactaacattcctgaacgccaaacacgccgtaagaacctgcgtgttgtcgactcgatggaaggactctggaagggtttccaaccctaattctgcactcctccgacttctggactttcaagggtttcaccaaattcg

SEQ ID NO: 127235 - DNA, 713 bp, Glycine max
  unsure (1)..(713): unsure at all n locations
  Clone ID: PAT_MRT3847_8589C.1
tgcatatgtttgtgcactaaaagcaagacatgtattagcttctttttttctcttcccggtttttcccacgcgcccgctttcaacacccttccctcctccacctgcaatgacttctgacgacggcgcctccttcaacgaaaataccccttcacacctcaagtagcacttccaacagaaacaccaactccctcagcgtcgcgacaagaggggggagggcaanaagtgcaaacaaggagaataagggggggcgggagagggtctcagtcattgcctacttcatctacctcctcgacttctccgagagttgtgcttgggcttgagtctcggtggggtgcgtgcatatctattggggtgcttgagtcttgtgcttgctcagatcttggtgttttgtgggggggggggggggttncgagaggggaggaagagggcaaaatggtnttnttncgtgggggagggggggtgggaaaagagtggtttcnatttgaatttgggtttatgggtttggggggggggatatgtgagtgtaagggtgtgggggtcttttgggatagcccttggggggtgggttnatgtgcangggagatgggcagagagggggttcaattcatggcgtttttttaaattttttatgggggggggggggtactttttaaccgacgtaaatcatattgtgggtttttagaaaaaaaaaagagaagaaggggggggggggg

SEQ ID NO: 127236 - DNA, 247 bp, Glycine max
  Clone ID: PAT_MRT3847_858C.1
aaaacacttgctccattattattttctcattcattcgttcatcatggtcgggttcagcaacaacgtgatcggactcctcttcttcctgaccttccgcctctcgatcccgatcctggtggccggagtgtggctgagcaagcagggcgccaccgagtgcgagcggtggctggagaagccggtgatcgcactcgggctttacctcatgctcgtctcactcgccggcctcgtcggcgcgtgctgtcgcgtg

SEQ ID NO: 127237 - DNA, 315 bp, Glycine max
  Clone ID: PAT_MRT3847_85900C.1
ccgtgcccaccctcctttagaaccttttttaacatggccattgcgcgctatgggtgatttttaagctcatggggacactgtatcattaatctaataaagatcatgaccctcctcggggtactcacctcatacttagataccaacactacacccgattgaactcatacccaagtcatctacaaaccacaatattggccaacgaaagtctcacctatagttagatacttgcaacttgctcctggaagaactttctaacatcacattgtaaatgatcgatagagcatcacattatgataaaaaatcatacagactcat

SEQ ID NO: 127238 - DNA, 218 bp, Glycine max
  Clone ID: PAT_MRT3847_85901C.1
ccacgcgtccgcttgtgatggcattaagactttcagactttgtttttgggtctgatgcatgtaaaaaggattcccagtgtttctgttgctcttgcgatcctgtgaggacacatatgagagaaatatttagtttgttgatggcaaatcttgtcttaaaaaaaaaaaaaaaaaaaaaaaaaaaaaaaaaaaaaaaaggtcagacaatctagaggacccac

SEQ ID NO: 127239 - DNA, 1352 bp, Glycine max
  Clone ID: PAT_MRT3847_85902C.1
aattcggctcgagcggctcgagctcgagccgattcggctcgagggagtatcaaaaccaaagggccaaggagggtagattctgtgagaaactcaagatcaagaataggccaaagtttgtaggagtgagacaaagggcttcagggaaatgggcagcagagatcaaagacacatcaaagaagattaggctttggcttggaacttatcaaactgctgaggaagctgctcgagcttatgatgaagctgcatgcctccttcgaggttcaaacactcgcaccaatttttctactcaagggtgtggcgttgctacaaattctcctatatctctcaaactcagaaacctccttgatcgtaaagccatgtcaaatcaaagtcaaagtcaaattcaaaggcaatcctctatgataagttccactttccaaggtgctgatacttcagctagtccaaatgttagtgccatcaataagatcatggttatggaaaactactctgcttgtagtagtgaaggtaagtctttgtttttggttcagaaccaccaagtctgtgataacccgtatggactagatatgaatatgatcaactgttcaacgggtatcacaccaaatacatcgcagtttgattattcttggccattagcccaacaaaggattaacgaattgccaatatcaaaagatgattttggtttgaatgcagaaaggcaattgtcaggatatgccaccaatgagtgccatgaggaggatacgtatgcatatgatgtcaattatcctctctcccactttttctgcttcacttgatatctatcttaatcttcctatctcttcttaaaacatagtttgtataatattaccttgtttccgtgtcattttccctgagaggataaaccaagagtcaagaccattgaatttctaaactcactctgctttaccaagtgcttataggaatcagtaacaagattttcggtacaatggtactttgcccagagtgtaacaattcttttcaactcctcaaagttaacccattggatattttgcaagctcgtgatcacttacagtcacaccccatctcagtataataaggaagactaatgtgtgaagtcaaatgtgtacgcactatatatcagtcttcattcttctacaaatgtacttagtgcttacgatatattcaatcccactccttatggttggataattagatgaaaacggatattaagatgtattttacttttttgtgttatatatcacctttaaaataatttctgcacacacatataagtgcatctcctagctaggttcacttgggggtccatattattttgtgatcaagtcatgtataatacaagtatttttgtttaaaaa

SEQ ID NO: 127240 - DNA, 514 bp, Glycine max
  Clone ID: PAT_MRT3847_85903C.1
aattcggctcgagcacagcacaagacttaagtagaaaagggaaggtgagtttgttgggcatagcacctcgttctcgcatttttcgaaacacccagaaggcttcgaggggggaatcgcttgcggcgtagcctctaatgagaatgttccacgaaatgggtgatggggtggcggcgtggtggacgaatgatcgcgcgtggcgaaggttcttggagggagagagggagcaaaagtagacgagttcggagagcacgcgggtgtcttgatagagaccagagacgtgaacttgtgcctgaatttgacggagttggtccatggaacgacacgagtttaggagagagaggcattgctgcttcttcgagagggactgtgttttcagtgtccggaaccgaagaaccatgcattcggctttcaagtgccagcatctgcgattttcatcgtacagtttaataaagatatcttatcttatttcacatgcaacaattataagttatttttaaaataaaaaattaatcac

SEQ ID NO: 127241 - DNA, 144 bp, Glycine max
  Clone ID: PAT_MRT3847_85904C.1
cccactcgtccggtcccagttaaaaattacgcttccaccctccaatatattactcaggtcaaacaaagaactccactcgtcccataaaacctattacttgacatcggtggctaattcctgtttggtctattgttacttctactt

SEQ ID NO: 127242 - DNA, 244 bp, Glycine max
  Clone ID: PAT_MRT3847_85905C.1
ctctttttggtatatttttttacccaaccagcaaatacgtgctttttttaaaaatttgagggtgaactactccacagaccaccaatggacccttaagaccataataccccagtttgctctgcacaatcacactataactagtctacatcatcatcagcactcgcttattaattaccaactcaccccccacctcttccttgtgaaccaaacttttttgcttacacacaaaagacctactgccttc

SEQ ID NO: 127243 - DNA, 1389 bp, Glycine max
  Clone ID: PAT_MRT3847_85906C.1
aggcacccagactttacatttgagtatatctattatagtttactactcaactaagatggactcgaagaggaagatagcattacttatttcaggccttctggccatgctcattttaatctcctcagatgtggcagccagagaattgaaagaggtcactggtgctggcttgtctggtggtcgtggggtcaactatggtggctttggtggtggctcccctggctttggtggtggcttccctggctttggtgttggtagcttccctggctttggtggtggcggcggcttccctggctttggtggtggcggcggcttccctggctttggtggcggcggcttccctggctttggtggcggcggcttccctggctttggtggtggcggcggcttccctggctttggtggcggcggcttccctggctttggtggcggcggcttccctggctttggtggcggtggcttcaacaaccctggcttgggcggtggcttcaacaaccctggcttgggcggtggcttcaacaaccctggctttggtggtgttggtggtggcatctgaggaggaggatagccgtaaaggcaagctgttgtgagttgcagtgagagatgttgctttattaatgggctgatgccctagctatcagaggatacataacgtacttatcataataacatatttcatgaataaaatccggtacgtgttatgagaggcacatatggatagacagcaagtcctgtcttttcttttgacctttcttcccgccagggatactactagaattactgttggatatatattttgtcgttcgttgcgcttaattgcctcattaagattaagagtaaactcaattatctactgtaaaataatttgtcacataataaatcttgcctattacttctaaaaaaaaaaaaaaaaaaaaaaaaaaaaaaaaaaaaaaaaaaaaaaaaaaaaaaaaaaaagaacagcatatgtgtgtgtatatgtatatatcacttattgaaagcaggaaacggcatgcatgcaggaaagcagaactgaatcgaaatggagagaagagattagtgcttttatttgtttacttattatatgttatgtatgtatccaactgcaagtgctcaggagctaggttgtaatcctaggcaaaggtggagttggtggcaatggtggagttggtggcaaaggtggcagtgtaattgggattgggactgttggcacaggtggcaatggtggcaataatggtggggttgctggcaaaggtggcagtggtgggaaaggtgagagatggcgtgttgctaatgccatgtccatgcttgagaaggaaatagcaatgaacaaagccaaaatgatgcaactatgagagtgagaagccatggctagctgctcggacgcgtggg

SEQ ID NO: 127244 - DNA, 417 bp, Glycine max
  Clone ID: PAT_MRT3847_85907C.1
ggaagaaaggaagttcaaaaaaaaataaaccaggggaggggaaaaggtggaaaaaaactataaggggacccttttgcccgtcccatttccttcaaaaaaaaaaattaaaattagatttttgggggcgggattttgaaaaaggaaatcatgggggggggttgccaattttgaaagagggtaaataccccgcttgtaaagattggcggaaaacaaacgacaaaggggactttttagtaaagctcatgtaacgctgggacaactaaggggcctttggggcccagggttatcctcaaactattattttttcttttttgggctctaaaatacaggacatgctaaaattaggctacggaggccttttccttttggccaccaaaaaggcgtggccggaagtcaaaaacctttaggggggggccc

SEQ ID NO: 127245 - DNA, 514 bp, Glycine max
  Clone ID: PAT_MRT3847_85908C.1
gtatgggggctgacgcctgcccagtgccggaaggtcaaggaagttggtcccctgcctttggccgtggcttctacaaccctgcctttggcggctttggcggtggcttcaacagccctgtctttggcggtggcagcttccctggcggtggcttcaacaaccctgtctttggtggtgttggtggtggcatctgaggaggaggattgccgtaaaggctagctgttgtgagttgcagtgagagatgttgctttattaaggggctgatgccctagctatcagaggatacataacgtacttatcataataacatatttcatgaataaaatccggtacgtgttatgagaggcacatatggatagacagcaagtcctgtcttttcttctgacctttcttaccgccagacatactactagaattagttactgttggatatatattatgtcgttcgttgcgcttgtctcattaagattaagagtaattaaactcaattatctactgtaaaataatttgtcatatg

SEQ ID NO: 127246 - DNA, 326 bp, Glycine max
  unsure (1)..(326): unsure at all n locations
  Clone ID: PAT_MRT3847_85909C.1
gnangcacgcgtacgataaggtnntnagtnccgctgctagctctagncnatgcnngcngtcatatctnntcntnntctaacgacgttnctccagatatgngatgacanccantgnnagtnntcncggtgtngtccgtnaaggtgggncanacngnganagtngangngatggatncngaggantcanacnganacatatctcangtgagntcgnnntagggcgaaaaaggggnnncctagntngtntgtggtttantnttctntngtnagtgnatggannantggnngttgntgacaggnntntggatggcatngtcatttatggt

SEQ ID NO: 127247 - DNA, 469 bp, Glycine max
  Clone ID: PAT_MRT3847_8590C.1
acggctgcgagaagacgacagaagggaatctctccataccatccttgtcttgtttctataatataaaccacattgaaccatagtgtttctccaacttttctgattgttgttgtcacttcatggcctacttaatgctaagtggtgctgaaagtacaaagctcattagtggtagtggcatagctccacctgggtttggctcggttggtcttaactttcataagaggtgacttcttgaagaggaatgtcgtgtcatatggtaacaaatacatgacacccagatgcagcatctcatcattgagtcctgcttctcaacctggattcaacaaggaggcattttggttctacaagtttttggctactactgtgtatgatcatgtcataaacccttggcattggactgaagacatgagagataatgccttggagcatgctgatgtctatgaccgtaaagtgagaatggtggatgttg

SEQ ID NO: 127248 - DNA, 407 bp, Glycine max
  Clone ID: PAT_MRT3847_85910C.1
cagccagccgcggcggacccgccgtgtccacccacgccgatgaaccgccgcgagaagacgacagaagggggggagcagtgatccgaaagacccagagagccgggggaagaagaagaagtgcgagtgaaacacgctgcagatgccgctgagtcaggctcccgcatcagaaggcacggcagggctgaagctctccccggccgagacagttacagatgcatgccccgatcatggagtccacgctgatcacccacacgcaaagggcactggcgccggcccacacccctgccacgttcagaccaagggcccaagatcacaccgccagcttggcgagcgaggccactcatgtgttcgctgcgagttcccgaacgctggatatggacgcctgagcccttgtgagcatgccttcc

SEQ ID NO: 127249 - DNA, 274 bp, Glycine max
  Clone ID: PAT_MRT3847_85911C.1
gttcgatcgagacgcaactctctgaatttcaggatgcgcacgtccagaagagcagagccctcgaataacgacgtcgtctcttcgggacgcagaaactggagcaagatcttacaaatcgctggttcagatggtgtgcacccagcagggccagccacactccctcgcgagccgccactagtttctcggcgaccgccatcgaatgcatcaagaagggtgggactccgatgttcgatgtcacaaggagcaaatttctcagattgatgggatgttgacg

SEQ ID NO: 127250 - DNA, 225 bp, Glycine max
  unsure (1)..(225): unsure at all n locations
  Clone ID: PAT_MRT3847_85912C.1
tatgactacagaatgggattcatattttccttgcgtttcccttgcgttttggctcactttctcggctggccaaacacccctctctctcctccaataaccgaccagctcaccgacgaccatatcgcctaattcatagaagccttcatcctcttctacaaggacngcgatggttatattactactaaagaacattatactgtgatgctgtcactatggcaaaaccca

SEQ ID NO: 127251 - DNA, 296 bp, Glycine max
  Clone ID: PAT_MRT3847_85913C.1
ggccggccttttattctgtactaccattttttccgtagggtaaggtaagtctatacaaatcatagattatgccaataagtgaggactgtgaaacttctctctcgggctattttacagaggtttcattaacccacggtgaaatgggaaaaaaatccgcccgcatggaatttaaactagttcattgtgggtaataaaaactgtgttagattcgactgttggacgagcttcaaacagatcaacttattgagaaggacttggattttttctgacttccttccctcggatatgctggtaga

SEQ ID NO: 127252 - DNA, 254 bp, Glycine max
  Clone ID: PAT_MRT3847_85914C.1
actctcttcgctcgtcgtcaaagaattcctatcttcatgctaggctggccttgctcgcaggcctggttcctccgtacttatatcgtcgacgcctccgcttactcttcaacgctttctgggattccttttcggctctgaccatggcgacgtcttcgtcatcggcggtggtcccggctgctatgtggccgtcatcagtcccgcgctgtctgtctatccaccacttgcatcgatgagcgtggcagtctcgggggtac

SEQ ID NO: 127253 - DNA, 218 bp, Glycine max
  Clone ID: PAT_MRT3847_85915C.1
aatagaaataatataaaagcatttctgatattcagattctaaacctcttatgcccgccaaggttaatttcgaataaactgcctttccattctcattcccaaaactatacttgctttctatacattctcaaatgcaacaacaaattcctttttcttttatccaacatcataaaggataaacaagcttataaatgcactttatagagcactaattcttaa

SEQ ID NO: 127254 - DNA, 353 bp, Glycine max
  Clone ID: PAT_MRT3847_85916C.1
aaaaaacacatcactttttcatattattaaaggcgggtttgcgacttaactacataggcaagaagacaacagggcccccaaccacattaaattccatcagaccaagatttcccccctttttccttttttggggaagggggccttttcccctactaccccaattacgatgcacaacattaactatattttggcactaaacccccgcacaaaaatcagtgtttcccacaggcggggggttacattactgggccatccgccagggaaaaaaaataggggggagggggggcccccctttatagccaaagttgtcacaatttttttcacaaaaggggaagtggtattttttacatcaa

SEQ ID NO: 127255 - DNA, 346 bp, Glycine max
  Clone ID: PAT_MRT3847_85917C.1
attctaaacattgctgtgttttttagccactaaaatcaaaaggttaattacaacttattccccacaggctatattgctgtaagtacattaacctggaatgaacgtcaacttcatttcttactattctgaaattggcgataaactctagatgccattattaaggttcctcccgactgatgactttaaaggaaaaccatgaccaatttgaacggaggggctttgtggattttcccacccaagtacaccttaacctgttgatgagacacttgctcattgtttgcgggagaacttaccctatgcgccaccccacatggggcttgtaatcgcttgctggctcgtcttttta

SEQ ID NO: 127256 - DNA, 180 bp, Glycine max
  Clone ID: PAT_MRT3847_85918C.1
cggctcgagcttctcgtgccttgctctctttatacacccgttctctcatgtgactctcttctttctggtttaattctactcctccttcgattcatctatctcctccttcatcttcattcttcatacttcatacacacatcatatttaactagtaatacccttctaaattaataagtaccc

SEQ ID NO: 127257 - DNA, 227 bp, Glycine max
  Clone ID: PAT_MRT3847_85919C.1
aggaataataatgttttcttctctatgcttttacttcatgagaatgatccggggacatggaggaaatgccagtgctgtgaccacgtgagggctcggaaaagttggatttcctccatgtccccggactattctcatgaaggaaaagcaaagagaagattatataaggaataataatgtttcctatacttggcgttggcctatttatggtgcaatatttagaggttaca

SEQ ID NO: 127258 - DNA, 522 bp, Glycine max
  Clone ID: PAT_MRT3847_8591C.1
gttcggtgtgagacctttttatgatctcttgacttcatcgtgtttttttgttcctacctacattctacaatagctggacacatgctactacaaatactaggaacaggtcaacacacatgtttttgttgcatcgtcgccggaatcaccacatagcaaaacaccaaagaggacgggggagccttcacatgcgtttccagattaaatgtttcaatctttcttactccggcctaactaacctagcttgatcaagaatcgcccgtgagggcgtcgacgggcacactaatggaccttgagtctagtgctaccgtgcaaaagcgaaggggccggcgcgggtggattttatgtgacgtggccaaaaaatactattgtggtcccatggggtgtcccaaaatcttaagagcttgtggggaacccagggtaaaaccatcttgatgtgctcaaaaggacggggtgggcctcttcctgaacatgtgctgcagcggcgacaacatgtgtttatcgccctggaattggtccatgaag

SEQ ID NO: 127259 - DNA, 306 bp, Glycine max
  Clone ID: PAT_MRT3847_85920C.1
agaagacccatcttcgggagagacaacatggtagtagtaacacctgtcgtgtcggcactcggagacgaaaccgtagaatactagcatcgccaatccgtaagtgcccctgcctcttagcctaataaaatctattggcaaagccactaactaagcgaaacgaagacactttctctccgagtcttagcatccaatcagaggttccatatctcttccttctgtcgcaccgaagttacaatcgatcaattgcgtctctctttcgtcaatcttgattccttctctctgaacaataactgggataacgctcat

SEQ ID NO: 127260 - DNA, 241 bp, Glycine max
  Clone ID: PAT_MRT3847_85921C.1
tccacgcgtccgcgcctactttcataggaggatgggattgacggacctactgacgtgtctctcttagtatgaagagctgctataaattctccgacctatgcaactaactgctgaactttgacgaatgcagtgctcacacacacaatctttctcttagatacaactgctgccgagtgcaggttgccgacaactgcatgcatgcttggcttgcgatatatgtctctctcatagagagctctca

SEQ ID NO: 127261 - DNA, 480 bp, Glycine max
  Clone ID: PAT_MRT3847_85922C.1
gctcagtagaagcctctttacatggaattaatgttaaattttctttattttcaagcaaaaaggagctattctgaagaagtgtcaaaggagtcatcgctctaagcaagctcaatgcgcttagcgcacatcatggctaagcccagcactcgtgcgcttagtgagtaaatgggaatctggaaaggcatctgctacgcaagcacgcgcttagcgcattatcagctcgctaagctagtcatttttcgctttccaggcttagcgcgagattggcgctaagctcaaattcacttactcgcgctaagtgggagaatggcggtaagcgcgacatcaaaatcaggaagccctttttaagcctgatttgcacaaaattaaagagagcccaagagaacggttcactatggagaggcctgaagactgtgaatttcagagagcatagagcagagcaaggggccaagttttcatcttttagggagattagtgagt

SEQ ID NO: 127262 - DNA, 576 bp, Glycine max
  Clone ID: PAT_MRT3847_85923C.1
cgtccatctgctaggatgcggccgccgttacactggggtcaatggcggttgccctgatcgaaactgccgacggtggtattgcgcctacgtcggcatgaggacgggctgtctgagagttttgactggagagagaatggcactgtacccgcagttaatttacagggtttataggatatgctgggctttctgcggcacaggcatctatgaaaggcgccacttttcttgccaccgcaaacctcgttattctgagagaaccacggttccttgcctgggacgacaaagtgtgacttaacatatcctacttcgtgtgacattgggtgaactggaggctttatgacaagatgcctacagttataggctccattctggcggaaaggaggaggagtttccatatccctactctgctgagagaggcgagtgcaagcctgatccatcacaatatagtcccctaagaacacacttgtcacccctatccgggctgatgacaaccctattgccggatattcatttagaactggttcacttgctatgggcgccgaggcaattctcatgcttgcttcctttgggggggcctga

SEQ ID NO: 127263 - DNA, 622 bp, Glycine max
  Clone ID: PAT_MRT3847_85924C.1
gatccccgtcgtgatcgagaagacgggccggggcgagcgcgcctacgacatctactcgcgcctcctcgaggaccggatcgtcttcatcggcacgccgatcgacgaccacgtcgcgaacgtcgtgatcgcccagctcctgttcctccagaaggagaacaagcaccaggacatcaacctgtacatcaactcgccgggcgggcatgtcacggcgggcctcgcgatctacgacacgatgcagttcgtccagtgcgacgtcgcgacctactgcatcgggcaggcggcgtccatgggcgccgtcctcctggccgccggggcgaaggggaagcggtttgcgctgccgaactcccgtatcatgatccaccagccctggggcggagcccggggcaccgcggccgacatcgagatccaggccgaggagatcctgaaactcaagaagacgctgaactcgatcctctcccggcacaccggccgccccgaggccgacatcgagaaggacaccgaccgggaccgcttcatggcgtcccgcgaggcgaaggagtacggcctcgtcgacgaggtcgtcgagaccctgaaggtgccgggagcgaagaagcaagcaaagtaaaaaaaagagagagaaaaa

SEQ ID NO: 127264 - DNA, 282 bp, Glycine max
  Clone ID: PAT_MRT3847_85925C.1
gaagagctctttactcaaccgtatgaaaaggttaattggaagaaagcacgttacccatgggcaaagggagaacggtattaatcctattttttggttccagaacctgttttggaatagttattccatattaatggacccattattaattggggggcttttaaccagcttattaaaaaaaaaggcctttaaggtaccatggaacctattctttaacaaaaataaaattggccattccttacccatgggtggggggaaaaaggtttattttttcttgcttggtgg

SEQ ID NO: 127265 - DNA, 275 bp, Glycine max
  Clone ID: PAT_MRT3847_85926C.1
aaaaggtcaagaaaaaacggaacaacaatggcggtaaatccaaccaagttaacgaatggggcttcaccgtttcgctgatgaaaagaagtgttgcattgcaaaaagggctacccattcttggtgtattcaggacttttgcagcagttggtgttgatcctgccatcataggtgttggccctgctgctgcaattcctgttgccgttaaggctgcacgtctaaatcttgatgatactgatcgttttgaaataaatgacgcatttgcctcccaattcgtg

SEQ ID NO: 127266 - DNA, 448 bp, Glycine max
  Clone ID: PAT_MRT3847_85927C.1
tcatatcttctcttcttgtccaccaattaagtaaaagaaaaaacacaaaattgagaaaaaaccaaactagcgcgcagaatgagaagcattcctattcctccaacaaccacaaccaatacattagcaccaacaagttctacagtggtggtggtgacaacaatgacaacgatgacgaacaaaacctctgttccttctgcatggcactctccagtgccctacctcttcggaggcctcgctgccattatggctctcatagccttggcactgttgatgctcgcttgctcctattggaggctcacacaagagagtaataacaataacaacaacaacgtggtgaaagagggtgatgatgattctgaaaagaaggaacagcctaaggtgtacgaggagaagatcctagtcatcatggccggggatcacaacccaaccttcttggccaccccttcat

SEQ ID NO: 127267 - DNA, 429 bp, Glycine max
  Clone ID: PAT_MRT3847_85928C.1
gcaccaggtcattataagtagtatctaggccacttatgtaggtgtttggcccggctcttttttcctttttcttctccttaaaaggagaaattgagccaaacacatttagagaaaaactcttaatatttgaggaccatttaataaatgaaaagggagaaaattaacatttaaaaaaaccctaactaaagtagctttttaaaattagccgcatatcttcgcctcctccttttcttccttaactagttgaaacaaatcttttacttaaaaggagtttttaagctaagactaccaaacaacttctactttaattttaaggtttttattttagctttaactttaatgtagcttttaagcaacaaataagctgggtcaaacatagccttagctatgatatcttaataatagaatctctcttctattcagatattg

SEQ ID NO: 127268 - DNA, 1371 bp, Glycine max
  Clone ID: PAT_MRT3847_85929C.1
tgaggttcgaagatggaataagcaggataactggggtagaaagacattgaaagaggccagtgaatccactgtgcctaagattgttggtgagggaatctatggggttggtccagttttggctgcattgtcagctgatcgaagggaattctatgcattgtatgttcaagaaggattggatttgagtggcaacaataggaagaagaaggacaagaaagggtttgagagagttctgaagattgctgaaaagcttggtttgagtgtaaaagaagcatcaaaacatgatctgaatatggtggctgataaccgtccccatcagggtttggttttagacgcttcacagctagagatggtgaaagtaaatgaactggatcctgtttctattgatgaagggaagggttccctttgggtagccttggatgaggttactgatcctcagaatttgggggcaataattaggtctgcatatttttttggagcttctggggtggtgttatgtgccaagaattcagccccattgagtggtgttgtgagcaaagcaagtgcgggatcacttgaattaatggaacttagatattgcaagaatatgatgcaattcttagtgtcttcagctgaaaatggttggcgagttcttgggggctctgtctcctccaaagctattgctttggatgaggttgtgcctggtccaccgaccattcttgttttaggtagcgagggcactggtttaagaccattggtggagagatcatgtactcagttagttaggattcctgggaacattcattttgactcaagtactagtgaattggatggtgaaagtagtggtttaaattcccagagctctggtaaagagttcctctcatttttggccgtggaaagcctaaatgttagtgttgcagcaggtgtgcttattcaccacttaattgggaaaaagttggtagattcatttccagaggagcataaacagattgacatgtctgagtgagactgcatcgcctcaatttatttagtctgatctcaaatagtgtttgttgatggagcacagtttttattcctttgaagtgtagtttgttcttctttatcaatttatcatgtaatcagtttactatcatatgttagtaagttggtctgtgcaactcaggagtcagttcacagttgtgacagcaatttcaaatgaaagagaattgatctctttaaattacaagtcaaggcttcttttggttatcacattgaagttgcattagtttatggatttatatttttaactggaattgtattgttttaagtttcagatgtgatttttttgttataacttggctttttgaaaattgaaagccagaattgcttttaattgttatttagtttaatgcggtt

SEQ ID NO: 127269 - DNA, 961 bp, Glycine max
  unsure (1)..(961): unsure at all n locations
  Clone ID: PAT_MRT3847_8592C.1
tgaatttacgattgcttttctttcttcataacttgctttgccaagctttcctctacccacgcgtccggcgcaatggcggtttcgtcaacaactcagtttcgatttaatgatagaagcttctccatttgttaatgtcccgtgtcatccatggaaattgatctggagctacctatatgtgagcatgagatgcttaagagtggatctagtggaaatgatgttacagatacagcatgtgatatataccttgaggagcaaagcatcaatccttcgtcaatgactgaacactctaagaaagttttaagtgaaaatgctttctgttgccaggatcaggtagatttgaattccaatcaagtggatgctattgataaatttccctttaaagaaccacagaatggattggaatttgaatcaaaggaggctgcctattcgttctacagagaatatgctcgttcagtgggatttggcatcacaataaaagccagccgacgctcaaaaaagtctggtaaatttattgatattaaaattgcttgttccagatttggaagtaagcgtgagtctggtacagtggttaatccacgaccatgtaaaaagacaggctgtaaggctggtatccatattaagaagaagcaagatggtaactggatcatatacaattttgtaaaagagcacaatcatgggatctgtcctgatgattttttcaggggtagcaaacaaacaagtattgtagcttctcagaagaagggtatgcaattggctctagaggagggagatgtgcagtcaatgattgaatactttgtctctatgcagtgtaaaaatcccaactttttctatgcnatagacttggatcagaatagacacttgagaactgtattttgggttgactcaaaaggaagacttgattatcaaaacttccatgatattgtgttgattgcacttttacctgagaacaaatatanatcct

SEQ ID NO: 127270 - DNA, 749 bp, Glycine max
  unsure (1)..(749): unsure at all n locations
  Clone ID: PAT_MRT3847_85930C.1
gtacgcagcgagaagacgacataacactgacgacgaagaaacgaatcaggttgatcaaatacgctagtaggagtggcacaatgtgttgagtgtggagcaagaacgttttttatcatttctttaatgtgtgtcttctgcgttctgtgttaagctgaattaggagagaaggaatgtgttgaatgtgggcttagaacgtttttattttatcaatggcagaatgtgtggcttctgcattctgtgttaaactgaatacgcagagaaggcctgttagagagaggggcttctcgggtcagattacaaatctcaagacttttcaaagaaagtattccagaagtggatgtaaatttgttcacttttctacatggaagacatttgatctgagtgtatttgggaccacacatttgaaattcactcctcgtcttcaggaacttccattaaagtgcattggtttaggggctttggttgactttaatggtgcaaaagcctctgatttggttccagttgttggccagatgcttttgatgggcagtatatttctcacttatatggctggagtaattcctgttgagaaatcttatgctagttatcanaagactatttctgataaaaatgtgtttcctgaaagctcagacatttctggtagttcagcgaagcaaatttctggttttgagtcaaagtatgtattgaatgtggtgagaagaaaactttttaaattctctaaatgctttagctaacaaggattattctgg

SEQ ID NO: 127271 - DNA, 462 bp, Glycine max
  Clone ID: PAT_MRT3847_85931C.1
tacggctgcgactgaaaaccgtaacactgacgacgaagaaacgaatcaggttgatcaaatacgcgagtaggagtggcacaatgtgttgagtgtggagcaagaacgtttttatcaatggcggaatgtgtggcttctgcattctgtgttaagctgaatgcgcagagaaggcctgttagagagaggggcttctcgggccagattacaagtctcaagtctgttcaaagaaagtattccagaaatggatgtaaatttgttcacttttctatgtggaagacatttgagctgagtgtatttggggccacacacttgaaattcactcctcatcttcaggaatttccattaaagtgcattggtttaggggctttggttgactttaatggtgcagcagcctctgatttggttccagttgttgaccagatgcttttgttgggcagtatatttctcacttatatggctggagta

SEQ ID NO: 127272 - DNA, 440 bp, Glycine max
  unsure (1)..(440): unsure at all n locations
  Clone ID: PAT_MRT3847_85932C.1
cggaattgcagtttcgacctacacgtacgcgtacgcatgcgtgcacgcatacgaccggttgcgataagacaacatanggggcttctgagtcgcgtttgacttctctgcatgtttggatcgggttcacagacgaacaaggcatcatcgatctgttcgatgatgagagcctatggtgaagatgaagcctatgaggaggatgatgaggaagcgccgattgatgagacagatatccaagtagtgcgttaaacctaggtcgcctctgacgctattacaattgcttatgttgacgaatgggacacccagttgttaatggcactggtttctcctttatgatgtttgatacattttgatggattcaagtagtctatgatcgtctgatgctattagctcataacaatgatggtactgcttatgctaatcaacatgatctgctatttgga

SEQ ID NO: 127273 - DNA, 614 bp, Glycine max
  Clone ID: PAT_MRT3847_85933C.1
acttacatcctccacaactacagtatagctatgttcagacatttgtcacctgacattctttcatttacattagaatatgttaagaatgatgcatctgaatttggaatcccaaatttactcccatcccacaacaaaactcaacatgcttgtcataaatgtcatacagggtcctaatcaactgacgcaatagatcctctgcaccaacatcattcgacatttgaacatgtttagccactttcttaggagtaacatgtgaatcctcatgtgatacaactttgacaagatttgtcagccatgcaatgaatgtgtcaagggcctacctgacatattgaattttttacataaaaaacgagactttagcgtcatcatcataaattttctgaacactgacccttaccacatcatctgcataagccatgttgtgtatggtagactccccatcatatatgtttcctaaggcctccaagcacgtataattatcaccttgcatatacaaccccatagtcagtatcacattagcatcatgttcttcccctaatgcattgtcagcatttttagcattgctaccctttatgctgatacgtgcacttaatacctgcatatccacatcaatc

SEQ ID NO: 127274 - DNA, 214 bp, Glycine max
  Clone ID: PAT_MRT3847_85934C.1
caaacaacgaccgactatgcaaaatagccattagtataagtgcaagtttatgaactgtgagatccataaaagatagaacatgaaaaatatggcctacaaaaaaccttctagtaagcactttaactttagtcatgatgctaataaaaagagctccaacatcaacatttgtaattgcaagtgtatataaatgattacactaagtacttggcaaaaa

SEQ ID NO: 127275 - DNA, 308 bp, Glycine max
  Clone ID: PAT_MRT3847_85935C.1
gataaatgaaaatgatcactgcttaacaatcatctgttctgtaactttttttcaatataattttagaattgggtttgaagtctggagttgaatctgttgttctggagtacatccacaacttggttgacatcttgaaagatacgacctttgagaaaggtaacgcaggccttgttaagaattatttggaagcacgtgggacatttaacactctcaaaggtatcatagctctgcaatcttataatcgtggccagttggttcgactaacagctatttctgcattacaatgtgttaagtcaatagttgaattt

SEQ ID NO: 127276 - DNA, 268 bp, Glycine max
  Clone ID: PAT_MRT3847_85936C.1
tacggctgcgagaagacgacagaagggttcccttggtgtaacattgagttgcctattatcaatagttggcatcgtatgtaaagagatgtatgacgcgatgtaaatcaattgtcatctaatgacttgagcctatggtgctgtgagatagaaatttaagatggtagattggaatgagaattgagtctattgattttattattgttgtacgtgtaaatggtttaagttagcaaatatatcactgactaaagtcaacgtaatagtgcaaaat

SEQ ID NO: 127277 - DNA, 246 bp, Glycine max
  Clone ID: PAT_MRT3847_85937C.1
cacaataatcaatcctttcactaagtatgctgtactaatcaccccaatagctaatgctattgaggaaaaatggcttctctgcaaaagaaagcctattgccattttggttagaacaaccattttggtcagcaccgtgcttatggcactattcatgccgttgctcggttatgttatggcatttattggtgcattttttagcgtgacaatctcattgttgttcccttgcatctgttacttgaagatgaa

SEQ ID NO: 127278 - DNA, 329 bp, Glycine max
  unsure (1)..(329): unsure at all n locations
  Clone ID: PAT_MRT3847_85938C.1
cnntagagcgtagtaagntcggattcggctcgagatcgaaatcngcananngagtanggtttntggagatncaatnnccnancnncgacaatangnactcaggacnacnggggnngtgcnnnnnaatnttcaanncntttnnaaggaaggcntaggaancatncttnacaaggancntgaactggttgccttnttgcngganncaanttttccttcttnaggaagtggnatccagganaagtgttggttgcaaganggtccataggcaaggggttnanctgncccaagaggcctttggnaattcttngggagncgggncnnannncaac

SEQ ID NO: 127279 - DNA, 861 bp, Glycine max
  Clone ID: PAT_MRT3847_85939C.1
gctcgatgatgctcgtctcgtgctaacgcgcgcagcggtacagcagggccagctgccggctcggatactacttggaccataacgtcgctcttgggttgatatggcggtggagcttctccattctcgtccaatccctcctctcgtcgaacatgtgtgggctggtgtcgtccgactcttccatgcatgaatcgccgtgccccagcccacccctcgagatctctcgccagagcgtgttgaccgatcaaccggcgctgctgcttctgtcgcttctttcgcacgtggagccaccgcagcagcaccgcagctaggatagcaaacactgctaggaagaggaagtagtaattgaagacgttactatcgtggtgggcagggtcggtcgtgctggttggagtggggtagatctgcagaggagcggcttcggtaggagtgctcgtggcggttgatacagtgctgtggatgacgatcaatgttcttgggtccgtggatactgggattgatataggcataatagctgtagttgtgagcggtgccgtggctgagtgacggctgagatttcgatcgcatcttgcgctcccgacaagggcacgagggtcaccagggctagcaatgataccagtgacacggctccattggtgctgagtccgagaaaatgttcacttcgtatcagcatcatcgtcagagagtaattgctctggacggcaggtggtaaggtgcctcgcgaccgggaaagaaagagcagacggggacacggcagtcacaagtctgggggattgtctcaatccatagtgagaacacgtggaagctgatgcaatgccacagctcggggccgggctgctacatagctatagctggtctcgagcc

SEQ ID NO: 127280 - DNA, 628 bp, Glycine max
  Clone ID: PAT_MRT3847_8593C.1
ctctgatcttggagcgtagaatcgtgaatggtgacaaaggcaaacgcaagaatggagtcacgcatggaagctatggagaaagtggtagaggagaatcacaaagtagtggaatcgcagttgagttcgatcgaagggatgatccacaggttggggtggcatgggagaaaaaatctcctgcgacgaacgtgcacgtagttgatgcgagcgaaggagatgaaggtacagtggcacatgatggctatcggtggaggaatttggaattgcccatatttgacagtgaggattctatgggctggttgacaaagatcgagcgatacttctggttacgcgctgtaagggaagaggacaagctggaggttgttatggtcacgatggatgaggaagctttgggttggttccaatggtgggaatcttggaatccaaatcattcttgcgatagaaggacaatgcagggattcataggccattttgagaagtgtgttggaatggtgaaagggttggaggagccatttctggtggaagtgttcctcaaggggttaaaggaagagattagcactgaggttaggcttcagaaccaaagaacttgatggaagccatggttaaggcttgaagagtggaggataagaac

SEQ ID NO: 127281 - DNA, 399 bp, Glycine max
  Clone ID: PAT_MRT3847_85940C.1
agggaatataagactctcatacggtgtgacatgatacggggggacaagataggagcccaatactataaataaaaactgacacaacacccttttagatatgaaaaacttcaaagctttcaattacaaaacttaagcctacattacacaattatgcacacctaaattttgcaccgttatttttacaataaaaggtaacgtggaaggaaaagaaaaccccattccaaagaccacaaactttcattagatagaaatcccgacgggaattcctcttgaaagtaaagccctcccccactggtagaaaaaaacacaattagggtatatgcacacgtccattacagttctaaggctttaatttatgagcctccctcaaaaaatagcccaaatttgattcaacttgat

SEQ ID NO: 127282 - DNA, 272 bp, Glycine max
  Clone ID: PAT_MRT3847_85941C.1
acgagaaggggaatacttcggcgcccgcttacctataagacaaacgcgacctctcacctaaagacccgacaaaatacggtcacttccgttccctatcttacggggtgaacgactagatcgattgggagctcattaccatcgaccccaagagtaacgctcgtaactccccgacagtaatgagtaccgtcgtcagaggctcacacgcgaaggagtcccactcggccgcgaatcccgacgctttgaattatcacgaagatcacgcctactgcgcc

SEQ ID NO: 127283 - DNA, 605 bp, Glycine max
  Clone ID: PAT_MRT3847_85942C.1
ttttttttttttttttttttttttttttttttttttttttttttttttttttttttttttttttttttttttttttttttttttttgggaacaaaccaaaaagggcccaaaaaaagggggcccccaaaagggggaacccaaaaaaaaaaacccgggggggggaaaaaacaagggggttccccagggaaagaaggcccccgaaaacttggttaaaaaacacaggcttaaaataggggggggggcccccaaaaaggaaagggttcaaaaacgggggttgggggggaaagaacccccccgggaaaacaattccccccaaaaaaaccagggaaaaaaaatttcccggggagaaaaaaaacccagggggaggtcccatctttcccacaagcaaggttttggggtttaacaattaagggcccccccccccccccccgggagggaaaattggggccaggggaaccataaaggggggggaaattctcaaagccagggccctttgggggcccccggaacccccaacccgggggcaaaaggaaggggcaaacaaaaaggctaggacttccccatttaggcaacattggggaaaccaacccacggggggggccccc

SEQ ID NO: 127284 - DNA, 1286 bp, Glycine max
  Clone ID: PAT_MRT3847_85943C.1
ctgctcttcacaaaaaccttttctccaaaaccatccaacaagggaaacagaatattattccatttttatagattcactatcaattatggcatcctcaactcaattctccaccactcttgttacactatgtctcttccaattcctagcaggttcgtattcaacgacattcacgattgtgaacaagtgcagctacacagtttggcccggcagttgaggggaaactgcaccgccacggggtgcgtggtggatttaaacacgccgtgcccggcggagctgatggtgatgagcagcggagagggcgtggcgtgcaaaagcgcgtgcgaagctttcgacgatccacagtactgctgtagtggcgcttacgcgacgcctgacacatgcaaacccagttcatactcgcagttctttaagagcgcgtgcccacgcgcttatagttacgcttatgacgatggctccagcaccttcacttgcgccacagcggattataccatcactttctgcccacagccatccactagttcgattaaatcgggaaatgggaaatacccaatggcggtggacaattcgggtggtaatgtggacgtaagaaaaaacaatgttatggcggtgattgcttatgttttggtggcatttgtggcaactcaattaggtggcccttcactgccaaagttgcattaaaatggctgggctatgactttctattaattaatacacagtgcatgatggcaatggccagtctctatcggttgggcgatcaacttgcatcagattcttacttgtgtgtgaagagatgcaatgggaaccggtgcaaagattgtcacttctcaacttgtaaaactaaaacattaatttgccatgtcttcatatggagcacttatttagagtaggaaggttcagatgcacagacagaattaggcagctgccttttacatcagctcacgagtctcataccattcatgtgttgtcctctgtcttcagagaaaaaacaaataacaggaggacattttgggaagaatttgtgacattttatgaaaataaatatcattaccattaatttgctccaattgtaaatatgaacatcaaatttattgaggttaacaaagtagtactcaaattttcatttgctggagcagttattttctcgcctaatggcaccagatagatgtatgtgcgtttgacctacttttatatattcatatatatcataaattttgcttgcaatttctcttcaacagagtaccatgtatgtcaaaaaaaaaaaaaaaggacggccggccgccagtagg

SEQ ID NO: 127285 - DNA, 969 bp, Glycine max
  Clone ID: PAT_MRT3847_85944C.1
tttctttgacgcgtgcacttttctccaaaaccatccaacaagggaaacagaatattattccattttttcacttccacactttcttgcattcattccccattttcaactatggcctcttcagctcaattttccaccactttggtcgtactatgtctcttccaattcctagcaggttcatattcaacgacattcacaattgtgaacaagtgcagctacacagtttggcccggcattttaaccggcgccggaacctcaccgctctccaccaccggcttcgtcttacaacccggcgagtccaacgtgatcaccgtgccggccgcctggtccggccgcctctgggggcggaccgtctgcacccaagacgccaccggaaaattctcctgcgtcacaggcgactgcggctcctccgccgtggaatgcaacggcgcaggagccgccccgccggccacgctcgccgagttcacactgaacggcgccggcgggcttgatttcttcgacgtgagcctcgtcgacggttacaatctccccatgatcgtggagccacagggcggaagcggcgccggaaactgcagcgccacggggtgcgtggtggacttaaacacgccgtgcccgacggagctcaaggtgatgagcagcggagatggcgtggcgtgcaaaagcgcgtgtgaagcattcgatgatccacaatactgctgtagtggcgcttacgcgacgcctgacacatgcaaacccagttcatactcgcagttctttaagagcgcgtgcccacgcgcttatagttacgcttatgacgatggctccagcaccttcacttgcgccacagcggattataccatcactttctgcccacaaccatccactagttcgattaaatcgggaaatgggaaatacccaatggcggtggacacttcgggtgctaatgtggacgtaagaaaaaacaatgttatggcggtgattgcttaatgtttg

SEQ ID NO: 127286 - DNA, 443 bp, Glycine max
  Clone ID: PAT_MRT3847_85945C.1
atgattttgcgttgctaataagtgtccttaggatattagtttaagaattaaaaaaaaaaaaaatttattttgtgaatcataagaaaatgaaaaaaaaaatcatgagaaacataattttgtgcctccaaataaagatatttctactttaaatttcttaagaaatatacttaaggtattggttagtattttccttatctatatatgccatcatgccagccatgtgacttgttgacattggtatagtttggtgtataatggcacctatgaaattaggcttcaagcaggcggctatgtttaactaaccctgcccatgaattcattttgatgaccactctctcgaggaaacttgtcttcaaaaggatatagaatatactagggaggggacaacatactaaaagtttagatctcttaaatgctatttaccttggtgcaactccttattt

SEQ ID NO: 127287 - DNA, 654 bp, Glycine max
  Clone ID: PAT_MRT3847_85946C.1
cggtattaacccccgggtcgacgatctcactatttctgaggccgccctttttttttgttttggaaaaagaaaaaagtaagcaaaatttatgatatatatgaatatataaaagtaggtcaaacgcacatacatctatctggtgccattagggcgagaaaataactgctccagcaaatgaaaatttgattactactttgttaacctcaataaattgggtgtgcatatttacaattggagcaaattaatggtaatgatatttattttcataaaatgtcacaaattcttcccaaaatgtcctcctgttatttgttttttctctgaagacagaggacaacacatgaatggtatgagactcgtgagctgatgtaaaaggcagctgcctaattctgtctgtgcatctgaaccttcctactctaaataagtgctccatatgaagacatggcaaattaatgttttagttttacaagttgagaagtgacaatctttgcaccggttcccattgcatctcttcacacacaagtaagaatctgatgcaagttgatcgcccaaccgatagatactggccattgccatcatgcactgtgtgttaattaatagaaagtcatagcccatccattttaatgcacctttggcagtgaagggcccccctaattg

SEQ ID NO: 127288 - DNA, 647 bp, Glycine max
  unsure (1)..(647): unsure at all n locations
  Clone ID: PAT_MRT3847_85947C.1
cactcacacaaagtgctggagcaaacaccaacactaatataacaccaccaagaagaagaagaagaagaagaaacatacccttttgctctgtgaagctaaagttgctatcttttctcaaatggggacccgaatcccttcgcaccagctcagcagcggcctctacgtgtcgggtcgacccgaacaagtgaaggagcgtccgccgacaatgacgtcacgttcagttccgtacaccggcggggacccaaagaaatccggcgagctcgggaaaatgctggaaatccccggcgtcgagccgaaaccgtcgcggccgtcgtccgggtcggtgagatccgggccgaactcgggcccggcgggaggcagactgagtgggtcagggcccatgtcgcgaaagtcgtccggctctggcccgatagcgctgcagcccacgggcctaataacgtctggcccggtcgggagccggcggtcgggtcagttggagcaacccactgcggcggcgccgacggcggggggaaagatggtgtatggttcgggggtgacgagttttagcgaggaggtgaaggtggggtttaggggttngagggctgnggggggggtttttatggggggggtgggaatgaggccttttggggggggtgtgggttatgggt

SEQ ID NO: 127289 - DNA, 391 bp, Glycine max
  Clone ID: PAT_MRT3847_85948C.1
tttttgttatgttttttttttttttttttggccagggaaaccgggctcaattgaggtgagccaggatagaatataatggggctgtaccatacataagcaaccaaataacatagaatgatctctgcttcgccaaaagaaggaccacccaaatgcctcactttaggggggggaatccaactgctcctgaagacagattaaaccacgatcactcgtggcaaaatatgaggcccaagatcagaaggaaaattggaaacaagaaatcggggtgtcatttcaaagggggtgaatgcaataacagcagctggcgttgtccttataaataggtggacagcctaagaaaagcccgatacaccctcttggggaaaaaccttgctaatacaatcaatcacac

SEQ ID NO: 127290 - DNA, 478 bp, Glycine max
  Clone ID: PAT_MRT3847_85949C.1
taattagattttcgccgtattccttttaaaaaaaaaggaacagcttatactttaagctgcaatgaaaccacacgtattccgccaaaatccgagactatttttaactttctggtaccaccaagcttgcacaagatcattacctgcaatgaaactacaggtgttctcgaaaaaaattgcccacaggcttggacataaagaaactaaccgttccaaccctggagtagaaactccgggccttgccccacaaaatagacttgtacttccgtcttagccccattgtagagtaacaaagtcttactattcttttacagtccggagccaagttgaaaacacctcccgtttgcgctgccctagggcctttctttacataggggcctcctacccccaccataggcggtgacctggtgtaactacgtcctctaggagacaaactacggcgtctaggggaccgcccacaaggactgggcccataaatggg

SEQ ID NO: 127291 - DNA, 378 bp, Glycine max
  Clone ID: PAT_MRT3847_8594C.1
gagatacaagcataatttattttaaaataagtaatatgtatatattataataatttcttacattttaaaaaatgaatttattgtaaaaatgaaagaaagaaaaagcaagtaaacttcgaatctttcatttcgaatagtccgcacgacacgccgacgtgggcaatactttcaaccttggcgcagcgtgcataaaaagatacttcagattgttaatatgtgaatacagtttttttcaaaaagaaaaacgtatgattatattttattttggtacattagaacattgtaacatatgaatatgtaaatatgaataaagagtaatttaaatcaatgggttaaatattttttttaagaagtttaaatatattttcggacgcgtgg

SEQ ID NO: 127292 - DNA, 260 bp, Glycine max
  Clone ID: PAT_MRT3847_85950C.1
agtgagaaggagtataatctggcaacatctttattgaaaagcagcgcatgtaactgatctgattctgtacacttggagtaacctttggtgaccaacggagcaaaacaagaatatttttttgcccaaaggtgattgttcctcttaaatggttgcttattaccgcatattggtgtcaagagaaggagcattttcctcacctttcagaataatgacaatgtataaggaaagttaagtaagctagctgcaattttaattgcaaa

SEQ ID NO: 127293 - DNA, 335 bp, Glycine max
  Clone ID: PAT_MRT3847_85951C.1
gtttgattatgtctttgtaggtgttatcttcatctatgagaggtcgcaaacatacaatagttactgcagagaccatcaaggtagaacatttaagtgcttcaaagtacttgtgtgcaaatatgcttaaatccaattttgtgttgattgcttagttgcgtaagatttataggcttggcttaagttttggattttccaattaaaccatgttagaagccattattaggggttgtgttgtaaaaccaggtccttggccagtccacttaaacacgctgactcattttcagtcaaactcttaacccagtagatggattaacactagattttttcaaaatcca

SEQ ID NO: 127294 - DNA, 465 bp, Glycine max
  Clone ID: PAT_MRT3847_85952C.1
aataggacataatttgctattaagatttataattatgcacactgaaaagtaatctgactacatgtacataaaccaccgtcggacttgagacccacactattactgtcacttactcatacgtacggacgaaaatggccagtgccagggacaaaagtaaaaggggatggacagctgcgactgaatcagcgtcagcaatgtgcctaactacgggtggaaataatcccagatctacattcgcctctgaaaggtacttatacctgacctcgagacagaccaggtaacttctggcgactacgagatgcgtgagacgatcacccttacagtgcatctgtcgtattgtaaaacatagtctgtcaagagtctgagaaccacttgtgagactaaaataacgggctacccttgcgaagtgctctacggtgattagtgtactctcttagcttagggcattccagagtcagcgacact

SEQ ID NO: 127295 - DNA, 367 bp, Glycine max
  Clone ID: PAT_MRT3847_85953C.1
ttcgtaagttggaaattcggttggagcggggcacgtgactggtcgttcggagcaccgttactctttaagcactcgccttcttcctttctctctcaacccaatttcccaaggtcggcacagcactcttcaacaatccatcgccttcttcatttcatcaccgcgcgcgcaattgcaattacatttccacccctcaaatttccctttcagaagaaaccatcatcgcaccactgatccgtgcacctgacgtgcccgatggctactcctcctactcctcctgctgctgctgctacctccgagcgggtggacttggccaggctctgcgcctgcaaggactggtccaaagccattcgagtcctcgattccctca

SEQ ID NO: 127296 - DNA, 719 bp, Glycine max
  unsure (1)..(719): unsure at all n locations
  Clone ID: PAT_MRT3847_85954C.1
tttccagatctacgttttctctcacccacattctaacccacattgttccgattagcatcgaagattgaagaggcaatctttccaaagggtgcataaagtctagattggatgatttctctattctgtataatgttggaatatagaggaagtttattaaagcgcctaacattattgaagcctgttggtatcagcctcttcccaactgggttaagtgcaatgttgatggagttgcgaaagcccagggcatgcggctcttggtggtatcttcagaggcgcaaatgccactacaatgggtagtttttccatttacattggtattcacaatgtttttttgttggacaaggatttggctggagagttactctagattagtggtggatgccatactaatccaagtgtcaattccttggaagttacaaaataggtgatctaactgtagcttgggtaaataccatggattttacaatttctcatatatttttagggaaggcaataggtgtgctgatagctttagcttagctaaccatccagtttattcccattcctcttgttggtgggacacaatcccgatttgtgttgggatttttttgtcctaacagaaatgggcttcctcctgattactggttgattcactgatagcatgngttttagtttggtcctccatgttcttgttctttctttttgttttgttattaatatatcttttgtttgggaagtct

SEQ ID NO: 127297 - DNA, 242 bp, Glycine max
  Clone ID: PAT_MRT3847_85955C.1
tcctctaaagtctggccgccctttgtttttgttttctaaaatgaaattatatttcaaccctatgatcggccaaatataaaacaaaccacccgcgcaaactcccggaggttggacttgtcacatgtatctccattattaaccgtagggactcggcgaaaactattttaaccgcctttttttcaggggggggggcataataaactattccgaaggataataagaactgactttgggggggggct

SEQ ID NO: 127298 - DNA, 309 bp, Glycine max
  unsure (1)..(309): unsure at all n locations
  Clone ID: PAT_MRT3847_85956C.1
gactctagatagacacatcattttgctcccccgctaaaatanattgaccccaccacctccatcacctctctagacgggcttcttgtgaagccatatggaagaattccagcacgcctccttgaacaancacggtcaccccactcctgagaacagtgactctgcctgcagcctggcacttgcccgacacctatctgactcatagactcttcccctccgaccccatctggcctcaattttctctgatctcctcagaagcacaaaacatagcccaaactaaacgcagaaatccatagtctggcgcctctcggg

SEQ ID NO: 127299 - DNA, 532 bp, Glycine max
  Clone ID: PAT_MRT3847_85957C.1
ctgggacagaggcaaatcgcaggttcgtgcgtgaatctaatcaaagtttctcattaacttctgcgttagattcacgcacaaacttgtcatttcccttttcttaaccttttttttttccttttccgtcaaaactttgtttgttacattcgacttcgaattcagattcagatttctctgtttagtgctcctcaaaccgatgacgccgcggcttgttagcttctggctccgctacggtatggcatcttccatattgcacccattttgttcttttttttttctttctttcttttccctaaattttccatgtcaatattatgtaattctgtaaggagatttttttaaatgtaaagccatgcctccatagctattttttttattggaggtaattcgttcgaactggactattatgagtgacaaacaaaactttttctctaaatatgcaatgcaattctactccaatatgaaatctttcgaccattggcaacaaattaccatcgcacttgatggcattcgatacgtgtggcacatctat

SEQ ID NO: 127300 - DNA, 260 bp, Glycine max
  Clone ID: PAT_MRT3847_85958C.1
ctggtgaagatgctatgcagaaaagcattgatgggtatcttgtgaagccaaaagttagacatattcaaggtaatgggatcagaggtgagggccacattcgtcatttaaacaagtcaacaaactctgaagtcaactccctggcaaaaaccaacactggcatgcctgctttgaaacgctctgcgtttggtaggtccactacagttactgcattcaccaagagccaaacttctgaggcatcgttacccgttgatcaggtgtca

SEQ ID NO: 127301 - DNA, 573 bp, Glycine max
  unsure (1)..(573): unsure at all n locations
  Clone ID: PAT_MRT3847_85959C.1
gcaaaatcacaccctttctcttacatgaataaaaatatcccaacacacaacacaaaccactttgccaacaaactctaactcgagtctccccttatgttcttttctccttttcaacgcccttcactagaggagccactttgccttgtggcaacaatttgaacaactttgtgtgtgtgtgaaatttgggggatctaggaaaaaaaaaagttcaaattttatgtggcttattctcaagccatgttctttgctggcagcaagagattcgttcacatctctctagtggtgcttttgggtgtcacaatattgcaaacgtgggtgagttggcactcatgtcaagttggggccattcgtgtattaccatctagtgcaatggccaaagtgaaattcaaccatggcgttgaggatgagaaggtcaaggaagatctattgcataagcacttcaatagaagaacttttggcctcaacaatgggacccaaaagggatttgatgaaagcaagagaagagtgcccagttgcccggatcctcttcacaattaacaagtagaattcccacttccaattntttcttcttta

SEQ ID NO: 127302 - DNA, 518 bp, Glycine max
  Clone ID: PAT_MRT3847_8595C.1
ttccgggttcgaccccacgccccacgcgtctcggtgtttgggacaaaactagtgcaactctgcactgcagaaagttagcagatagtgattttctcaagagaaactttaagcagatgcctaatgttttggggggggctactgaggacaaggcgagtttatggacacaacttcattatgtttcatgtaataatctggaaatgcaagaagcttatcttgacaatctcgtaaatgcgttacgagaattgtatttgcacagtccagaggaagctcgccactcgagaaggaaagctctgtcttgtattgaatggctgcaaaaagctgatgtgcctaccatagcacagatcgaagagttccactcgatgcagaggatgatgaatgctgctgattcaaatgatgatatcgatctacatgtgagcattgatttgttgtgttcacaaggagcaggtaatagctcttgcaaacaagattgcctctaatgataagcttgcgttggctaacacacaagaattatttgatgg

SEQ ID NO: 127303 - DNA, 1840 bp, Glycine max
  unsure (1)..(1840): unsure at all n locations
  Clone ID: PAT_MRT3847_85960C.1
agaaatatctccaagactccaaccgtgcttcaaatatcaagcacttttttgtagtactcactttcactttttttttccagtttttagttgagtagccggagttctccccttgcgccgccgcaccaatgtcgaccacaactgtatccggcggcgaccctccttctcgcggttttgatacgccgacgctggaccgggaggcggcggcgctgctccacgcgatctccgagcatggcgggtacgcgtacgtgagcatggcggtgctggcttccggcggcgacattcgcgcggcggaggcggctcgggagatggcgtgggagcagctgcactcgggtccgtggcactcggtgctgccggtgtggcgcgacgcctactccatggcgtgcctccacgtggcgcgccaccactacggcaacggtgagttctgggacgcgcttagggttttggatttgggaatcatcatgggaggcacgctcctccgcaaggatttggactccgccatcgagaaaatttcggaacaaacgaggaagaccgttagggtttctgatttggggaactccgagcaccgactcgtcgatcgcgaatttgatatggcagagcttttacatcaccgatgctccaacttttacctgtgaagtctctttcaaataagcttgtggcgaagaaatcggcactgtcgctggagaaattcctgaaggatcattacctgtctggctgcccggttattatcagtgattgtatggctcactggccagccaagatgaaatggaatgacgaagattacttactgagagttgccggtgaccgcacggttccggttgaggttgggaaaaactatttatgtactgagtggaagcaagagctaattacattttcagagtttcttcagcggataaagtccgatagctgttctcctggtggtcttacatatcttgctcagcatccattatttgatcagataaatgagcttcggaaagacatctttattcctgattattgttttactggtggagagcagctacgatctctcaatgcttggtttcgttcagttggaacattgacaccgttacaccatgatccacatcataacatactcgctaggattagtagaaagaaataacttaggctttaatcttcatatatgtctgaggattgttcgccccacattggtaccgcgactccacaagtttcagcccagggttgatttagactgatcatagatgaaaagccaagattccgaaggtgcaagatcttggaatttgtagaactgtaattttagaggaagggcgaaatgttatatatcccgccaaaatggtggcactatgtgcgctctttgactaccagtttttcagttagcttttggtggagtgagggtgaaagttcggatgcatcctaatgttatatcatctttcattctttcttatggagaactgagcgtgttctaagtagcattgctaatatctatgtgactggtcattttactacccagtgacagtataattcccctgcataaacatcatttttggcactcgttgtcactatatccccactcccgactattgttttactggtggaggggagctacgatctctcaatgcttggttnggtccancaggaacagtaacaccgttacaccatgatccacatcataacatactagctcaggttgttggaaagaaatacattatgctatactcttcgtctttatctgaggaacttttcccacactctggtaccatgctccacaacaaaaaaaaaagattattgagaaaatagatgaagaacattatattcaatggaagaagacccaaggcctgtagtcctccttatcaaaccacatgga

SEQ ID NO: 127304 - DNA, 478 bp, Glycine max
  Clone ID: PAT_MRT3847_85961C.1
aacaaaaccaaacggccttttttttttaaacattgcgggggagaagcagggattaagggccaaaaaaaaggaaaaaaaaaaataagaggggggggggaaattttaaaaacaaaacccacctttcctctttttttttctctaaaaaaaaaaaatttcttctttaaaaattttttcccgggggaaatcacccatcattcatgggctcactggccccaccccccccaaatcctttcaccaacaaaactaaagaaccttttcaccgacccttttttttaaaccacaaccccttaaaaatttttatggccactaaaattagggggaatctccaccaccggttccgactgggccgattcgggactcgggaaactcgctaactgggagcgcttaaactcgctcaaaggcccgggcccgggcgggggataactactagaaggagggccacaacaccctttgtggggggccctcttctttttttttc

SEQ ID NO: 127305 - DNA, 449 bp, Glycine max
  Clone ID: PAT_MRT3847_85962C.1
gcgtgagatatagagagaaggtgagagatacaaaacatactggtaccacagcattacgaggggtctggcttgaccttgtggctctcaccatctcgtcactaactggtgtggaggagactatacacccgctgtatccgcctgagagacaggcgatacctaaagatccactgcggagctttgaaatggagaccagcctggatatgttaactactgtacttgcaggggatgatgcagacactggattcttaatctttactactattgggagcgctaaccagaggtagcctactcggacctttattgacctactaataacgtggataatgtactctgagctatcagtagatgttttgcctactaacttgctaggaaacagaagaggggggggctactattgaggactcgcaagacacgcggatcttaagtctttaattgtatataatgctcta

SEQ ID NO: 127306 - DNA, 527 bp, Glycine max
  unsure (1)..(527): unsure at all n locations
  Clone ID: PAT_MRT3847_85963C.1
ggaaggacctaacttccctagctctttaaaaattggcgaaaaaaatggagttggaggtactcaaggctattacaaagcaatttaaagctggagggaagtttttatcttgggaataaatccatccatggaaaaccattattcatgacaaaaataaagcaaaacaacattaaaagcaaaacacaagcttctggtaagtagccaaaatgcatttaaactttgctggagcaggagatccccgaagacaaaagaaggggaaaaaaaaaaggaaagaggggtcaagctcttggccaaggagaaaagacccaaataaacgggggtatggcatgttggatatagtaactacttagagcttaagggacaagtcaagcttctgcacctcctcttgttgtttaaacttcaaatgagtagtatggcccccaaagcaggaacctccaaaccctttggccaccagccttggggaaaacttgcctaactttggaaccccttcagcccngggtgatgaccccatttctgcccccccccgaaag

SEQ ID NO: 127307 - DNA, 169 bp, Glycine max
  Clone ID: PAT_MRT3847_85964C.1
cctttgcgtgcgtttttcccacacgcaggtgcaccgcggcgagaggcatgtcaaagacggattgaccctatcacaagcaggaactctcaacagtcttggaccaatctcgtgctgcctatatccactctcttgtcaggtgggtgtccatatctgttcgctttcgtgcatg

SEQ ID NO: 127308 - DNA, 579 bp, Glycine max
  Clone ID: PAT_MRT3847_85965C.1
gatggactttcttttgaattagggcacagactcatagttggacacagagcccactgactttaaaggttaaatgatcacgttattcatcttttgaggattgaagaaactgaactgcaactttgggatatgtcctcgcttcattggttatgatagaaagacaccaggggtactggctccgtaactatgttccgtattaaggcttgagtgctctatctggctgagccatattatactacattgcggtcgcataaaggatgaaaaccaaaaggaagagttccttttcaaaatttaccattctgaacttgtttcactgctgaagtgaatagtgaatccgccctaatcattattttgcaaagactcctccgttagcacaaggacctcctagcttactggaactaactggcctagcagggctggatctagaacgaacgatggtgtttcgttccgtgtaacgctgctcgcgatgctagctgttatggctcatcctctgttttaccttttcgcgtttatgtcggagcatggactatatatataacatggtaagaagagaggactcttgggcggactcatgggttgacc

SEQ ID NO: 127309 - DNA, 581 bp, Glycine max
  Clone ID: PAT_MRT3847_85966C.1
gacctcttcatctaaagacaaagtgttgacttggattaaaaaagaacctattttctcaaagtcatatgtttttgtgttcctatagtctgctggggtcattggagcctcgtgccattttggtgaaagcttggaatcaactaccagatcacggtgcatgttgttgctggattctcttgaaatgaattcggctcgaggcacctgataattttttcataaagtaaggatatccctccatgctaaaattatcaggtgcatgctccaaaaacaaattaatgaaatagagggatatccttactttatgaaaaaagattggtttagctttgaagacctggatagattttatgagagacttgattcactgaattagatgtccccaaacttgaccagactagtgattagatctaacatactttattgtcaactgattatattgcataggataataagaggcaggcgaaaaatataaaaatagtgttagggatgtttcatattttgattctagtagagggtactctcttctatggatgtagttcaactctattggaattatattctgctctggaattgatgtttacaccact

SEQ ID NO: 127310 - DNA, 393 bp, Glycine max
  Clone ID: PAT_MRT3847_85967C.1
ctagttctagatcgcgagcggccgcccttttttttttttttttttttttttttttttttttggtgttttttttttttttttttgcccttcccctccaaccttgttttttttttttaacaatatatcccggaaattgggggaccctggaaatgggacctttccccctttggggagcctttttttaacaaccccctgactttttgttagccttttggcgcctagtccaatatttttgaaggcggcccctggtttacacattttaaaattctgcccttaagagtccggttttagaaattccccaaaaaaaaaaaaaagggggcggccccccatttaaagccccgccgccccgaatttttattgcggaccgggcccttggagagttcccgctttccc

SEQ ID NO: 127311 - DNA, 420 bp, Glycine max
  Clone ID: PAT_MRT3847_85968C.1
ataagggaactgctttctgcatttgctttaaaaattacagataaaactttttttgccacattactaatcagatcatacctatcacacaacaaaagggggacaaactttttcaagttaacaacattctattttctgtagtatcactttaaaatttgaatttataagggaaccgcattctgcatttgctttaagaattacagataaaactttttttgccacattactaatcagatcatacctatcacacacaataaaatggggggaggattacttgacaggtatgacagcatctaggtttttctgaagcacccaaccttttgggtaaactattttattagcagccaaatggagatgccaattcaatatttttgaacaaccaggaggggaaccttccattggactttcattttccaccaattg

SEQ ID NO: 127312 - DNA, 394 bp, Glycine max
  Clone ID: PAT_MRT3847_85969C.1
gctataacctgatttatcgccaggataatattaacttgtttcggcgctttttaaatacagtaggtttcttaacatgtccatgccatatctcatgctaccaaaccttccctctccgaatgaaaactcgctattgtgatccttcttcttttttaaaattctcaacttttaagtcttctttttaatcacacaacatcctatcctttaaaaccataccttaataatgcttataaccaacaaattactacattaatatctaacaatttacatcatactctaaaacagttaaccaacaatctttcctttattctattgaactcttaatccatcacaacgacttatttatattctgcatatattacaccctactctctaatatcccatactattaaaaaca

SEQ ID NO: 127313 - DNA, 270 bp, Glycine max
  unsure (1)..(270): unsure at all n locations
  Clone ID: PAT_MRT3847_8596C.1
gcaagacttgttgtgattggttataaacaaaaagaaggtgtagatttctttgatacatattctcttgtttataaagttactactattaccttgtgtttggatgaaggatttaaataagacaattcattttttaatgaatttgaaatactcctattataantcagttgtttggatacggaattttaaagaatttaaatttacatcaatttttaaaagaattttaatagagtaaaatagtaggaattgaaattccacctaattggtaagaat

SEQ ID NO: 127314 - DNA, 305 bp, Glycine max
  Clone ID: PAT_MRT3847_85970C.1
ggtgtatcatgcgcaccaagttaactccttagggcttgttggaggtgggaaacgaattgtacatgtagaatcatcgctgcatttaaaatccgtggtatgctgaattattggaatctaccgcataagcggtattggtacgacaaccattgcacaagacgtggataataaactctgctctgaatatgaagggtgcgtgtttttgtgtcacatagagcactgagactgaccacatggaatactgtcattaaagagagaccttttcttaacattattaggacaggaatattggcaaattgtcacacgta

SEQ ID NO: 127315 - DNA, 326 bp, Glycine max
  Clone ID: PAT_MRT3847_85971C.1
cacggcgtcgtgttttgtattctatgctaagttgacacaatacctggagaggggattgcaatacacgagggtgctctcacctctgcataattcacagcatgggatgaaccttttctgtgctcacattgccaaaaaaatatggatccctcggagggctagattatcattcggttgagtacctaggggaacagagataagatctctgatgaaaatctgcatgttgagagggatcaacgtggtgcatctcataggaaagataatcatttctattaacggaaactctccttccattatcacaggggctttatacgatttaattttagaat

SEQ ID NO: 127316 - DNA, 396 bp, Glycine max
  Clone ID: PAT_MRT3847_85972C.1
ggccaacaaagtacataagttcttagaaggtcgcttgacgcggactttctcattgtgtgcctattgggacctacatgtttaattctagcgaggtatgcgaacggggagggcaccgttctttactcttggaatctggcaacagaagtttatctccccactgtgaccaaaactctaggcgcagatgtgggctctcaaattgatgagcactaacgatagctgacattaatgcactaaaaactgccatgggggaacctcttttctggttcggaaacacactttacaatctccttttctgcctaaagaaactcgaatgtttcctagaacttgttcttatgagctttctttggagaaggttcgtcattaaactgcacaacattaacaccagacacgtttact

SEQ ID NO: 127317 - DNA, 349 bp, Glycine max
  Clone ID: PAT_MRT3847_85973C.1
cattattgaaccaccggtgggaacgagatggattacatagctggatctgactatccacagaggaaagggaaagggattgtcaattcacggatggaagtacgctcgctacaacgtcttacgcaaccatactcaagtctatgtgaagtacgctgccactatccatcacgatgctctgagctcatactgcatcgttcgctatgcaacgaattcggagactaaagattgactgaccataaatgaagattgggaatgactatgacaacaagatcgacgacgagacgacactcatggaaatcaagcttgtctgtcacatggaacatgataacataattaaaaataatgacataat

SEQ ID NO: 127318 - DNA, 451 bp, Glycine max
  Clone ID: PAT_MRT3847_85974C.1
cggggaggtaaaactttcccccctgggtatgcgagtctgtgactaattacttttgacttgaatggggcatatcaagtgagaacttctcttattgtgagaaatgataactcaaaagctgagccatatatgatacatgggtgatcaggattataagtcagccggcggtcacaatgtcacatgattactcaaaaagaggtgcggtgtgctcattaatgttgaccattaacatttgatttaacaggctatatttatagctctaattcctgacaataataagagttatcattggggacgctccatatatgtatatctatatatatacatcttcagccactggacgaacctgcatttactggaatgttctatgcgatagagactgcttttatggctcgcatattaaacgatgctgactagatcctgttatgtatagcgtgacagtgagcagtcttca

SEQ ID NO: 127319 - DNA, 557 bp, Glycine max
  Clone ID: PAT_MRT3847_85975C.1
ggcattttcatattctttaaacatattggaaactgctaaaatcccaaatgtacatgtggttaaaattactaaccaatttatttttgtgactaaaactcttgccaatttatttttctgtgtaaaactaccactccattaagcttactgctatacctatattcgtttacactctacttttaaaaaaaagtatctcctgagagcaatacctatttgtttatgcacataaataactactcgacatattcattaaaaaacataatcctttaagggagcaattgaccacactgcctatctgccagcgagtatagtcaatttaaataggaagaaaactatcaaccaagccttcatttaatagcactgaagtaaccaccatgcatacctgcgaaagcatcgccatcaccctatcgttgagaaactatgtttccttgataaaaggactaaataaagtgtgcttattgtaccatgcaacatgtatggtgagattttactggtgacctcaatactgaatgaataacatgatacctacagttcctagaaaacaaactattcatgtcatc

SEQ ID NO: 127320 - DNA, 263 bp, Glycine max
  Clone ID: PAT_MRT3847_85976C.1
cacaattttctttttcctttcttctccaccgctagccataagttatcgtcagattccatatttcaagtgtctttgtttttcattgaagatctccttaatcctctgtctcgccactcacaaatactcataagccatttgatgctttgttgaaggaaccattaagaacaaatggataatagcaagtcagctgcaatgaaaggcgtctggaggaacgagcttctgtcaactgatattttaataacaatattcatgagcctcaacat

SEQ ID NO: 127321 - DNA, 656 bp, Glycine max
  Clone ID: PAT_MRT3847_85977C.1
cactcctcaaactcgatttcgagcgccacggctgcatcgagccgcagctcctcaaacggatcgtcaaatacgccgtttcccacaacgtccgccagttaggaatctccgtcaagtgcgacatccgcgacgttccccagtgcgttttctcgtgccagactttgacctctctcaagctctccgtttgccctagaggttacatctacggcagcacgctgtttccgaaatcgctgaatctcacggccttaaccaccttgcatcttcagcacttcaccttctggtaaaggcgatgatgatgatgatgacatggctgaaccgttttatgcttgccgtaggttgtgtgatttgactattgactattgcactgtgaaggatgcgagaattctctgcatttcgagtgctacgcttgtgagtttgactatgcggtctgatcagtcgggggatttttacaaaattgtgctgtctacgccgaatctttgcgcttttgctttcaccggtgcaccttatcagcaactgcttgggagcaatctttcttcgctcgaaagagtgagtattgatgcggaaatctggtcgacttcgttggagtctcctttgattctgttgagttggctgttagagcttgccaatgtgaaatcattgacagtctctgcaagtactct

SEQ ID NO: 127322 - DNA, 580 bp, Glycine max
  unsure (1)..(580): unsure at all n locations
  Clone ID: PAT_MRT3847_85978C.1
tgcaggntaccccggtnccggnnaattcccggngtcgaccccacgcgtccgattacatcaccccttgagtggagtcttctattcatgctggctgatttctgttgcgcaggcagagacttgaaagacagggaccacaacggcactgatgataagaaagaggacttgcagaagcgaatgaccctggaggagaagattggccaaatggggctcattgaacgaagtggtggcacccctcaagtgaagaataagtacttcattgctagtgtgctaagcggaggagggagtgatacagaaacaaatgcctctgctgacactaggatacaaatggtgaatggaacccaaactggatctctgggtacccgcctcgcaattccaatgattgatggactacatgcagagcatggacacgataatgactacaaggcacccactctggctcctaacgggaatctacgagataccaatgatccactgctgatcaacaacatcgcacatgcaactgcccttgctgatagagctactggaattcaatatgacatggctccatgcattgcggacagcacagatactaccaggagac

SEQ ID NO: 127323 - DNA, 358 bp, Glycine max
  Clone ID: PAT_MRT3847_85979C.1
ggcgcgtgttctgagcccagatcctaccgtcaaggttgttacaacccagcttttcgaacgacccagtggctacaagatgtcagaaccaaacttcttctacgtcgtcaactctgcgcatctcaaccagtccgactttggaatcttgttcccatggttgacgcagaagatcttcaaggctgaacagcccgagcgagcgcttcgtcttaacctccgcgcccagctccagatgcttcgcgagaacaacgtccccgtcagtcgtacattcgctggagacctcgttgacggtacttcgttcgataagctcgacaagttcaacgaagccaacggcgatccctgcaaagacggcatcaacaatgat

SEQ ID NO: 127324 - DNA, 342 bp, Glycine max
  Clone ID: PAT_MRT3847_8597C.1
ggcccaaaccttaattatttttttttttaaaagggatccaattttttttttttctaaaaaaaattaccccccaaattttttccttaattgggacggttttttcccccagtttaaacacccttacccccatttcaattaaaaaaaccccatttggaaccctttccattaccccccttaaaatttccccatttaaaagatttggcagggttggggggaccaacagggggcctttaaaattaaaaaaaaccaaaagggcttggtaaaggtccaaaaaacccagggaactttgttcttttttttggggtaaaaccccccaaaacaggttttggacctttttaaaag

SEQ ID NO: 127325 - DNA, 392 bp, Glycine max
  Clone ID: PAT_MRT3847_85980C.1
caccccaaaccttttttttaaaaaaaaaaaaaaaatcaccccggggaggcgcttttggtggccctatttaacaaaaaaggccaacgtttaaaaaacatttttaacaacccccggggggggtcttctccccccttttggggcccttaatccccagggaaaaaagggtggaccccctttaaacaaacagggggaaattgttagaggggaacaccacccggcccttttacccccccccccctttgggccccaaaaaaaaagggtggttttcccagaatctcttaaaaacaaagtgaaacaccccccaaaggttttttaagggaaaaaaaaagaacttggcccccccactcaaaaaaaaatgggggaaaaaatcttcgcggccccccgggtgggaa

SEQ ID NO: 127326 - DNA, 287 bp, Glycine max
  Clone ID: PAT_MRT3847_85981C.1
ctgagctttcaagttttgcccaacctaatcatattctgcaacaagggcgaagactggtccactgttgaaaggccccacgctcctgtacgcggacataccacatccaatggccgatattagaggatctacccgaccaccaaagcacgcactttatggctgaatatactagaagaacgcatccttctctaattttatgatgcttaaaatacttttcactatggataattgtggtaattactataagtcatgtcatgtctgctttactctactgagcgcaacctgaatgg

SEQ ID NO: 127327 - DNA, 255 bp, Glycine max
  Clone ID: PAT_MRT3847_85982C.1
cctcctttttttttttttttaacacatacaaacggtttttttgggacttcacaaaacgagtcaaacgacagcattatgcggacacttgttacagaaacacaaacaaattttggaacagagaacatgctaatttcgccgacacagtttaaattccccgctcctatatatccttaactcaaacttgggtactccaaaaaccacaagcttaactggggtgtaaaaagaattgccccgaacctaaaataacagaggtgc

SEQ ID NO: 127328 - DNA, 403 bp, Glycine max
  Clone ID: PAT_MRT3847_85983C.1
agaagacgggagaaggtttatggcagcaggggtgcgaaagaagtagaaacgcacgcttactaacacccacataccgtgccacgcccacatgcacaactcccttcttctttacttctacttcttcctccttcctatctccgcatcaccaacacgtaagaggcttcaatcctcaagctatcgccctcttccaaaatgaaaccaaacttccaatgcatgtcttacaagacattcaaccacgtcgtctcagtcacttgctcacatctacaattgcaaatgccccctttggctacggccctcttggcttttttctgtctcatccctcctagtcactaatgttattcactcaagcttacttaacttttatagcatgcgactgttgccattcctacacactttcaacccc

SEQ ID NO: 127329 - DNA, 277 bp, Glycine max
  unsure (1)..(277): unsure at all n locations
  Clone ID: PAT_MRT3847_85984C.1
aactattcaggnnncatcaaaaggatnnttcacacgaatcttctgatggaccattgagagtttggcntgatggatggagaaacacnnctttcaattgatcaagttacctcacaaagtggagctncccgctgaggaaataaagttgagtgctgacaacattaatgancanagatttatgactacatcttctgcagtagacattcctccggagcatcttgaaacagatggtagacagctagatcatactgggattacaaganataatctgtattgtgca

SEQ ID NO: 127330 - DNA, 502 bp, Glycine max
  Clone ID: PAT_MRT3847_85985C.1
ggcacgaggcctcgtgctgcacagtttctaaatgcaatcggggaactagcaaggggactcgaaaaactcagcattgagccagtgtggaacagagacttctttccatctcctcaaacacccccagaaactgcattgccaccaacaccacctacaatgccagattacaagctagaacctgccaacatagatatgcccatggatcgaatcaacagtgtgaagcgagaatttcaactagcaactggactcaattgctcacccttcgagattgtagctgcagcatgttggaccactagaacaaaggccattgatcaattcgaggccaacactgaattgaagttagtgttctttgcaaattgtcgccacctcttggaccctcccctacccaatggtttctacggcaattgtttcttcccagtgacaatcacagcttcgtgtgagtcacttagaaatgctacaattgttggtgtggtgaagctgataaaagaagccaaggccaagttgc

SEQ ID NO: 127331 - DNA, 195 bp, Glycine max
  Clone ID: PAT_MRT3847_85986C.1
caaggtataaatcttattggggagtttgtatgcaagagaaacattatcgctctgtttctcagaacatgtatataagaaaaatgaagcaacaagtgtgtgagtggtagtagtagatgtaagcaatcaaaattacaatggtatggttcatacataataatgtatttaccaatggagaatttgtttggctctaacttt

SEQ ID NO: 127332 - DNA, 902 bp, Glycine max
  Clone ID: PAT_MRT3847_85987C.1
tgcttgccaactttgggatggagctcaaatgtgaaaactgaaccaattatttgtgctttgcaaaactgtaagctccctaatttccctgatgatatatcctggttggccagaggttctaaagttggatatgagattgaaaaccagaggatgcagcttgagaattgcttgatccagtacttgactcatactagtaagacaatgggaatttctttggcaactaaagaggcaagtgtcacaatgcaaagctgtgctagacttgagctacgtggctcaagctaccatgtagttccacattggggtatgatttttcgtcgaattttcaactggcgtttaatgggtttatctagcagggcaatctccacggcttacatttcagaatctcatcatgttggtcttccaaatgtgagctctgaaacatggctatcttattatccagacgcgtctttggatgaaataatcagtgttaattgtaactctcctcttcccgttaatgatcagccgaggccggaagcatttcaaactcctccacatagggattcaaatgatgtattccatgagactgttaacgtgagggatactgaaagcaatcttccaattgataaattgcctagcatggatacaactggaacatatggtttatacagtgctaattctaacagtggagcattaatgaatgggaaaccagccaaagaagctgacaagttaagcaaattattggagcaatgtaaattgctgcaggatggcatagataagaagctctttctatacttctaatgggaacgtggcttctctctatatttctattttttgtatgtatcctcaactaaagtaaaagagaaaacaatcaaatgttgatttgtaggaaactttgtacaataagtaaaattataattttttttttc

SEQ ID NO: 127333 - DNA, 691 bp, Glycine max
  unsure (1)..(691): unsure at all n locations
  Clone ID: PAT_MRT3847_85988C.1
ctcgtctcatcgcaacccaacacttggattggatgctatgcttcttcttcttcccatcaacacccttctaactttccaacacacaatcttattctgattctgatcatcaacacaacccatttcatgatctgggtggcttcgtctggagagagagaagaaaaattggattttgacacattcccagggcataaaatgttgcttctgtgagaggggtttcatgggttgaactcggagaatcatgggtagcttcagcgaagacgaggaatgtcggtttttcgatgctcaagaggatgttgtgtccattccagatgaaggggtatccaatggttttgattatgaagtgtggattcggagtccaaggagtgtgagagagcgtaggggcaagtttatgaagaggatgggactgagtagtgtggatttggttgcccttgaaaatgaaaattcagtagatgtgcgtagtgttgaatgtgaagaggaggttatggacagagtaaatgttaacagtggggccgtgacccgaaattgtgttatggaagaggaattctgttcaagcaggacatcaatgtcttgttggcatagggagaattcttcaggggagtttggtatggtggatagttcgccgtgtcatgatggaaatttggagggtaatgtggatcangaggggttgcagtgtcgggagatgagtgaggga

SEQ ID NO: 127334 - DNA, 607 bp, Glycine max
  Clone ID: PAT_MRT3847_85989C.1
cccgcgtccgctccgtccgctcatcgcaacgcaacgatatgcttcttcttccatcaacacccttctaactgattctgatcactcaacacaacccaacccatttcatgatctgggtggcttcgtctggagagagagagagaaattggattttgacacattcccaggtcttaaaatgctgcttctttgagaggggtttcatgggttgaactcggagaatcatgggtagcttcagcgaagacgaggaatgtcggtttttcgatgctcaagaggatgttgttgtgtccattgcagatgatgaaggggtatccaatggttttgattatgaaatgtggattcggagtccaaggagtgtgagtgagcgtaggggcacgtttatgaagaggatgggactgagtagtgtggatttggttgcccttgagaatgaaaactcagtagatgtgtgtagtgttgagtgtaaagaggaagtgatggatagagtaaatgttaacagtggcgctgtgacccgaaattgtgttatggaagaggaattctggtcaagcaggacatcaatggcttgtgggtctagggagaattcttcggggggggggtggtataggggggtaacttg

SEQ ID NO: 127335 - DNA, 723 bp, Glycine max
  Clone ID: PAT_MRT3847_8598C.1
gcacgaggagagagagagagaactagtctcgagtttttttttttttttttaatatcaagagaagctaattttaaattagtttgaataagaacaaggaaggttttatcatgtgaaattttacaagtcataataaatcgcccccttcagcctttagccttaagactaacactaaaacaaggttagagtctcttgaaatcccaacatatccaaatctacatgaacaatgcaagaatctacgccaacaacattagcatcctgtaacacaccccaccccaatgtgagtaactatgtgtatctttgtactatctctctccctataccaatcccattaccaattattcagatacttcaagatcttcagcgagctcgaattttatccagccagtcaaggctcttcctcgtcctcccaaaatgaacatcaacacttttccgggatttatcggggttctctttgtttctttgtgatcctgccacatggtcaaaaaaaagccttgatttctcttctgtttcaacattactcaacttatgcccttgaaattgcagtggttccggctgctccgggctttgccgtgctgtgtcccttagatctgcactcatccttggagcttcaaaacaatcaacacttcttctggcttcttcaactccacctatgcttctccacaaagtttgccattgtgatggtgacttttctattatcgatatgaattttctgagatgtcgaag

SEQ ID NO: 127336 - DNA, 157 bp, Glycine max
  Clone ID: PAT_MRT3847_85990C.1
gagacctcaggtcaggcggggctacccgctgagtttaagcataccaaaaaaaaaaaaaaaaaaaaaaaaaaacaagcggtctatataaacgatccaagcttacgcacgcatgcaagcgacgacatatcttatatatagagctacctaaaatcaattg

SEQ ID NO: 127337 - DNA, 181 bp, Glycine max
  Clone ID: PAT_MRT3847_85991C.1
gggtgggcccacgcgtccggttcgtttgggcgggcgcgtgggctagattggaaaaggcttcctctactgaagcacatttagttgctggactaaccgtcaactatgatatgatcggtgctggatgactttctctagacgcatctgctggttaagatgatcaagtaaaacccaaaaagggtga

SEQ ID NO: 127338 - DNA, 421 bp, Glycine max
  Clone ID: PAT_MRT3847_85992C.1
aaacaaacatacattacactataatgtctttgctcatgttcgtagtaacgaaggccaaccttaaggttgcacgtctggtcgccgtgatgtccatgattgcggtggctatcaatgccacacccatggcaaaggtcacattcaggtgccgtcaagtcgacgtgcacatgatctcctgtgcgtcagtgtccatacgaactgaggtaaaccgtctcaggactgctgcacaggtctgaaatcacacatcatcggcacgatgaccattgctgactgccagggagcatacaattccctgaaaatcgctgataacataacgtgacagagtttgaatgccggcatcgtcaacactcactctgtcatatgtgacgtcaagatcccataccagatcagcaacaccaactaatgcgctatcatcaagttctga

SEQ ID NO: 127339 - DNA, 297 bp, Glycine max
  Clone ID: PAT_MRT3847_85993C.1
ggctcgagcatggagttcacgggggggagagctcccgtctgtgtcacgggggggaagtacagacgggttcaagtggatggcccatatgatagatcccggcaagcacgacgattaccccttgtgcgaccgcagctttgcaagaccaagatgcccttactgcgtttttaacttgcggtggactaccagatgataccgccggtccctaccgaacactgactaccatgcaaccaaaaagaaaagaaattaacatattaaggaatcatttgaatatttctgtcagaacccaaagaatgatag

SEQ ID NO: 127340 - DNA, 1127 bp, Glycine max
  Clone ID: PAT_MRT3847_85994C.1
aattcggctcgagaacaatcttagaaataaacctacatatccaaccctcatataaatacgccattaccctacaaccatatattatacacatagctagacatggtgaaaccagccatggctagtgttgattcttcttccttttcttcttgtaaaaatgattcattttcctctaactacagcattgatacttgcaagatgtacaaaggggtaaggaagagaaaatggggcaaatgggtgtccgaaattcggcttcccaacagccgtgagcgcatatggttggggtcctatgacacccaagtgaaggcggccagagcatttgatgtcgcactttattgcctacgtggcaaaagtgcgagtttcaactttcctgacacacctcgacacttggaaattaatatggtgttaccatgtgacatacaacaacaacctctctcccatccggagattcaagagatagcctcgaagtttgcgaacaacgaccacgtccctttggaggaggagagtgcttttcaagaacaagaacaagacccctcgatggagtcacaaagtgacgagtctaaatctgccaatacaataacggagatgagcaacttccctaatatttatgatggtggaactcatactaatgtacaagtggatcaattacaaggggattgggacagcatggattggacattttttaacatgttggatgacttgaatggctcggattttggcctctatttggggccagacaagttgcacccgggtgagtttttgtgtcccactcaagctccaatgctttttcatgaggatgaaattgaaggtgatgatgatcatgatgctttttctaaccattccttactttggagttggaacttttgattcacctgcaaattaacttagataccctctactttgcataagtttcaactagtaaataattactagcaagcaagcctctctattatgtttttttgtagccatttatacatggctgtttctcaattataatagttaggctatgactagagtttatgtcaaatggaccataaagacaaaaagaaaaaagaccatataccatgccataaataatattatagaaagtggcccggtttttattgccatctttctgtttttttttaaaa

SEQ ID NO: 127341 - DNA, 495 bp, Glycine max
  Clone ID: PAT_MRT3847_85995C.1
cgacccacgcgtacgcccacgcgtccgcccacgcgtccgtacggcgcgagaagacgacagaagggggtgagactcgtgcgcgtcgactctcctatgctaccgcagttaccgcttccaccatggccaccatcactgcgatatccactttctccagtgcttcgtcctccgccatcatcgctgcgtcagcttccctggactctaccgtcttcggggtgaccgatctcaacaaccctagcgcgtccatctcaacggtctcttggtcaacaagactattgaagagatcctcaccctaccactcatcctatgcctcttttatttcacaaaccctattttcactcttcacggcgcaaggaagggtgcttcatgtagctatttttttattgggctttttcatcgtgtctttatttcatgtgattttattggatctttatatattagattgagtttgttgtaaaaagtatttttatcttcttttttttttctcacataactact

SEQ ID NO: 127342 - DNA, 575 bp, Glycine max
  Clone ID: PAT_MRT3847_85996C.1
ccacaaacaacttgaccaaaatttttggtatttccgtcacgaccgaacacatgtcaacgacaccatacgccgcttaagcctcaccgttcgaggacgaagaggatgttgtgtgcaccgttgcacctcactgtcctgaaaccctcgtcaccatgtcaaggcttcttgcttgtggaaacattagaaggtttacacgttctgttcacaagacaggctgcttggaagtattttatccaatggggcccccttactcaagatacaattttttctcgcactatagacatgtacacaaagaacaatttctattcatgttatttaaatcgaaggttaactttttaatgagtagcggggctaggaacttgtataccctccctgcaaataatgtaaaataccatcatggtcaagttgtttggaacaggatgtgtttccataaagggccagctctaccaccagtaggtcaaattgcccatgtggtaactttggctttggtcaaatcaaattttgttgttcatggtgtgattgccttcataattggagagtttgcttggacacaaaggaaatgggcagaaacagaatcc

SEQ ID NO: 127343 - DNA, 383 bp, Glycine max
  Clone ID: PAT_MRT3847_85997C.1
ctcgagccgataaaattgtataaaactaattatttatcttattattataataatgattaacgtttatttatttattattattattactgggatggttaaggtgataattcgaattaaattgtgtaaaattaattatattattatttttatgataacgattaaggttattatattttaaaataaaaattaattttaattttatgtgtaaaaatattaaatattttttaaaattattatttattaaaagttaaacatttaaataattaaaaaaaactaattccccgtttaatagatttctggaatccctgattacacattaattaaaatcttaaaatttccaccaaaatcaaattcagaaaccattcttcgaaacctttatactg

SEQ ID NO: 127344 - DNA, 124 bp, Glycine max
  unsure (1)..(124): unsure at all n locations
  Clone ID: PAT_MRT3847_85998C.1
gggagctgagttttgactatgcacaaaatgtaatgcgagcaagatgattctacattggagaactcaatgaaggaaaacttggattggctagctnaccaaaccttttatgacaatgaatttcttt

SEQ ID NO: 127345 - DNA, 280 bp, Glycine max
  Clone ID: PAT_MRT3847_85999C.1
cgcaaaccttctcagaaacttgtccttccacgcgcgccgtcttcgtttctctcccactccttccatcttctctcctacagctacagcacccacctccttctcttctcgctcccatgtccccgacaaaccccactccctccttgaagacattagcaacgaagagttgaagaggcgtgtggcaaagcttcaagagggggatgctgaggcaattccttctgtgtttgaggctatattgcagaggtatttagcagggaagcctatagaagctgatgaggagttg

SEQ ID NO: 127346 - DNA, 510 bp, Glycine max
  unsure (1)..(510): unsure at all n locations
  Clone ID: PAT_MRT3847_8599C.1
gggggcctaaatcgcccctcctcacgaagggggcgatcacgttcacaacaaacttttttggcattaataaaagacgccaccgacgagactttttttccaacgacggcttctataacatctcaattaccggttttcaacagacataatacggtttccccaaaggtaaaaggcttgttaaagcggaagtttttcttaccctcaacccgattccaacccccttaactattggaacattgttttggttgggaagaaaaaggggggagatggcccaatggggatttgggggggaaaannnagggaagaaaattcaaaagttgggggccaaaganngaagtttggggacggcccaagcccccggatggccggcgccttccgccccggatttagcgggggaaatatgggctccgactctggcgaagcaaaggcgggggggaagatacaggttcttctttggtggggtatcattgggctgttggatttggccctgggcctcttttagggtagaccttc

SEQ ID NO: 127347 - DNA, 308 bp, Glycine max
  Clone ID: PAT_MRT3847_859C.1
agtctttcttggtgtgatattatgcagtttgggaggatgaatgtccctaatagtgatcataatgcgccaactgatgagaagactgagctgctgtagacactgcaatggacgtgaatggtcctcatgagagtaatccagattactgtgttcttgccggtagctgatgcaccatcggaggctactgtcgttgtggtggccaccatttagcatgattgtcgatgttcatgagtaactgatgcataagatcaactatcattacaccaatggctaatgcttgaatgcctaaaaattacactattactactcct

SEQ ID NO: 127348 - DNA, 411 bp, Glycine max
  Clone ID: PAT_MRT3847_85C.1
cccacgcgtccggttaaactaataaaataatcataaaggtggtggaggggtgtgtgcgctcacgcgcatgacagagcatacataacagggcataggaaatatcatatatactatatattatagtctagtttgcactattttaatggtggccgactaccttaattccacatgcttaaatttggcacctctttattatataaccgtttcattctgaatagcatgtcaaagggtgttctgagaaggaatcacacaagagaaattgtgcgtggatcttggcaatttacatttggtacaaaaatagtaggaaagaaacccatagttaatatagtaacaatgtcctggctaacgaaggggaaccaaagggggtcaggttagtttatgcggttcacggaaagtcatggcaaccgtggt

SEQ ID NO: 127349 - DNA, 416 bp, Glycine max
  Clone ID: PAT_MRT3847_86000C.1
gggaaccggggaccccaaagccttttaaaatgaatgattaaataacccccggaaaagtaactaaactatttccggggtccactaacactgggtggtaaaaaaattattatgggggttctgaatatcccccaggtttcaaaaaacccttttgggagggaacctaaaactggataaaatggggaaagttttgcgggatgttcaggggggagaaaaaaaatgccgtttacatcaaaagccgtccaagggcaaaaattctacaagctggaatgcctaaggggggggtcccacctttcaagactaggacatataatttccttcactcgactgccatttttggaaatcttggaaggggggacaaccctaactttttcaaaagcgggaaacggggggcttggttaaatatccctcttaaggaa

SEQ ID NO: 127350 - DNA, 237 bp, Glycine max
  Clone ID: PAT_MRT3847_86001C.1
gtcacacgttcgttccactcatccacttttctttacaacagcatttcaccattttccacagtggctatctaccggtattatcacgtggcataccacactcatgaagtaccaaagaatccaatgccaccgatccatacaccaatatcacgatgccatctctgaacacatttgtcatcattgcaaaacaagcaaactgccatatccacgtaggaaaaaagttgtttcaaggtttaaaac

SEQ ID NO: 127351 - DNA, 1253 bp, Glycine max
  Clone ID: PAT_MRT3847_86002C.1
gtccgctcctcccctatgattgaattaaatatttttcttttgtcctgcttttaattgactttgtgcacatcttcgtgatattaacctcactgacagtcacttttgtgcatacaaggtggacaacatatttttggtaattggtttgacctcttaagttgattgaattatattgtccactcctcccctatgctttctgagacatacgtgggctcctgtgtttgaaattgtggacatatgaacatatgtttcttgtgcttttctacaaattataaatttatgttttttaatatcatctttgctaattatttgagttttgttttgatctactatttctattaaataagaaatttaactaaaaagatggattccctttttcttttctgtggaagaaaaataaaatgggggagagtaaagactgtggcaggtagccttaacacagaagactggaaatacagtgctcaagagttttcatcaaactacatcaaccaatatgcttcccaggataattttgatgatttcatctagtcagaatcagacaggcagatgcttcttataaagagccaagatgaggagttggatgagcttagtttaagtgtacaaagaattggaggtgttggacttactatacatgaagggctccttgcgcaggaaaagattattgatgaacttggcaatgagatggatggtacatctaatcgcctagattttgtccaaaaaaaagtggcaatggtcatgaagaaggctagcgcaaagggccagatcatgatgatattgggtttgttggcgatgtttattttcctcttcatcttggtattcttcacctagtcagtgagaccgatgaaccctggcaatgctttgtttgtacatgaaaaaagatttaaagcttctgtgaagatacaagattaatgagacattaaatatgcctaaaactcaaatatggaagcgtctttgatttgtggataaaaaaaaaaaaacagtagaaaattttgattatgatgaaaaaggaagcaacgcacttgaaaatttcacaagaggattttgtttctgaacaagacggctcgcaaacgtgatttaaattagtagtattcgtttttaagatgattttctcctgcatgtattgcttgatgccgtttttttttctttttgtaacgacaacgtggtgtttcgaatttatatacttttgactttgagtgtaccaaaatagcgtatgatctgtcttataccaatcaaatcaaccaattatttacctgctc

SEQ ID NO: 127352 - DNA, 327 bp, Glycine max
  Clone ID: PAT_MRT3847_86003C.1
cgcgtccgcttggggatcccaacacttttggtaacaggatccacattttactaaatcttggactcatcagtgatgtgtacactggtgaagcggatgctgacattccttatactgaagacgctgatgcatatactgactgtatcaacattgactaatctgatttaatctgacttaattgtctgataccattttataaacactgattgaagaaacactctttgtactacaactaatgtttatacaatttacgaaatattggaacgcttgcattctatgtccaaatgtatttataacgttaacggaaaaaaaaatatctagtgttgacct

SEQ ID NO: 127353 - DNA, 325 bp, Glycine max
  Clone ID: PAT_MRT3847_86004C.1
ccttgtaagggttatatccatttcccttctttgatgccccaggatcttccttaacaaactcagggtgcggcttctgctgatcacccaaaaacttcttggctatcttcaaatccccaggctcgacaccacccttgatgtttttattgttccagccgagggatcccttcatctgtgtaaccccacacaccattttgctgaacgaacacgaagcgcattgaaccattctcatgcccatcaaacccaagctccctgtgctgacaaactccatgagaatttcctagagacatctcacaaaaaaactgcatcttaaactttgcgcccaaca

SEQ ID NO: 127354 - DNA, 322 bp, Glycine max
  unsure (1)..(322): unsure at all n locations
  Clone ID: PAT_MRT3847_86005C.1
tgatgnacgngtangtnagctcggaattcggntcganctcttctttctgttctnnntcgtnttcttancctnngnngnngnnagngtccncgngnanaagatcacncgnatgcttgngaaagagnncgggttctgcangttcaannantntttgtgnntnancnacctngcngaagagatnaagngcngcgagancatnaggtcctgggccctcgacaatgcngccatgtcctnnntcntcgacaagnacntntnantnnnnggnntnaaaaangtnctntngntccacgtnntcgtngactacttcggcgcaaaaagctnc

SEQ ID NO: 127355 - DNA, 1363 bp, Glycine max
  unsure (1)..(1363): unsure at all n locations
  Clone ID: PAT_MRT3847_86006C.1
cactggtgttgatgaccaaagaagcaaggcaaagggaaaagttaaagcttctggatttggtctggatgataattctagtaacacagaagagtatttgattggggtgatatctgacatgctaaaggaacttggcaaaggagatagtgtatctacttttgaatttatcggtagtggtgttgttgaagccttgctaaattatttttcttgtgggtatttctctaaagatcgaatatcagaaaccaatctccccaagcttcgccaacaggcactttcaaggttcaagtcatttgtagctgttgcactacctttgagcattgacaatggggctgttgctcctatgactgtcttagttcagaagcttcaaaatgcgttggcctccttggagcgtttccctgttatgctgagtaattcatctcggtcatctagtggaagtgcacgtctctcctctgggctaagtgcattatctcagcccataaaattacgtctctgccgagcccagggtgaaaagtcacttagggattattcatccaatgtggtactgattgatccattagcaagtctagcagccatcgaggaatttctatgggctcgtgtccagcgtggtgaatctggtcagaagtctactgtaggcactgaaaattctgaatctggaacaactcctgctggggcaggtgtttcatctccttcctcttatactccctccactgcccatcgtcattctactagaaccagatcatctgttaatataggagatacacctagaaaagaaacatctcaagacaaaggaacgagctcatcaaagagcaagggtaaagctgtattaaaacctgcgcaggaggaagcgcaaggaccccaaacaaggaatacagtgcgcagaagagcagctcttgataaagacgctcaaatgaaacctgcaaatggcgactcaacttctgaggatgaagaattggatatatctcctgttgaaattgatgaggctttggtgattgaagatgatgatatttctgatgatgaggatgaagaccgtgaagatgtacggagggattattatcttcctgtctacttgcctgacgaagtgcatgatgtgaaattgggtgactcagctgaggagagtactgttgctcctgcaacaagtgatagccagactaatgcatcttcaggttctagcagcaaagcgggtacagccagnggttgtgactctgctgattntaggagtgggtattcatctagctcaaggggtgcaatgtcatttgctgctgctgctatggctggactcggatatgctaatagcagaggtttaggggtggcagagataggcatgggcgcctgttgttggtagttctatgatccctcaaagtgattt

SEQ ID NO: 127356 - DNA, 137 bp, Glycine max
  Clone ID: PAT_MRT3847_86007C.1
gctgggaggacttcattgctctcatggaagctgggggagtgtagcaaaattgtgggttcataccaaccacccggacatggctctgcaccccacaaggcatgggcactaagcccaccgagtacccaccctgcacatcc

SEQ ID NO: 127357 - DNA, 200 bp, Glycine max
  Clone ID: PAT_MRT3847_86008C.1
ggaatccaaccaagtaaacaaaatccactcaaggttggagggtaatcagcttcaatttctttccattttcattttgccctaatacccaaaaaaaaaaaaaaaaaaaaaaaaaaaaagcggcccgtttaaaagatccaaacttacctacccctgcattccaactcataacttttctataagggcacctaaaatcaattcaa

SEQ ID NO: 127358 - DNA, 292 bp, Glycine max
  unsure (1)..(292): unsure at all n locations
  Clone ID: PAT_MRT3847_86009C.1
ttanagttnnaangatgtgnncgnangctnggnattnggactacgnaacncgcgagnnctgnagtgnactaagntgngngaatgnnnatncaagannnacatngntannatnggntcanntgtgggnggtnngtanggtcncgtggannggngnnnatgggagnagtgcannncnngtntacanngatgngggggngnngngnggtntgagngagtcntngngtcngntgangnggtgngtggnttngtctggtgtcngnagcgtgtanggngtgnngagngagtcgctgac

SEQ ID NO: 127359 - DNA, 422 bp, Glycine max
  Clone ID: PAT_MRT3847_8600C.1
tcgacccacgcgtccggcgagaagacgacagatggcccaacgcggaggaatcatgatttttgttgtctattttttaaccaccctagacataacaatagggaacacgattttctggtgtagcattgatgccatgaaatcacgatttctctgaacataaatttggggaaaaaaataccattgtgtgtggggtaaggtggggaaatgaggagaacaacgtgcaataggaataaaagcccctttcctcccccgaagagaagaaagaagagcctcatattgcgacgggttttgaaagttcaaatgccttgcgaaccttgctctttggaaattaatagacccatacagagaatgaacggagtggtttttttctaaccccgccctaagaactcaaaaatgaccgtgagaggggggttctatcccccccc

SEQ ID NO: 127360 - DNA, 493 bp, Glycine max
  Clone ID: PAT_MRT3847_86010C.1
gattctcaaacttcctttccccaatggaaatttatttcaggatattacctcaccaaatgttttgtatttacaaagaaaaatcacacaagatgccattgataaataaattgtctttaactatctccaaataaagaaattacagcgctttttcaccgtcatgtaataaatttatatcgcccttttagaggagtttgcgcttctgttttttctgttatcatctgactttgttgatgaagcctccttctcttctagcagctgcctttctttttattttcttccactctacttccatggcctttgtcagtacaccgactttctttataagcatcttaattcctttatctttagcttgtaaactactgtctttaatttcacaagacttcctcaaattgatgacctttttttgcagcttatcatatagaaaacctgagaccacatcattcctgcttgaacctttttgtattattgctttcaggagggtttttttccacat

SEQ ID NO: 127361 - DNA, 892 bp, Glycine max
  Clone ID: PAT_MRT3847_86011C.1
gtacggaaactgattctcaaacttcctttccccaatggaaatttatttcaggatattacctcaccaaatgttttgtatttacaaagaaaaatcacacaagatgccattgataaataaattgtcttcaactatctccaaataaagaattcacagcgctctttcaccgccatgtaataaatttatatcgccctgtagtaattttttatgaaattgttacgttagtcttaaaacggactgaagaaacttgacaattgacagttattagccgcactacagaaagtgaagctaaagaaccttttagaggagtttgcgcttctgtttttcctgttatcatctgactttgttgatgaagcctccttctctctagcagctgcctctcttttcattttcttccactctacttccatggcctttgtcagtacaccgactttctttataagcatcttaatttcttcatctttagcttgtaaactactgtctttaatttcacaagacttcctcaaattgatgacctctttttgcagcttatcatatagaaaacctgagaccacatcatccctgcttgaaccttttggtttcttgctttcaggagggtcttcttccacatcaacaatggttttaatttctggggcttcactttcatcattgcatctgtttaaagtcatgtctctgttcacctgcatttcattttccttttcaccattatcagcaactttacttcttgatgcccatatccctttcgttaacatattttctgtggaaccatatttttttgtagggctccccagcttcaaattcccagctacgatgtcccctaatggggtttttatatttggagggctgggacaatgagcttccaaccggacatgcccttggttgtgatggggatctc

SEQ ID NO: 127362 - DNA, 256 bp, Glycine max
  Clone ID: PAT_MRT3847_86012C.1
ctcgagccgctcgagccgcgaatttgagcactaacagtgtccaaaatgagcatcggtggaacgcgtggaaccgcaccaaccggtttgggcagcggagttggcttcggatccggcatcggaagcggcgtccgtgtgcacttcgggtcattctcgcctgcgagcagcttctacaatccgtcccttccgttccaagcgccggtgaacggctttggcggtgattcccgcattcgggtcgttctcgttccgcatccggacg

SEQ ID NO: 127363 - DNA, 162 bp, Glycine max
  Clone ID: PAT_MRT3847_86013C.1
gtaatttatatgtagatgaattctacaaaatactgcgaacaatctcgaagttgacatgaagttaagatgaagaaaaaaaaagtgcacattctaatggcctttttcccccgtaaattattaatgaaatgcattaagtattctggcttttttttataaaaaaaa

SEQ ID NO: 127364 - DNA, 431 bp, Glycine max
  unsure (1)..(431): unsure at all n locations
  Clone ID: PAT_MRT3847_86014C.1
gacccacgcgggcgggagcantttagaggnggaancgccggaagaagccgngaccggagcnnccagaggcannggaaaagcganggcacngncgnnaggnaaagcaggnngcaaggnncnggncaacnangcaaggncanccaaggaagcngaggaggnnnccaaggagaaagaggagnnnggngggcaagcncnaacaggggggggagaagattctttctcttttgacgnggagncnangannaaaacngcagnngaggcgggggggaacagnngacgccccaacaaacaangcaggaanaaccagaganggnccaacaangagaaggaagaaaacacaaaggcaggangncancgancnaaancncacnggngnnnnncnnngcacccaggcngccgcnaagaaaangangaagaaaagaaagggaaga

SEQ ID NO: 127365 - DNA, 596 bp, Glycine max
  Clone ID: PAT_MRT3847_86015C.1
cgctttttgcgcactgtttgcttggtttattgatcctcttgcacaaatagcacaatagttttaattagcggaataaattattcacttcgtttctataattgttctcattttaagttatagtttctaatagagttaattccgcccttggttttgtggtttgtcgatatcttcttaaatcatcaaagagcgattccgtactctacatctaaccaaattctacacgacaaggctataatttttaattcctacacatacatacaaattaaattttggttgttcccattgttaataccagacaaaatgttttcactgctatgatagttttcttacagtgatagataaaccatcacaaagaactctgtttaaacattaaaatttgcaactttatataatgattaaaacttccaataaagataagggatcaagtaatttttttagcataattacaattattcaaagtgatttaagtggtttaaattgctagttatagttattaaaatgtatggagacatgtaacgtttactcgaacttcatagttgcaatggctgggtggttaattagaagcgttgataggaaattatattattagttttttt

SEQ ID NO: 127366 - DNA, 334 bp, Glycine max
  Clone ID: PAT_MRT3847_86016C.1
aataatgtcatcgagtaagtaatgttgtattctttaaagcgatcgccctttaatttttatccaaagcaattgactttgaaacacatgtcttattaattagggctgaacaacaacacctttggtgcaaaaaagcgaaaaactaagggggagaccatataatatttgctcccttttatcaactaacttcattgctaaacattgcgttccaaagtcatcatgcgcttgttcgactccaaattcacttattacctgtaaaatttcatggtgggtgcagaaactaatttgacccacgtacatatgcaggtaattctttggtaattcacacactcaagca

SEQ ID NO: 127367 - DNA, 128 bp, Glycine max
  unsure (1)..(128): unsure at all n locations
  Clone ID: PAT_MRT3847_86017C.1
aanaagcaagcacgcgnacgtaagcacggaattcggntcgagcccacaaanncggagaatcagcnggcangacagantggtntctancaggannccatgaggantggtnctctaattgaagcaactct

SEQ ID NO: 127368 - DNA, 296 bp, Glycine max
  unsure (1)..(296): unsure at all n locations
  Clone ID: PAT_MRT3847_86018C.1
agtcgcangcacgcgtacgtaagctcggaattcggctcgagncttgttattgtaaaaaaagaaaatgganaaaaaaaaaaaangggnggccgcngannngnnanctcgtcgncccgggaatnaatncnggnccggnacctgaaggcgaaccancttccccnaaagtgagncgnatnanagctnggngaaancagggccaanncngttnccngngngaaatngtnanccgcncanaatnccanacaacananggnnnncagncgannnnnngcancggtnngnnagnngnnagngng

SEQ ID NO: 127369 - DNA, 358 bp, Glycine max
  Clone ID: PAT_MRT3847_86019C.1
actgtgattcacgggttcggggtggcgggtgatgttaagaaagcaaaagggtttttcatgagatggtgaaggagggtgtggttcctaatgttgctacttacaatgctttgattcaggttttgtgtaagaaggatagtgtggagaatgcagtggtggttttcgaggagatggcgagggagggtgtgtgtgtgccgaatgtggttacttataatgttgttatacgaggtttgtgtcatgttggggacatggagagggcgttggggtttatggagaggatggggagcaggtttaggcggtgttcaaacaaaacagttgagatcgtattttgtgattttttttgattccttgtatgttttta

SEQ ID NO: 127370 - DNA, 388 bp, Glycine max
  Clone ID: PAT_MRT3847_8601C.1
cggactcttgggaatgtgggggaaaaaataaatgaaaaaaaagactactaattaaaaaataaacaaatcttaccttctcaagcttcccaccttacaaccccttgcatggtggcacgataattcacttctgctgtcactcatgtaacattccctgggctgggaaaacccgcgttttgcccgtattaatcgccttgggtcaaatcttaatttcgtcgtatgacttgcttatgaatggttcatgccctgttggcctatgacagttgtatggttgggcttttggctctgtgggccaatcattttacctgatcgtatcccgccttggacggtgctttaatcgcgagggggaggggagctcttatcagagtcccccttacgcttgctatccttt

SEQ ID NO: 127371 - DNA, 247 bp, Glycine max
  Clone ID: PAT_MRT3847_86020C.1
gggcactaatttggtgcacgtaataacccaactagctcaagaagtagctgataagcatgcagccatataacgtgacttagctgtgcatgcatcagatgtacattgatagttacatcggcccgatgttgtccttggtctgatatcactatatccttcactcaaaatgcgctaggagatatgcatgctgcttccggatataggacacatattgatcagacttctgcataattggtcaaggtctatacat

SEQ ID NO: 127372 - DNA, 1210 bp, Glycine max
  Clone ID: PAT_MRT3847_86021C.1
attgacggtgcccttattaattggtccctctcctccaaaccccaactgggtatcgcaaagtttccaaattgaatgcaaaaacagaaacttcttcctcaaatgccttctgggtcgctcttctttctatccagattacgaagatttcggtcgccagtgaggttgtgattcaagtgctattttagcatttttttttacctggacggtaagggtcaacttgcatgcacatgttagtgaaaaaccacaataagggggatggatctaagtccctggccgatacactggcgaaatggaaagaatataatgcctggctggagtctaacaatgaagctgagaagccggttaggaaggtccctgccaagggatcaaagaaaggatgtatgaaaggcaaaggaggacctgagaacttgcgctgtaattacagaggagttaggcaaaggacatggggaaaatgggttgctgaaatccgagagccaaacagaggaagtaggctctggttgggtacttttccccactgccattagcgctgctcttgcttatgatgaagcagcgatggcaatgtatggtttctgtgcacgcctcaactttcccaatgttcaagtttcaactttttccgaggaaccgtctagaaattctccagctgctgcttaccagtcaagaaattctccatctgctaaagaatccggttctgcgttggtgatattagagaggtctgagtgcatgatgttgtggaacaattctggtggagatgcagcagaggatgatggcatggaagacctttccttatccttaagtgtgaaacatgaggaaggggaggatgaatcagggaccagttcttcctatctttcattgtcttgatgtatggtttgcatactctgatttggccgtggctggaaatcatagccttcatagaggtggatgattagcttaggatgaacgaatcttgatattagtacctggagattagctgttgtaaaattgacttggttgagaagtgttccattcttcaggaattgacctaatgcaatctggatatccagtcaagttgtaagatgtgaaatgtattttgccttgcatgatagatgactagtttattgtgtctattttacattggataatgttatctagtctttgtttccctgctagtgtgggttattgattttctactactttccttgctaatataaatttctatttccagcgctttggatta

SEQ ID NO: 127373 - DNA, 1444 bp, Glycine max
  Clone ID: PAT_MRT3847_86022C.1
catgattgacggtgcccttaattggtccctcttttccaaaccccaactgggtatcacaaagtttccaaattgaacgcaaaaacggaaatttcttcctcaaatgccttctgggtcgctcttctttgcatccagattacgaagtttttggtcgccagtaaggtctgtgattcaagtgctattttagcatttttttttttttcctggacggtgagggtcaacttgcatgcacatgttagtgaaaaaccacaataagggggatggatctaagtccctcgccgatacactggcgaaatggaaagaatataatgcttggctggagtctaacaatgaagctgagaagccggctaggaaggtccctgccaagggatcaaagaaagggtgtatgaaaggaaaaggagggcccgagaactcacgctgtaactacagaggagttaggcaaaggacttggggaaaatgggttgctgaaatccgagagccaaacagaggaagtaggctctggttgggtacttttcccactgccattagcgctgctctcgcttatgatgaagcagcaagggcaatgtatggttcctgtgcgcgcctcaactttccccacgttcaagtttcaactttgtctgaggaatcgtcgagaaattctccagctgctgctaaccggtcgagaaattctccagctgctagtcaatccggtcatgcgttgatgatattagagagttctgagtgcatgatattgccgaacaactctggtggagacgcagcagaggatgatgacatggaagacctttccttatccttaagtgtgaaacgtgtgaagcacgaggaaggggaggatgaatcagggaccagttcttcctatctttcattgtcttgatgtatgttccacatacactgatttggccgcggctagaaatcttagccttcatagcggtggatggattagcttaggatgaatggatcttgctattagtacctggagattagctgttgtaaaattcacttggttgagaagtgttccattcttctggaattgacctaatgcagctggatatcttgtcatgttgtaagatgtgaaatgtattctgccatgcatgatagatgactagtttcttgtgtctattttactttggataatgttatctagtctttgtttccctgctagtgcgggttattgaaatttctactactttccttgctaatgtaaatttctatttcaagtgctttggattagcaatggatggttaggttgtgctaggattggcaacccaattgcagtcacaacatcaagacttttagtctttgtagctgcattgagttcacaattgtagctgcctcagtcatatttatctgcagttttttgtaacaatgacttacgcatcttgtttaaccgactgagttagactaattcatgtatcttgtttaatcaactaagttagactctcttgacaac

SEQ ID NO: 127374 - DNA, 253 bp, Glycine max
  Clone ID: PAT_MRT3847_86023C.1
tgcctagatgtttcagccaaagtataagctggtcagagttctagaaggccttctggtactttttcttttgttttgtcagtaaatcgtcacttgtcaatgaaacaatattgtttctaagattgtaaattgtggtcgcggtcgcactctcatggtgacccttaaatcacaactgtggttgaaatgcggtcgcgactgaaatcatggttgctaataattttttaaaacacagtgtcactatgtttttgaaggggtg

SEQ ID NO: 127375 - DNA, 367 bp, Glycine max
  Clone ID: PAT_MRT3847_86024C.1
gctaagagtctaagcagatgagtctcaatgtggatgaagatttagtgactgaaatggaggaagcacccactggagctccatctataccattagaaaatgttcaagaaatggtaaggaatgatccttttcatgtgcctataggatatgtgacgagtcaagaagaattggagaaagccaattatatgcctcacctttcatctgagatccctgtcattgatttagcattgctctcaaatggaaacaaggaggagttgttaaaatttgacgtagcatgcaaggagtggggtttctttcaaatagtaaatcatgggggtcaaacagagcttatgcagaaaatgaaagatgcagcatctgagtttttcaatct

SEQ ID NO: 127376 - DNA, 406 bp, Glycine max
  Clone ID: PAT_MRT3847_86025C.1
gccacacgtacgaaacaaaccaaagcgcagcttgggtatactgaggaggccaaagggggctaaacctgaaccccaacttgatgctaagtcatcggcacttactgagcctagcggaacatacgcatctaaacctataaccgatgcccaagggatgaacggcgcctgggaggttcaagagctctacgaacaccagccgttggatcaaagagtgcggatatgagagcgtattcaacgaccaagtaacgctcgaccgctattgccccgtgtgacaagacctgtagccatgccgctgggagattctacccgccgttcagtataacgctcgagacatttgctgattcatttgatacccaacgattgatattatcgccgcttatggaatgatctgtttgctatatagcatact

SEQ ID NO: 127377 - DNA, 175 bp, Glycine max
  Clone ID: PAT_MRT3847_86026C.1
tgggatagcatcatgagaaggctcagacaggagaaaagctggggtcattgacttgaagaaggagaaatatgagaagaatgcagctgtgtaaggagaacttgcgaaaggccagagccccaagtttatggagtttgctagcacagactcaagggagagcccaagcgatgtttttgat

SEQ ID NO: 127378 - DNA, 148 bp, Glycine max
  unsure (1)..(148): unsure at all n locations
  Clone ID: PAT_MRT3847_86027C.1
tcctctagatcggccgcccttgttgtggcttttttttaagagccaagagatgagtttcactatcgatcggagtcagcgnagcagcgggaaatacccactgctggcagngcattncagcatctttccaaaagaccagggacagggaaac

SEQ ID NO: 127379 - DNA, 629 bp, Glycine max
  unsure (1)..(629): unsure at all n locations
  Clone ID: PAT_MRT3847_86028C.1
ggcacaagtgagtttgttgatcgagatagactggagacagtgggatgaaaatgaaggtccttnttttcttcgttgctgcanttttgggagcatgggaatgccatgcgtacgatatgttccctctccgaatgaacactgggtatggggcccgtactccggaggggaaatgcgcaagttgtaggcttgctgggggagggacaacatctttnggtttnagaccattcctgaggagtgcggggaagcaacaaaggggtacatccatggggaacaatatagatcagactccaaaacaggtaaccaacaagcttacttttatgcgagagacctcgaagtccatcccaaggagcacatttgggttcaggatagatggcgccggactctctaatattccatactacaaaaaacatgggtgtggggtggagaaatttaactcnaccctgtgtatgaatgggtgaacaagggcgatgcgccggcgctggccgagactcttaagaattacaacaaggctggggggtcttgggttcaagagttatattcttgggagggaggaacactgggcaaacaggggcggaacagaagcaaacttaaaggaaggggtgggtaccacacatggggaaaaattaattctc

SEQ ID NO: 127380 - DNA, 712 bp, Glycine max
  unsure (1)..(712): unsure at all n locations
  Clone ID: PAT_MRT3847_86029C.1
ggcacaagtgagtttgttgatcgagagggggggagcagtgggatgaaaatgaaggtccttggtgtcttcgttgctacaattttgggagcatgggaatgccatgcgtacgatatgttccctctccgaatgaacactggctatggggcccatactccggaggtgaaatgcgcaanttggaggcttggggggggaggggacaacatctttgggtttnagaccattcctgaagagtgcgttgaagcaacaaaggagtacatccatggggaacaatatagatcactccaaaacagttaaccaacaagcttacttttatgccagagacctcgaagtccatcccaagggcacatttgggttcagtatagatgggaccgtactctctaatattccatactacaaaaaacatgggtatggggtggaggaaatttaactcgaccttgtatcatgagtggggtaacaagggcaatgcaccggcgctggccgagactcttaagaattacaacaaggtgggggggctcttgcttcaagattatattccttgggcaggaagaacactggacaaacagggccgtaacagaagcaaacttaaagaggggtggctaccacacatggggaaaaattaattctcaagggtccaccaagaaccttccactccaaaagcgggtttcataccaaacagcagcggagagaggaactgataagggggggtacaaca

SEQ ID NO: 127381 - DNA, 384 bp, Glycine max
  Clone ID: PAT_MRT3847_8602C.1
gaacaacgaaaacattcctaacaacctaatttcaactaatacaactaatatagctaattaatatcctgtaacactccaaatattacactgactatttatctttctaaaaagtgttttcaaactagtacataaaaatataagacatcgccacttttgtccttagaaaggaccaactatatacacgaagataagtttattgatttttgagagattactagtgacaatatcttaaaagactagctagtcttttcaaaattggggtaggcaaaataaactactgactatcatactcaagaataacaaattccaaaaggcgggtgaaagtgccaaagccaaagaagccatcacctgttgaccctactaatacttttttgtatttcatgc

SEQ ID NO: 127382 - DNA, 634 bp, Glycine max
  unsure (1)..(634): unsure at all n locations
  Clone ID: PAT_MRT3847_86030C.1
ggcacaagtgaggttgttgatcgagagancgcnaagcagtgggatgaaaatgaaggtccttgttttcttccttgctacaattttggtagcatggcgatgccatgcgtacgatatgttccctctccgaatgaacactggctatggggcccgtactccggaggggaaatgcgcaagttggaggcttgctgtgggggcacacaacatctttagctttgagaccattcctgaagagggcgggtgaagcaacaaaggagtacatccatggggaacaatatanatcagactccaaaacaggtaaccaacaagcttacttttatgccagagacctcgaagtccatcccaagggcgacatttgtggtcagtatagatgggaccggactctctaatattccatactacaaaaaacatggatgtggggggggagaaatttaactcnaccttggatgatgaatgggggaacaagggcaatgcaccgggactggccgagactcttaagaattacaacaaggctgggggggtcttggggttcaagattatattccttgggagggagaacactggacaaacaggggcggaacagaagcaaacttaaagaagggggggtaccacacatggggaaaaattaattctcaag

SEQ ID NO: 127383 - DNA, 718 bp, Glycine max
  unsure (1)..(718): unsure at all n locations
  Clone ID: PAT_MRT3847_86031C.1
gcacaagtgagtttgttgatcgagataactggggacagtgtgatgaaaatgaaggtccttgttttcttcgttgctacaattttgggagcatggcaatgccatgcgtacgatatgttccctctccgaatgaacactggctatggggcccgtactccggaggtgaaatgcgcaagttggaggcttgctgtggaagcacacaacatctttggctttgagaccattcctgaagagtgcgttgaagcaacaaaggaatacatccatggggaacaatatagatcagactccaaaacagttaaccaacaagcttacttttatgccagagagcctcgaagtccatcccaaggacacatgttgtgtgtcagtattagatggcgaccgtgactctctaatanttccactgactacaaaaaacagtggagtatggggggtgggagaannatttaactcgacccttgtatgagtgaatgggtgtaacaagggggcaatgcgaccggcacttgcccgagaactcttaagaattacaacaagcgtggggtcgtcttggcttcaagattatatttcttgggcaggaagaacactggacaaacaggggcggaacagaagcaaacttaaagaaggctgggtaccacacatggggagaaattaattctcaaggagccaacaagatccttccactccaaatggcggtttcatacaaaacagcagcgagagagaaact

SEQ ID NO: 127384 - DNA, 125 bp, Glycine max
  Clone ID: PAT_MRT3847_86032C.1
gtatggatcatggtgtagttggttgctatatataaatattactgtgtactactatcatttgtagatgatgctataaaaagcatgacattaataaattagtatatctcttcctcttcttaagaaaa

SEQ ID NO: 127385 - DNA, 404 bp, Glycine max
  Clone ID: PAT_MRT3847_86033C.1
aacaaacagtcggctgaaaatgtacgtccttgtattcttggctgctacaattttggtagggtggcaatggcatgcgtacgatatgatccgtctccggatgaacactggctatggtgcccgtacttcggaggtgaaacgcgcaagttggaggcttgctgcggaagcacacaacatatctgggtttgagaccatacctgaagagtgcgtagaagcaacaaaggaatacatgcatggcgaacaatatagatcagactccaaaacagataaccaacaagcttacttttatgccatagaccatcaagtccatcccaaggacacatttgtgctcagtatagatggcaccgtactctctaatattccatactacaaaaaacatggatatggggtggagaaattaactcgac

SEQ ID NO: 127386 - DNA, 553 bp, Glycine max
  Clone ID: PAT_MRT3847_86034C.1
gaaaatgaacgtccttgttttcttcgttgctacaattttggtagcatggcaatgccatgcgtacgatatgttccctctccgaatgaacactggctatggtgcccgtactccggaggtgaaatgcgcaagttggaggcttgctgtggaagcacacaatatatttggctttgagacccattctgaagagtgcgttgaagcaccacaggaatacatccatggcgaacaatatagatcagactccacaacaggtaaccaacaagcttacttttatgccagagacctcgaagtccatcccaaggacacatttgtggtcagtatatatggcaccgcactctataatattccatactacaaaaaacatggatatggggtggagaaatttaactcgaccttgtatgatgaatgcgctaacaagggctatgcaccggcactgcccgatactcttaagagatacaacaagctgatgtctcattggctcatgattatattcttgtcatgaagaacactggacgaatcagccgtagcagatgcatacttgaggatggctggctat

SEQ ID NO: 127387 - DNA, 311 bp, Glycine max
  Clone ID: PAT_MRT3847_86035C.1
gacatgtgagtttgtcgatcgagataactagaaggagtgggatgaaaatgaaggtccttgttttcttcgttgctacaattttggtagcatggcaatgccatgcgtacgatatgttccctctccgaatgaacactgactatggtgcccgtactcctgatgtgaaatgctcaagttggaggcttgctgttgaagcacagaacatctttgtctttgagaccattcctgattagtgcgttgaaacaacaaaggagtacatccatggtgaacactatagatcggactccaaatcagttaaccaacaagcttacttt

SEQ ID NO: 127388 - DNA, 631 bp, Glycine max
  unsure (1)..(631): unsure at all n locations
  Clone ID: PAT_MRT3847_86036C.1
ggcacaagtgagtttgttgatcgagataacgggaaacagtgtgatgaaaatgaaggtccttgttttcttcgttgctacaattttggtagcatggcaatgccatgcgtacgatatgttccctctccgaatgaacactggctatggtgcccgtactcncggaggtgaaatgcgcaanttggaggcttgctggggagggacacaacatctttggctttgagaccattcctgaagagcgcgttgaagcaacaaaggaatacatccatggcgaacaatatagatcagactccaaaacagttaaccaacaagcttacttttatgccagaaccttcgaagtccatcccaaggacacattttgtgttcagtatagatggcaccggactctctaatattccatactacaaaaaacatgggtgtggggggggaggaaatttaactcgaccttgtatgaggaaatgggttaacaagggcaatgcaccggcactgcccgagactcttaagaattacaacaggcgtggggctcttgggttcaagattataattcttgcaaggaagaacactgggacaacaggccggaacagaaagcaaacttaaagagaggctggctaccacacatggggaaanaattaattct

SEQ ID NO: 127389 - DNA, 400 bp, Glycine max
  unsure (1)..(400): unsure at all n locations
  Clone ID: PAT_MRT3847_86037C.1
acctcgaattttgcttctagagcttatagctaaaatcaaggtcacgaacataaatgtcctggtggtcttttttgctacgaggggggggcaccatggcaatgccatccttactatatgttccctctcctaatgaacactggctatggtgcccgtactccggaggtgaaatgcgcaaattggaggcttgctgtggaagcacacanncatctttggctttgagaccattcctgaagagtgcgtttaagcaacaaatgaatacatccatggggaacaatatatatcacactccaaaacagttaaccaacaagcttacttttatgccagagacctcgaagtccatcccaaggacacatttgtgttcagtatagatggcaccttactctctaatattccatactac

SEQ ID NO: 127390 - DNA, 644 bp, Glycine max
  unsure (1)..(644): unsure at all n locations
  Clone ID: PAT_MRT3847_86038C.1
cacaagtgagtttgttgatcgagataacgaggacagggggatgaaaatgaaggtccttgttttcttcgttgctcaattttgggagcatgggaatgccatgcgtacgatatgttccctctccgaatgaacactggctatggggcccgtactccggaggggaaatgcgcaagttggaggcttgctgtgggagggacaacatctttggctttgagaccattcctgaagagtgcgttgaagcaacaaaggagtacatccatggcgaacaatatagatcagactccaaaacagttaaccaacaagcttacttttatgccagagacctcgaagtccatcccaaggagcacattgggtgggtcagtatagatggcgaccgtgactctctaatnattccatanctacaaaaaacagtgggtatggggggtgggaggagaatttaactcgacccttggatgatgagatgggtgtaacaagggcaatgcgaccggcacttggccgagaactcttaagaattacaacaagcgtggtgtctcttggcttcaagatgtatattcttgtgaaggaagaacactggacaaacagggccggaacagaagcaaacttaaagaaggcgggctaccacacatggggaaaaattaattctcaag

SEQ ID NO: 127391 - DNA, 268 bp, Glycine max
  unsure (1)..(268): unsure at all n locations
  Clone ID: PAT_MRT3847_86039C.1
ctaaaanaacnaacaataanagnnctaaaacattcacagaaaannnaaatttttaattagttaataaatatcaaaaaatacatctaaaaactggctatcagaggaccgaatggttttacaagacatgaggcaaaccgatgcaaaatcaaatgcaggaatgaaggtgaatttcggcgaaaatgctgctcaggaaaacatccccccgtgaaagtcacaccgaactcaaggacctctggaacgtacaaggagaaaccaggtgtgcgctcgt

SEQ ID NO: 127392 - DNA, 270 bp, Glycine max
  unsure (1)..(270): unsure at all n locations
  Clone ID: PAT_MRT3847_8603C.1
gcttganaaccgaagtatcaactaatgtggntagtcnatgtgtnntttggtttgttaagtnactcacttcctggcaaagctgangccntgcttgatatattgccagaanaganaatccatggctgttgagaatgtgacagattgnatgttgatatctnttgcanaggaanctaatttganagannaggatgagattaattctgctggagangtgattganattgtgggatcatctgatnangtngtcaggtgaaacatntgaaggagtgt

SEQ ID NO: 127393 - DNA, 348 bp, Glycine max
  Clone ID: PAT_MRT3847_86040C.1
ggctcgaggatgtcaatcattgttctctggtttatggcacaaatggtcggatctattcaatctgtctctgtgtaaatacttcaactatggcaattctcaccttcgcatgttgaggcgcacacagacttttatgggctcaaagatgcactagaggaggagggagtcaccctggatccaagctcatgtctagagtagaagcctttagtagagagtcataaaaagctagaggctctacttcaacgggcgctcttaagcacaaatggactgcagaagacgaagcggcgctgagagctggagtactcacacatgcggcaggaaaatggcgcaccatactgacagatcctgagt

SEQ ID NO: 127394 - DNA, 730 bp, Glycine max
  Clone ID: PAT_MRT3847_86041C.1
tttttatatgtatatggggacagctgagtgcactgctattgatgcttttaagcatgctggggaaaatatggtgtttgcaagtggaagccctttcgaaaacgtagatcttggtaatggaattgtgggtcatgtaaatcaagcaaacaacatgtacctcttcccaggaattggtttgggaacccttctgtcaggtgctcaccttataacagatggaatgttgcaggcagctgctgaatggtatgatgttaatttggaaaattgtttcttttttattaaccaaaagccattggaactagcattaatggaagtttggcaagatgtcttctgacatttatagagtccaagcataattgaattcactgggctgctgtaatcatcgaactgtttgtccctgtctcatgtgttgcacaacatctttgctgttctctacatttccttcttttgaaatccattctatataggccctatgtgtttattttcttgtccagaaaacatgtgcactagttggtagtcacatgcacttgcaataggttttcaagtagtactatttatcttcggtgcatttctttaagttatatgatggaaattatattactaatttcatttgattaaattgcatcttcattctcaattttcccaattctgatgagatgtcaccactctcactagatgcttgttttcaagtaaattactaacatatatagatcattacagccttgcttcatacatg

SEQ ID NO: 127395 - DNA, 394 bp, Glycine max
  Clone ID: PAT_MRT3847_86042C.1
attaaattgcgactactacatcaattggaggcgtggaaataattacaagtgccaattaattaaacattgaaccacatgcataaccttgatacaactaaagagtggattacccaaaatgtgctcttttttacttgaaaatgtggatccacaccaattcaatgagcccagtgaaaaacaactttagtttgttcccacttatttatgaagcctttggaaaaaccttttgagacttattcaatttgctaagggcaccacaaaaaaaggcattgactggaataggcaactcaatcttgttattaacccctctggtaacaaacctcacatatattttttttcccaaatacacttaaaaaatagtttttttttttttaattcaaactcctaccttgtcaag

SEQ ID NO: 127396 - DNA, 645 bp, Glycine max
  Clone ID: PAT_MRT3847_86043C.1
ggggaagcaccagatgcacgtgagggtcatgatgcagcacttgttggcaaacgactatttatgtttggtggttgtgggagatctgctgataacattaatgaggtgtactacaatgacctttacatattgaatacagaattgttcgtttggaaccgtgctacaacatcaggcactccaccatctcctcgtgatggccatacttgctcatcttggagaaacaaaattattgtgataggtggggaagatgaaaatgattcttatctgtctgatgtccacatcctagatactgatactctaatctggagtaaactgtgtacgtcaggccaattgttgccacctcgagctggtcattctacagtttcttttggcatgaacttgtttgtttttgggggctttacggatgctcacaacctatacaacgacctgtatatgctcaacattgagacttgtgtgtggacgaaggtggcaactacacctaatggtccttctgctagattttctgtagctggtgactgtttagacccatatatgagtggtgttcttgtgtttgttggtggttgtaatagaaatctggaggccctggatgatatgtattacctatacacagggattgcacgggaaaatgaacagcgaacagagaagtta

SEQ ID NO: 127397 - DNA, 429 bp, Glycine max
  Clone ID: PAT_MRT3847_86044C.1
gtgatatcttctgaaatcaaaactgaacctttaccaacaacttttgagagtgtaccatctgctatctgaactgtagcgtgatcgtgacatgaagaatagttgtcaaaaacaggtgtgtctacagtcatgtgatctgaagctctagagtctacaatccaggattttcttttccctttggagatgtttaaagcatgtgaaaaattacctttctggacacttccattctatttcatcgtaggtatccaatcgctgccagtatctactcaaggtgttggaaaattcagtgactgatttttctccctgttgcaggtcatggagcaggctcttgatctcaaatatggctgaagtgttgtcaatatttgagtatgtctccttcaccgcatcccatatctcctttgtggggtcataatacatgaagttctccccaat

SEQ ID NO: 127398 - DNA, 125 bp, Glycine max
  Clone ID: PAT_MRT3847_86045C.1
ccgcgcgagttggttcggctatcgttaaacgtgcttgatcgtgcggttccgcgaagttctaagtcccgggtctgctgtatcaattcgaggctgcacatatataagtacagatcccaggtcaacag

SEQ ID NO: 127399 - DNA, 482 bp, Glycine max
  Clone ID: PAT_MRT3847_86046C.1
cccacgcgtccgcatttatctatcttggttctctctctcaatctaacgatttcgccattcaacagcgatctttccgtctccatcatcgtcatcaacgctcccatttcctaaacctcagagagggatccagctaacagttgtttcccgctgaaaagttgcttccccacagaactgtaaagcaaacgtgcgaaagccatttcagcacattaaatggcagttcacggtgacgatgaccctgtggtgatggtggatcccaacctctccccgcccaacacctacgaagctgtcgtcaacggtggcaccttcgaccgattgcacaatggccaccgcctcttactcactgcttcagcggagctggctaggtgccggattgtaattggagcttgtgacggacctatgctggcaaagaaaacagtatcggcgcatggaaattaaactctattgaaaatttcaactattggatattaagtttttctgttcca

SEQ ID NO: 127400 - DNA, 2678 bp, Glycine max
  unsure (1)..(2678): unsure at all n locations
  Clone ID: PAT_MRT3847_86047C.1
aggaatatgatctgattctggtgatatagtaatctcaatgttggaatcttctgaatggttgggaaccaccatcaccacgggatcatcatcaccgtgaacctccatttaatgtgctgaaatggctttcgcactaaagcagnaagtggtgtcggtaggtgtgagatgaaaagagtatcaggttcgttatatattgaactgaaccaatggttcgttagtggtgcttgtgttgctgcatctaaccgtttgctttactgtgctgtgggcaagccacttccaatacaattgtatagttaaaattctttttgggttgtttggtaaaaatgggttttgtttgtggctgcaactgcgtaataaggatgtcccggttgcagatggtgcatcagcagccctatcaagatcatagctgcgagaagacgacagaaggggaatgaattgaaaaggatctaattagacaatgactttatctcggactgtagatgagtgaacagcataaaagcacaacttgactgacatacgcaaccttcatagggaagaaagagaaaagatgggcaagaagcgaaactaaagataaacaaaattcaggaaaaaaaaaaaaaaacatggtggtgaaggtgtatggtccaacctatggatcccccaagagggtcctggtgtgtctgattgagaaggaaattgagtttgaaacagtgcatgttgatctcttcaagggagagaataaggaacctgagttccttaagctgcagccatttggatcccttcctgttattcaagacggtgattatactctctatgaatctcgtgcaataatcagatacttagctgagaagtataaagaccaagggactgacttattgggaaagacaatagaagaaaaaggtctagtggaacaatggcttgaagtggaagctcataactttcacccaccactctacaacttggttattaatgttctgtttgcgccattaacgggggctccttcggaccaaaaagtgatagaagaaagtgataaaaagattgagaaggtgctggatgtttatgaggagaggctgtcaaagagcaagtacttggctggtgacttcttcagccttgctgatcttagccacctcccatttggtcactatttggtgaaccaaaccgggagaggaaatttggtcagagacaggaagcatgtgagtgcttggtgggatgatattagtaacagacctgcttggcagaaggttcttcagctatataaataccctgtctagttagttcgatctaccccaacattccaagatggtgtgagggatgtgccttcagtgttttctgatacctgtttgagaatataatggaggctatctgcaagatgtggacctgtagtttttttttggatttggatcttttcctcttcttgaataataacattggatggtgaaaacataaatttaaaattattgagcagtgtgattagttgttgagtccattagttataacttgttatctaagaagcctcttgtgttgagaagtaataataaatatcagtatttacatgttataagataggtactaatcaatattttaagaaatgggatctatgatgacaatgatggagacggaaagatcgctgttgaatggcagaaatcgttagattgagagagtggggccaacctcgatgaatgtaaaattaagtttttgtatatctgacctatgaagtatggatgtatgttttacttaaaattgtcaagaaaaatttatattagcaagtaaaaaaacattttatcctaaaaacaatcactctttcaacctcctgtttcgagcaatcgtacctggttaccatatcagcaatccgggcaagctcatctgatatgtcaattttcaaattgcccctacctatgtttgtatccttgttaccatctgcatcttcaccaccttcaaacagccacgctactgattcccccacgcgtgggcatttaatatcagtgccattgttgccctttcatgagaaaatcccattgcctcaagctgttgagaaagtgcctcaagtttccttgacataagataaccagtacacctctcatgcaattcctgtgctcgcctttccttctgccgttgatgttttctctcattcttctggcggattttctctcgcttgtcattatcagctcctggtactgattccggtcgaacagaaacattagagcttttctctttatgttcttcggactcaccagaccaactaccattgttagaaacagaatcatactcaacaccagcaaccaatgagctgacaggatgttcatctgtctcatctatgttccgaaaacgaccattagaatgtattggtgaggtaggtgttggtgacatgtccagagtatggaatgttcctaataaggggttatatgcactggctggaactccagctgctacattaccagatcctgtaggctttgcagaagccttctgagcttccttgctaggcttcctgtctttagacttggatcgggatgcaggagacatccttaatactcaatggccctgaggtttagaaaatgggagcgttgatgacgatgatggagacggaaagatcgctgttgaatggcgaaatcgttagagagagagagaacgaagataaataaaaagagagataggtcggacgaaactgaatttgacagaaatggattttgagacctcgagccgaa

SEQ ID NO: 127401 - DNA, 976 bp, Glycine max
  Clone ID: PAT_MRT3847_86048C.1
acgtaagctcggaattcggctcgaggaagtagaggtcttaagagtttgagaactgagaagagatgggtggtgttgcatggacagaagaagaagatcacttgctcaagaaatgcatacaacaatatggagaaggaaagtggcatcgtgttcctttactggctggtttaaacaggtgccggaagagttgtaggctaagatggctgaactatctccgtcctaacatcaagagaggaaattttgcggaggaagaagtggaaatgataatcaaactccataaattactaggcaacagatggtcgttgattgcaggaaggctaccaggaaggactgccaatgatgtgaaaaactattggaactgtcatctgagcaaaaaactaaatgtaatagaagctgaagatagaccaataacaagagatgttcaagtcattaggccccagcctaggaacattgttggttcaagctcagtgaaaagaaggggtcaaaatgagtctccaactgacaaaggagttcaacaagagagtagcatgtcctcactgacgtttgatactgctgatggacagaaccatatgcttgattcacaacaagacaacaacatatatgcatgcctggaccaacagggcattgttagtgagttgtcaatggattttcagttcgaaggatttggagcaatgatgaatggggagggtagtagcagccaatgggattggggtgatttgctcttagacatggacttgtacaagtgaattaattttcttcttagttattgctcctgttgatgtggggatggcaatgttggtctcataccttggctacgtatcaatatcgaagttaagtgtttcgatggaaatggtagctaagttggttgtgtatcatgggtatgtcataatcataattaagatctagtgggtttcatcttttgacccctgtagatggtccatctcactaccatgagccatttataaaatcatcttcagtc

SEQ ID NO: 127402 - DNA, 1307 bp, Glycine max
  Clone ID: PAT_MRT3847_86049C.1
cccacgcgtccgctgaaattaaaagataagactaaaatcataaatttttaaaaaagtaaaaaacaaaatatctgaattaaaaaaattagaaaactaaaattataaattttcaaaatttagaaacaaaaacatgttggtgaaggtgtacggtccaacctatggagcccccaagagggtgctggtgtgtctgattgagaaggaaattgagtttgaaacagtacatattgatctcttcaagggagagaataaggaacctgagttcctaaagctgcagccatttggatcacttcctgttattcaagatggtgattatactctctatgcccttattgatgtgggtagttcaacttcaaacttttgatcaagaatgttatttgaattgtgagaatctcgtgcaataatcagatactttgcagagaagtataaagaccaagggacagacttgttgggaaagacaatagaagaaaaaggtctagtggaacaatggcttgaagtagaagctcataactttcacccaccactctacaatttggttattaatgttctgtttgccccattaacgggtgctccttctgaccaaaaagtgatagaagagagtgataaaaagattgagaaggtgctggatgtttatgaggagaggctgtcaaagagcaagtacttggctggtgactttttcagccttgctgatcttagccacctcccatttggtcactatttggtgaaccaaactgggagagggaatttggtccgagagaggaagcatgtgagtgcttggtgggatgatattagtaaccgaccagcttggcagaaggttcttcagctatacaaataccctgtgtagttagttctaccccaacattccaagatggtgtgagggatgtgccttcaatattttctaatacctgcttgagaataaattggaggctatctgcagatgtggacctgtagtttgtttttggatttggatctttttctcttcttgaataataacaatggatggtgaaaaacacaaatttaagagtattgagcattgtgattagttgttgggtccactagatataatctaagaagccgcttgtggtaagaagtaataataaatatcagtatttacatattataagtttggatcttgacatttatacaagagtatacattttgaaacttgtgcttgccgagtttggtgggggcaaccacacagttttggaagataagtttttgtatatttgacctatgaagtatggatgtatgttttacttaaaattgtcaagaaaaatttatattagcaagtaaaaaatcattttatcctt

SEQ ID NO: 127403 - DNA, 504 bp, Glycine max
  Clone ID: PAT_MRT3847_8604C.1
gattccgttccaaggaaggtttcccgtcatcactgtatgacgtcctccttctttgggggggggggggggaccaaaggccgtggtgggagagagtaggcccatttagagagaaggaggctagatattatctccgaggggttgaggaagacgctggcgaagcccaccgaagagagaacgaattaaataaatgagaacgggcggatagagagagggatagcacgtgacgaccgtcataggaagcgtggcggtatgaagtaagatggcataggggcgcccaggctgcagtgagaaggtcgcgacggcaaccgatgtgttgtcaaaataatggtagaattagtatcaaaattagttaggttggcagttagcacggcttaaaaaactttatttctatcccggtttttatgatgagtatgatgcgagagcctaggagataggggctgtaacgaaggcgtttgggtaattatgtgagagcatggtaaacgatggcttaaatgcattaataat

SEQ ID NO: 127404 - DNA, 1231 bp, Glycine max
  Clone ID: PAT_MRT3847_86050C.1
acaataaaataactactttaaaaggtttatttcttttagagaaaatataaatataaatacaacagatttctctaaacaaactaataatgttcttttgttgcgtgcgttgaaaaaaaaaacgatacatcgttccaatgttttttctaaagaatgtgacttgcgccttttaaactttgaaacaatgccataacatgcaaccacatgtcagttagttgctttaatggacatcttaatctcatctttgaagaaatattttaagagaaaaaagttacacaaattgtctgtaactaagtttccgatatcgtgttttgttgtttagccttttcagcctcaatcttccgtagcattgatgaactcagcttaatttcacctgattctccagagaccaaatctacaacttcaatcttcaactgtgaaaggcctctttcagctcttcttctgtttatagccaatcctcccggtaatgtctctttgcttacaatcacagcctccaagttttcatctgtaatggaagggccaaatggatctgtgattggcacagcttgcacttccaactccggcttgatagactttatgaaagttttgacattatttatcctttcctcaatgggctgtatcagttcagcaaactgtttttttgccagcataggtccatcgcaaactccaattacaatccggcgccttgccaactccgctgaagcagtgaggaagaggcggtggccattgtgcaatcggtcgaaggtgccaccgttgacgacagcttcgtaggtgttgggcggggagaggttgggaaccaccatcaccacagggtcatcgtcaccgtgaactgccatttaatgtgctgaaatggctttcgcactaagcaggaagtggtggcagtaggtgtgagatgaaaagagtatcggattcgttatatattgaactgaaccaatggttcgttagtggtgcttgtgttggtgcatctaaccgtttgctttacagttctgtggggaagcaacttttcagcgggaaacaactgttagctggatccctctctgaggtttaggaaatgggagcgttgatgacgatgatggagacggaaagatcgctgttgaatggcgaaatcgttagattgagagagagaaccaagatagataaatgtagaatttttcgaggcttatccccttctgtcgtcttctcgcacccgtacggacgcgtggcggacgcgtgggcggacgcgtgggtcgagccg

SEQ ID NO: 127405 - DNA, 717 bp, Glycine max
  Clone ID: PAT_MRT3847_86051C.1
agcagccgaggtccagcgccagcttcaccgacgaccagtcgtgcacggcggagacgatgcgctgcgccatgtcgaagtgcagcggcaccgacgagtagaagaagttcgccgccgcgaagaagaggcacagcgcggagagcgccgtcaccgagccggtgattccggccgcgaatctcgccgtgcctccgccagcgccggaaaagatcctctcgaaaaagttacacacaagatcgaagtaaagaagatacaaaacagacaacactgaaaacagcatcgcctgacacaagaggaaaattagggtctgccattgctccattccgtagatcgcgtacatctgcgtccagtctctgttattattcgtcgattttcccatccgcttcttccagaaccttctcttcacgctttggtttgctcaattcaccgcttcagcgagtcgctgaataacagaaacgtcgatgatttttcagcgcgtacagtttgagaatacgtgtttctttttttttcttccattacgaacgcgttttgcttcgtcgtttatcgttcttttcaaaaacggccaggttatactgcgtttcactttcttctctctttcatctttgtctctgagtggcgaaagagggagtggaaaatgtgcactctatcatctttgtctctgagtatcagtgcacggatttcgagagaggcgaaagagggagtggaaaatatgaatgaatgaac

SEQ ID NO: 127406 - DNA, 243 bp, Glycine max
  Clone ID: PAT_MRT3847_86052C.1
ccttaagttcgcaattcgtttcgagttaaaattctttttccagaccttccactctcacccattgggaacgataactatctctcgtgttgaacggcttcaaaaagctgatctgcctacacaatcttcagattaaaccgaatcgaaatcgcatgattgttggcactctccctggcttaaaccagattatgaacttacctggtgccatcactttgtaagtggatgccaatgagaaaaatgacatac

SEQ ID NO: 127407 - DNA, 397 bp, Glycine max
  unsure (1)..(397): unsure at all n locations
  Clone ID: PAT_MRT3847_86053C.1
ggctaaagatgttgaggttcaagagcaaggaggagagtactctgcaaaagactaccatgaccctcctccaacacccttgttcaacccagaagagctcacacagtaatccttttatagagccctaatcactaaattcatagcaacccttctcttcctttatatcaccatactcaccattattatctacaaagaacagactaataccacactagataacaccaantataataaaattaacattttaaacatcacttaaacctttaataacataatcttcatccttatttactacaccaccgatatttcagaaaaacacataaacccaacaataacattcgaactattcctaagacacgaaatttcgttgataanaacattattttacatgatatcacac

SEQ ID NO: 127408 - DNA, 713 bp, Glycine max
  unsure (1)..(713): unsure at all n locations
  Clone ID: PAT_MRT3847_86054C.1
gcacaagtgagtttgttgatcgagataagtgtgagcagtgtgatgaaaatgaaggtccttgttttcttcgttgctacaattttggtagcatggcaatgccatgcgtacgatatgttccctctccgaatgaacactggctatggtgcccgtactccggaggtgaaatgcgcaagttggaggcttgctgtggaggcacacaacatctttggctttgagaccattcctgaagagtgcgttgaagcaacaaaggaatacatccatggcgaacaatatagatcagactccaaaacagttaaccaacaagcttacttttatgccagagacctcgaagtccatcccaaggacgacatttgtgttcagtatagatggcaccgtactctctaatattccatactacaaaaaacatgggtgtgggggtgggaggagaatttaactcggaccttgtatgatgaaatggggttaacaagggggcaatgcgaccggcgactgcccnganggactcttaagaattacaacaaggctggggtggcgtcttgggtttcaagattataattctttggcagggaggaacactgggagcaaacaggcgcggaacaggaagcaaacctaaaaggaaggctgggctaccacacatggggaaaaaattaattctcaaagggtcccccaagaatcctttccactccaaaatgcgagtttcatacaaaaacagcagc

SEQ ID NO: 127409 - DNA, 611 bp, Glycine max
  Clone ID: PAT_MRT3847_86055C.1
tgaaacaagtgagtttgttgatgcgagacgacgtgagacagtgtgatgagaatgagggtccctgttttcttcgttgctacaattttggtagcctggcaatgccactgcgtacactatgttcccttctccgaatgaagcactggctacggtgcccgtacctccggaggtgaaatgcgcaagttggaggcttgctgtggaagcacacaatatctttggctttgagaccattcctgaagagtgcgttgaagcaacaaaggaatacatccatggcgaacaatatagatcagactccaaaacagttaaccaacaagcttacttttatgccagaaccttcgaagtcatcccaagacacatttgtgttcagtatagatggcaccgtactctctaatattccatactacaaaaaacatggatgatggggtgggagaaatttaactcgaccttgtatgatgaatgggttaacaagggcaatgcaccggcactgcccgagactcttaagaattacagcaagctggtgtctcttggcttcaagattatattcttgtcaggaagaacactggacaaacaggccgtaacagaagcaaacttaaagaaagctggctaccacacat

SEQ ID NO: 127410 - DNA, 412 bp, Glycine max
  Clone ID: PAT_MRT3847_86056C.1
ctcgagccgattcggctcgagagcctctctgtcattttcaccttactgttttctatctctgcacgaacgacacagattgagcccttaaacgacaatggcgttgggacagtgccgtttcttcctttggtgactgatgatgctacgcgtcgtcatcgttgacggaggtcgcatggggttgaattttgtgcggccgtttgcattgtgatcaattaatcataatgaggaaagaggtttgtttgattttgtgattgaaatctaacgagaaagatagagagatatttgttgtgattgctaaattacagtcttcttaatgtcgacataattatcgtttctattactgttaatcgacttattgtcccgtttcttgtcttttacttttctatttctttttttttatattttctttttaatt

SEQ ID NO: 127411 - DNA, 667 bp, Glycine max
  Clone ID: PAT_MRT3847_86057C.1
ccaaaacaaaaattcttgtaaaattcttgtaatgtgactcactatttttttaccacatgaagaccaccgaaggggacggttcatttgaaaattctgctggcgctctcgcgctcacgtttgtttgtttctcgttttcgcaatctcgatcttttctctctgaaacatgtattcgagtgcaagccagtttgacggcaatgcagccttctccggtggtggattcatgccttctcagaccacccagggccctgactcttcattcgttccctccaagaatcgtgacgctcagtccttgcttcctctgacggtgaagcagatatacgatgcgtctcagtcaagtgatgataaaatcaatttgatcattgacggtgtggacgttaccaatgtcactcttgtaggaagggtgtccaacaaagctggacgaattactgatgttacttttgtgcttgatgatggtacgggaaggattgagtgtaataaatggcttcatgaagctgttgatacaaatgaagcagaggctatcttggaaggaatgtatgcgaggctccatggacaattgaaacattttcagggtaaaaggaccttaaatgttttctcatttaggcctgtgactgactgtaatgagattgctagtcatttcaccgactgcatatatgtgcatctctacaat

SEQ ID NO: 127412 - DNA, 678 bp, Glycine max
  unsure (1)..(678): unsure at all n locations
  Clone ID: PAT_MRT3847_86058C.1
gcacaagtgagtttgttgatcgagataggtggagacagggtgatgaaaatgaaggtccttgttttcttcgttgctacaattttggtagcatggcaatgccatgcgtacgatatgttccctctccgaatgaacactggctatggggcccgtactccggaggggaaatgcgcaagttggaggcttgctggggggggacacaacatctttggctttgagaccattcctgaagagggcgttgaagcaacaaaggaatacatccatggggaacaatatagatcagactccaaaacagttaaccaacaagcttacttttatgccagagacctcgaagtccatcccaagggcancatttggtgttcagtataagatggcanccgtacttctctaatnnattccatacttacaaaaaacnatgggtgatgggggtggggagaaaatttaactcngaccttngtatggatgaatggggtgtaacaaggggcaatggcaccgggcacttgcccggagactccttaaggaattacaacaagcgtgggggtgctcttggcgttcaagattatatttcttgggcagggaagaacaactggacaaacagggccgtaacagaagcaaacttaaaggaggctggctaccacacatggggaaaaattaattctcaagggtccaccaagatccttc

SEQ ID NO: 127413 - DNA, 493 bp, Glycine max
  Clone ID: PAT_MRT3847_86059C.1
gaaaatgaaagtccttgttttcttcgttgctacaattttggtagcatggcaatgccatgcgtacgatttgttccctctccgaatgaacactggctatggtgcccgtactctggaagtgaaatgctcaagttggaggcttgctgtggaagcacacaacatctttggctttgagaccattcctgaagagtgcgtagaagctacaaataaatacatccatggtgaacaatatatatcaaactccaaaacagttaaccaacaagcttacttttatgccagagacctcgaagtccatcccaaggacacatttgtgttcattatatatggctccgttctctctattattccattctacaaaatacatggatatggggtggagaaatttaatctcatcttgttcgattaatggattatcaagggctatgctcctgttctgtcctatactcttattaattactacaatctggtgtattctagatttcgatatgttattctc

SEQ ID NO: 127414 - DNA, 483 bp, Glycine max
  unsure (1)..(483): unsure at all n locations
  Clone ID: PAT_MRT3847_8605C.1
gacccagcggccganccattttggcgcacngcacgncggggcgccgcaaacaganaccgcaaaagaagaaaagagggaacacacggnagggcggaagcccgggggagaagcgnngcagacancacggcnaanccaagagcgacacgcgcccncaagcagggcccaaccggacgacggaggacaggnngcgnaacgggcggcaacccnacgccgttttttgtgcgcggngcnnngccctctgaaggnggnagcccgggagacgagcccagcctagcaggtgggggccccgcaggcctcaagcttcctcttaactgccggtggccgttactacgcgcaagctacctcgggggcaaaacaacaaaaacaaacactggctgactggataagaacacctgggcctcacccacgactggccgcgcactaaaacgacgcccaaaaccaagagggggcccactggcggagccaacggccaaaaagacgacg

SEQ ID NO: 127415 - DNA, 438 bp, Glycine max
  Clone ID: PAT_MRT3847_86060C.1
tccgtacgggctgcgagaagacaacaaaagggggcacaagtgagtttgttgatcgagataaccagaaacagtgtgatgaaaatgaaggtccttgttttcttcgttgctacaattttggtagcatggcaatgccatgcgtacgatatgttccctctccgaatgaacactggctatggtgcccgtactccgaaggtgaattgcccaagttggaggcttgcttggaaaccacacaacattttggtcttgagacacaattctgagaagagcgcggaagccacaaagggatacattcatggcgaacactatagatcagactccaaaacagttgaccaacaagcttacttttatgccagagaccccgaagtccattccaaggacacatttttgttcagtatagatggcaccggactctctaatatttcatactacaaaaaacat

SEQ ID NO: 127416 - DNA, 348 bp, Glycine max
  Clone ID: PAT_MRT3847_86061C.1
tctgtgcttactttttcttcttcatctaaatgtttccgagcttgccaaggttatctgcatttggtgagcctgttccttttttttttggtgaagttggtgagcttgtttcctagtgtttagctaaccaaactttagctgttattaattgatgccacacaaaactttggtgtctaagaaattaatgttaatattattttaagttgttgattttacaatcatctgatgcagcgcagactgaaatttagagctttgtgcataaataatcatggaaaatgtgtaatactataaatacttgtggatattcatttaaaagtgtattgacttaaaagtcttctgaatgccaggaga

SEQ ID NO: 127417 - DNA, 505 bp, Glycine max
  Clone ID: PAT_MRT3847_86062C.1
ttttcattttttttttttttttttctttttcttcttttcacttgggtttttgggggtattaatttttttttctcccgcggcgccagattgtcaaaaccacacaaaaatcttcaccggggcatgcgctgcccgaccactcggggcctccgtgcccccgtacgcaaacatgggccataacccgggggacaaaaaaaccgcccccgccccaaagagcggggtggcccccatgacggtcgacaaaacccagagcgcccccaaactcccccacaatcttcccccacacggaaaaaccggcaaagggtttcggacccgcccacctcccgggggaataacccccaccccgggggaatacccccaggggctctccgggggccccccccccccacattgcaaacccacccccccccaaaaggccccatcgcgggaaacgctcccccccccccccctcccagggggcccttcagggtaaaggggggaaacaaaaaaaaatcacgtttcccccggg

SEQ ID NO: 127418 - DNA, 251 bp, Glycine max
  Clone ID: PAT_MRT3847_86063C.1
gaattttcctctttttctgtcctaaccatcatgcccggtaatggtttcccttggaactcgtaagattttcaaccacattcaataatggcacgtttaataatttccttttccggtaaaaaatcaattttggaaagttttaaactgaaaattaagaatgccaattaaagtcacatgaagtacatttgattaaattggaaatgttcaataagtattgggaatgaattgtccctcctggtggtcctctctgctgg

SEQ ID NO: 127419 - DNA, 393 bp, Glycine max
  Clone ID: PAT_MRT3847_86064C.1
gcacaagtgagtttgttgatcgagataactaggagcaatgttattaaaatggagggtcttggtttcttcggtgctaccaatttggtagcattgcaatgccattcgtaccatatggtccctttttcaatggacacttgctatggtggccgtacctccgaagttgaatgcgccaagttgaagcttgctgtggaagcacacaacatctttggctttgagaccattcctgaagagtgcgttgaagcaacataggaatacatccatggcgaacaatatagatcagactccaaaacagttaaccaacaagcttacttttatgccagagacctcgaagtccatcccaaggacacatttgtgttcagtttagatggcaccctactctctaaatattcatac

SEQ ID NO: 127420 - DNA, 354 bp, Glycine max
  Clone ID: PAT_MRT3847_86065C.1
aggggcacaagtgagtttggtgatcgagataactagaaacaatgtgatgaaaatgaaaggccttggtttcctcggtgccacaattttgggaacaagggaatgccaagcgtacgaaaagttccctcccccaatgaacaatgggtaaggggcccgttatcccgaaggtaaatgcccaagtttgaaggcttccgttgaaacaaaaaacaaccttgggctttgaaacaatccttaaaaattgcgttgaagcaccaaaggaatacatcaatggcgaacaatataaatcagactccaaaacagttaaccaacaagcttacttttatgccagagacctcgaagtccatcccaaggacacat

SEQ ID NO: 127421 - DNA, 535 bp, Glycine max
  Clone ID: PAT_MRT3847_86066C.1
tccgaaattcccgggtcgacccacgcgcccgatcgattaactagaatcagtgtgatgacaatgaaggtccttgatctcttcgatggtacattctggtagcatggcaatgccatgcgtacgatatgatccctctccgaatgaacactggctatggtgcccgcactccggaggtgaatagcgcaagttggaggcttgctgaggaagcacacaacatctttcactatgaaaccattcctgaagagcgcgttgacgcaccaaaggaatacatccatgccgaacaatatagatcagactccacaacagctaaccaacaagctcacttttatgccagagactctcgaagtccatcccaaggacacatttatggtcagtatagatggcaccgtactctctaatactccatactacaaaatacacggatatggcgtggagtaaatctaacctcgatcctgaatgatgatatggcttaacaaggccaatgcacccgcactgcccgagactcttacgcattaccacaagccgggtgcatcttggc

SEQ ID NO: 127422 - DNA, 696 bp, Glycine max
  Clone ID: PAT_MRT3847_86067C.1
agcacaagtgagtttgttgatcgagataacgagaaacagtgtgatgaaaatgaaggtccttgttttcttcgttgctacaattttggtagcatggcaatgccatgcgtacgatatgttccctctccgaatgaacactggctatggtgcccgtactccggaaggtgaaagcccaaattgggaggcttgctgtggaagcacacaacatctttggctttgagaacattcctgaagagtgcgttgaagcaacaaaggaatacatccatggcgaacaatatagatcagactccaaaacagttaaccaacaagcttacttttatgccagagacctcgaagtccatcccaaggacacatttttgtgtgtcagtataagatggcacccgtactctctaatattccatactacaaaaaacatggattggggggtgggagaaatttaactcgaccttggatgatgaatggggttaacaaggggcaatgcaccggcactgcccgagactcttaagaattacaacaagccttggggctctttggcttcaaaattattattctttggcaaggaagaacactggacaaacaggcgcgtaacagaagcaaacttaaaggaaggctggctaccacaccatgggaaaaaataattctcaagggacccccaagatccttccactccaaatgcgagttcatacaaaaagcagcgag

SEQ ID NO: 127423 - DNA, 334 bp, Glycine max
  Clone ID: PAT_MRT3847_86068C.1
acgtaagcttggtattcggctcgagcggtctacaaccgtactttttttagcggcacgacaactggtgcacgcgcggcagattttaacaaatggccatgggctttactggacgataactcgggctgcgactacatgtggactaacggaaaaggtacatggactacgttgacgaaactgccatgaacaaagagatcagggacagagcaaatatcacatgacagcaaaaacgccacaagacactgcgatctgaagcaaagtcaacgagaacaaggacaagggcaatcaatagcgacgacgtcatactgggctaacaggggacgagagcgtgaacacg

SEQ ID NO: 127424 - DNA, 246 bp, Glycine max
  Clone ID: PAT_MRT3847_86069C.1
gtgcatgcttgagtttgcaaaagtatcccgaagtctgtcttcttttaaattgagtttcgagcaaaatttgattttcaaacatacttttaaacggttatcaaattttattttcaaacatactttggaagggtaatcaatcttttatttcaaacctattttaccgtcaaacatttgaaggggggcaccaaaaatcccaccctaccctccttctgggcttaggcttacatttacaaacagtatttgcaa

SEQ ID NO: 127425 - DNA, 439 bp, Glycine max
  Clone ID: PAT_MRT3847_8606C.1
ttgtatacaacgcaagggccgccctctaaagagggggttcttgaaaaaatgaacacaaattattgatcggatcatgtgcgacaaactactggacccaatactaggagtcctcccaccaaggcaatacaagccaaagtgatgataactgacaggaaatatccctaaccagaaacgcaatttagttcctttttgacccatacacttctattcactggagtgggccggctacggctactgtatggagcaaacaaaggggtcgccccgggccaatgcccgaaccaccacccttgttttgtgtcgaaaatccttacccaacccggaaaagggcgcggatcctcagttcaccatgcaaggagttactccaaccccgcccggttgggtctgacataacacccccaccccctttgagggctaacacgcgccaccttaacttcaaaaa

SEQ ID NO: 127426 - DNA, 666 bp, Glycine max
  Clone ID: PAT_MRT3847_86070C.1
cgaattcgagctcggtacccggggatcctctagagtcgacctgcagctgtaattgttcatatgacatcttatcttggctggtgcatggtgacactccgatcttttcgtggacataacgctggacattcatgtgcatcaactttcagcctctcacttcatgtgactaagttgcttactgtaggtaacaagagtcttagccaatctgttataactcagtagagctaaccactacactacacacatgttcttctcattgaacatctactggctctctccttctatcatacatagactgttatgtctatccagggatgcaaatatgttctctcgaatcattttcacttattaggtaatttgtagtggcatttcaagctcgagacgtgctacgttctcatcatcgtaccaacaaagaggagtatattacttacgcccatattgagctccaaacggtgccctaccaatgctcgcttggtaggtgtagttgtaagataagacaatcaatgacaaacatgcgattcaacttccttgttgctctatactgcactcccagcgacaatactatagaggctgaatggtatactcaatatgaccattacgcaaggggatgataagctgaatcgatgcccttctttctcgacatcgctttatgcaaacttgtccaaaatc

SEQ ID NO: 127427 - DNA, 572 bp, Glycine max
  Clone ID: PAT_MRT3847_86071C.1
accgctcaattaccggggcggggcacgccttcggccaagggttccttccggttgcaaaaaaccacctaaaggggccccaagtaattttgtgggcggggttactagaaacaggggggtgaaaattaaaggccctggtttctttcgtgctacaattttggtagcatggcaattccattcgtacgatattttccctcttcgaatgaacactggctattgtgcccgtactccggaggtgaaatgcgcaagttggaggcttgctgtggaagcacacaacatctttggctttgagaccattcctgaagagtgcgttgaagcaacaaaggaatacatccatggcgaacaatatagatcagactccaaaacagttaaccaacaagcttacttttatgccagagaccttgaagtccataccaaggtcacatttgtgttcagtatacatggcaccgtactttcttatattctattctacatataacatttatctttggttggagcaatttacttttccctttttgaggcaaggtttatcttggtaatatacatttattattcccattgaatttattctatat

SEQ ID NO: 127428 - DNA, 620 bp, Glycine max
  Clone ID: PAT_MRT3847_86072C.1
ttggtctttttcttttccttctcctagggatgagccagcacgctcttaatcttcttattgggctctagctcgagccgaatcggctcgagcaatacctctttcaaactctctttgctatggctctctcaaagcttctagttgcatcccttctggtatcctttgtcctcttccatctcgttgatgctgatgatcaatcggcatacgcacagactcagggttctcttgttcagcagatagattgtaatgctgcatgtgctgcgaggtgccgtttagcatctcgtcagcgcatgtgccacagagcgtgtggaacttgctgcagacgctgcaactgcgtgccaccgggaacttccggtaaccaagaagtgtgtccctgttatgccagtctcagaacccacgggggcagacgcaagtgcccttaattagggtgtgataccttccaacccatgcaagttattacatatacagataaaattgtcagtgttgttccaagactactagcgttggtggaaaataaacctgtatgttttcaatgcatgttgagtcgttgcgagaatttgtgagtgttatgctttctctttatcgcctgttgtatcgatcatcaaacttatataataataaag

SEQ ID NO: 127429 - DNA, 466 bp, Glycine max
  Clone ID: PAT_MRT3847_86073C.1
atctcaccaagactcgtatgacgtcatgattgatccactaatggacaaggagctattgctgtctctgtcaaatagtttcaaattgctaacttcatgtaatcttctgtctgtaattctggaagctgcccttcagtatatgcaaacagatacactacctaaatcagcagaaagaaaagggtgcattgtggataaatttgttaacattttgatttgggaattaagtaatatgattgagcggatgcttttacatagtccagagcacaggtcttgcgcagttggccttcttcttcctatcattctcaaagcattacctgccaatggctcattcgaaatctcaattcgggggcagaaacatgggttttctcgggagtatttctttatcaaactctggaactgctgcagaacactgtgttcaattggacctttaaaaaaaagggcggcctatactatactatctctggaattc

SEQ ID NO: 127430 - DNA, 684 bp, Glycine max
  unsure (1)..(684): unsure at all n locations
  Clone ID: PAT_MRT3847_86074C.1
cccctcactactccatgtgacctcattgatcactttctgcgatccaatgattcccttgcttcgcttcactctctctcccacatcatagaaaacccttcaattacaatgaacaattacccttttggatcccaagcccccaagtccttccccgcttacccaagaaccgaattcgacttagaatcaggaaccgccataaaacgaacccgaaagccgaaaaattcgccctttcaccttctcagaatgatcaaatcatttgggaaccgtttccatcacttcttcaagcttcaccctctaatgggtctcttcctagccttgtcctttttgctcacacttgtcatgattctctccttgtatggaacccaatatggggtgcagagtggtggttatgtgaaatctgacatgggctttgatgattaccctttttcaaagcttcagaaccttgtgatggttgctgggcattccatttacactagcagtagtaggggaaaaatgagtaggaagattcttttttttttacggattaagatgagattattacttaccattacttccnggaccaacggctttgctatagtggcgtgtttggaacatatctccaattaaattnttgttttttnttcaatgcttgannggnnnanttttcctctgttcagaccagttaacattttaaaaccaatttgttgt

SEQ ID NO: 127431 - DNA, 405 bp, Glycine max
  Clone ID: PAT_MRT3847_86075C.1
ccaaaaaaagagaaaaccccttttaagggggggggaaaaaaaaaaaaagggacttgaacccacaaagaatgaaacccctttttgggggaacccaaaaaacaagggggggggatcgggccgggtgaacacaaaattttggaaagggaaaacccccttctttattaaaaaagggggggggaaacaccatttttgaagaacaaaacctaaccctgcccttagaagggggggcccccccgagattggggccccaaaggaaaaattgtttcttgggggggggtaaacacccggaaaaaggtcccaaaacctgggggggaaccccttacgcaaaaggcgaaaaccctttgggccgtaaaaccctccccagggcggttaaaaaagaaaaccctcttgtggggcccccccttt

SEQ ID NO: 127432 - DNA, 315 bp, Glycine max
  Clone ID: PAT_MRT3847_86076C.1
acgctttttgctttcgggaaaaagatggattgaaatgggtacaagaggaatttctaacagtttgggcaacttaggtgcgaactacaacaactttgttggatgatgggtgtacaatattgtatgctatggtgcaagatatattacatgtcacaatagcatgtgattttgatattggagttaatgtgacaaccaataacaatttgtgtgtatatgggcttaatcatggtatttcaggagttcagtttttaggcgccattggttagtgcatttagcaagcaaactgtttggaattaaatgggaacagggaggacacca

SEQ ID NO: 127433 - DNA, 450 bp, Glycine max
  Clone ID: PAT_MRT3847_86077C.1
aaaggaaaaaatccttaaacataccttttttaaaattcaaacaaatgaattttttggacaagtaggaaacaatgggcatggaatttttttatatgcaaatgtggggggacaaaggaataaaagggggggggggaacaaaactaaaactacggttttacacaatacaaaaacttttgtttccatcaattacccttgcttaaaaagcaagggcaaaaaaaattgtttagtcaatatgacccagtttcatgaaagcaaagtcccttgggagtaaattaacatggggccccttccaatgaacaattgaaaaaactgatgctttgtcactaaaaaaaaaactttttttgggctttacatggttttccttcaacttttaaaccgaattatttgcattggtctgggtgctaacaaaccctttttgagccctacacatttgaaactttaacttaaacc

SEQ ID NO: 127434 - DNA, 301 bp, Glycine max
  Clone ID: PAT_MRT3847_86078C.1
atgagatcggggatctatgtaacaaagaactatatatgctgcttccatatctgatatagaatccttaaccatgacttttgctcttcaaagatagaaggtgaagagctctgtactacttaatttaataccttctccagaacatagacgctttcattctaacatgaaacatggattacaaatcatggtactcaggcctcaaacaaccctttccattcttaatgaatgctctgaagcaagttttggggaactattaccctatgcctggaaaattggacgttatgtcacaaggcaactgatcata

SEQ ID NO: 127435 - DNA, 205 bp, Glycine max
  Clone ID: PAT_MRT3847_86079C.1
ggctgcgactgcacgggatgatgaggactgcagtggcgacgacgccgctgtcgcttctcgactggtctgctccttgcatttctgtccgttctgctgcctttgctcctctgttgtccgtggtctggtcccttcctgctcggcctctctcttgcttccccctactctctccctggtccctccgtcccttgcctgtccttccgccccg

SEQ ID NO: 127436 - DNA, 253 bp, Glycine max
  Clone ID: PAT_MRT3847_8607C.1
ggccgtcaccaacaccgcgtccggcttagtggaacaacgattattatcaaggccgagcgactcttatcgggaggaactaagaggagcgtggtgtaacatctcgacacacccgaaagtggatcagtcccccctgggcccgaaccgctttggatgccacaccttctacaaactctctaacatccgcgaccaccggaaattcatgagcccgcctactcacgagtaggtaccagacttgaggacgaaataccttatg

SEQ ID NO: 127437 - DNA, 394 bp, Glycine max
  Clone ID: PAT_MRT3847_86080C.1
aggggtgcacaagtgaatttggggatcgggataactagaaaccgtgttattaaaattaaagtccttggtttctttggtggtaccatttttggaacctgggaattcccttccttccaaattgttccttttccaattgaccttgctttgtgccctcctccgaggtgaaatcccaggttgaagctgctggtgagcaccacacatttttggctttgagaccattcctgaagagtgcgttgaagcaacaaaggaatacatccatggcgaacaatatagatcagactccaaaacagttaaccaacaagcttacttttatgccagagacctcgaagtccatcccaaggacacattttgtgtcagtatagatggcaccgtactctctaatattccatactac

SEQ ID NO: 127438 - DNA, 1076 bp, Glycine max
  Clone ID: PAT_MRT3847_86081C.1
aaaagacgacaagaagggggaaaagttaatttggtgattgaaattactaaaaacaatgtgatgaaaatgaaaggccctggtttcctccgtggcaaaaattttggaaccatggcattgccatgcttacaaaagtttccctctccgaatgaacactggctatggtgcccgtactccggaggtgaaatgcgcaagttggaggcttgctgtggaagcacacaacatctttggctttgagaccattcctgaagagtgcgttgaagcaacaaaggaatacatccatggcgaacaatatagatcagactccaaaacagttaaccaacaagcttacttttatgccagagacctcgaagtccatcccaaggacacatttgtgttcagtatagatggcaccgtactctctaatattccatactacaaaaaacatggatatggggtggagaaatttaactcgaccttgtatgatgaatgggttaacaagggcaatgcaccggcactgcccgagactcttaagaattacaacaagctggtgtctcttggcttcaagattatattcttgtcaggaagaacactggacaaacaggccgtaacagaagcaaacttaaagaaggctggctaccacacatgggaaaaattaattctcaaggatccacaagatccttccactccaaatgcagtttcatacaaaacagcagcgagagagaaactgataaggcagggatacaacattgttgggatcattggagaccaatggagcgatctcctcggaggccacagaggcgaaagcaggacctttaagcttcctaatcccctgtactacattcagtagttccttcacctctcaacaatctagcttgctcctatctatctatatgtaataagatgcgttcaaataggggcactagcttcactttatgttgttatagctgtgtgtcaacaagtcatgtaagagacttcactattgcggtttctctttcgtggctataataaattatgcgcccttgttccataaaaaaaaacattcacgtgggagaataaaaaaaaaacgcatatggaatggaaagaaaattacagaagcg

SEQ ID NO: 127439 - DNA, 1564 bp, Glycine max
  Clone ID: PAT_MRT3847_86082C.1
tacttcccaagctgggcgagcgagttggacttggcacggaaaagaagtgcatcttgtgccgccttcacattctctgggcggcctccccatgtcttcaaggcagtgttttggagggctctggcatacgagaacgacacgtgccacgggtttggagattggttcatggcattcaagttgagggtagcttcaacctcagactgtccaccagacaaaaactgcatagcacaggattggttaattagcacatgaaagggagggaagttaggaatgcaaagaatgatgatgcatttggcattaccataattccaggtgtaaccatgctaggcttaagaagaataccctcaaaaaggacattgttctcagcaaggtagaagaaaacctctgcccagaccttttttgctacttcaaaagttctgtcaataccatgctccccatcaagcaagatctctggctccacaattgggaccatggtattgatagaacttttgaagtagcccaaaaggtctgggcagaggttttcttctaccttgctgagaacaatgtcctttttgagggtattctccttaagcctagcatggttacacctggagccgagtccaaggacaaggccagtcctcagacagttgctgattacaccctcaagctccttcacaggagaattccccctgctgtccctggaattatgtttttgtctggtggacagtctgaggttgaagctaccctcaatttgaatgccatgaaccaatctccaaacccgtggcacgtgtcattctcgtatgccagagccctccaaaacactgccttgaagacatggggaggccgcccagagaacgtgaaggcagcacaagatgcactcgcattccgtgccaagtccaactcactcgctcagcttgggaagtacactggctatggtgcccgtactccggaggtgaaatgcgcaagttggaggcttgctgtggaagcacacaacatctttggctttgagaccattcctgaagagtgcgttgaagcaacaaaggaatacatccatggcgaacaatatagatcagactccaaaacagttaaccaacaagcttacttttatgccagagacctcgaagtccatcccaaggacacatttgtgttcagtatagatggcaccgtactctctaatattccatactacaaaaaacatggatatggggtggagaaatttaactcgaccttgtatgatgaatgggttaacaaggggcaatgcaccggcactgcccgagactcttaagaattacaacaagcctggtgtctcttggcttcaagattatattcttgtcaggaagaacactggacaaacaggccgtaacagaagcaaacttaaagaaggctggcttaccacacatgggaaaaattaattctcaaggatccacaagatccttccactccaaatgcagtttcatacaaaacagcagcgagagagaaactgataaggcagggatcaacattgtttgggatcaattggagaccatggggagcgatcctccttcggaggccacagagggcgaaagcaggaccttttaagctttctaat

SEQ ID NO: 127440 - DNA, 193 bp, Glycine max
  Clone ID: PAT_MRT3847_86083C.1
ccaattgggtttcttcgttataaaggagcgtccatttttgtgacacgcttttgcttgttctacgtttggctttgctggattcctcttctactggtcacgcctgtgttgtgtctcgcagtctttctccctcctcaattagttctccgtgtgtggctgattttggcttgctttgtttgaaggttgcgttttgcag

SEQ ID NO: 127441 - DNA, 471 bp, Glycine max
  Clone ID: PAT_MRT3847_86084C.1
caaaagtgctgttgagagcttctctactagaaatttagagctttttccagtagagaagctcttaaagctttcaaaagcccttctagctttgtatcaaaacaggctcatgagaagttatagatatgaaatataatgacatactgacatggctattctgattgcttgttttccattcttgggaatctttttcctaacattgagacaaacttatgttaagggtaaggcaagttccttggcagcaccagcccttagccctgaaccaggatgggaggtgagttattgctgcattattttataaagaggtttttcacttaagatatagattagattcaattgtaggtactctgtacttatttcctcattgcccttgtaaacatcacctgtttccatctcatttctgaacccttgccccccttctaggttcagagctttactttgtgtctcgctactccttcattttgccttctttaa

SEQ ID NO: 127442 - DNA, 319 bp, Glycine max
  Clone ID: PAT_MRT3847_86085C.1
ctgcagtactcgtccgtgattcccgggtcgactccacgcgtccgctagatcctagcggccgaccttagatcattcataatttctacagcaacagggtccgggaacatttagagaagaatggaaaaaagacttttgccattatggagacaaagatagcttgatatcatagtatatagtttgtactttgacctaccaaagcttcaactagctactatgggaatacatttagacagactctattctttactaagtgaacacacattttcagctcctgtatcttttacgtatgatgatatatgttatagtacattgactttcc

SEQ ID NO: 127443 - DNA, 325 bp, Glycine max
  Clone ID: PAT_MRT3847_86086C.1
gtgactcgttcttatacgggttcatttttttgtaatgtggatggcgtgcactgttcggatatcacatgaaaatgcctagctgacatgctaactgtggctgctgaggcgccggcatgtactgctcctgctgctgaggcataaagatgtaacgaaactcgagctacaccgatggaaccaccaccgagaccttggacatcggagttgcacaagctaagactcaattagagagtgctgacatgggcgttccctgtgagaacaatggctgcagatgagtagcaaaccgctcgtgctactgatgcacttgcaagtgaggcgaaggagagct

SEQ ID NO: 127444 - DNA, 462 bp, Glycine max
  Clone ID: PAT_MRT3847_86087C.1
ttgggggtttgttttttttttttttttttccggaaataaagttctaatcagttcaaactcctcttaagctccttccttaactgaagggaagggaaattttaaaatggaataacttctatactaaataactctagccctaaaatcagccctttaagtaaaaaaggctgaattattaaaaaataattattaactacaaatcaatccaatagctttctattgatgggggtattttcaactaatcatcagcaacattctgcaataataggtatcatgttaaattttccactgtctccataaacaaaaaatgcattttaactaggaaaaaacctttttttcaacttggaaagctccttaaaactcaatccaaaagccttttccaaaagctcctcctttatgtcaaaaccaaaaactgcattaagaatcctcatcaggccaggattttggctgtcaaaactgcccaaa

SEQ ID NO: 127445 - DNA, 323 bp, Glycine max
  Clone ID: PAT_MRT3847_86088C.1
ccggctcgagcaacgatgcctggtcttttctctccattcccgccaagaaagccatgtacgacagcgagctccgcttgctcaccgctccggcgccgcaccattattctcttcccccgcagcctcaacccacgccgaggcggaaccctagatccagggataattcggccaagttaaatcctaatcccaccccgaaccgtgccgagtcgactcggaccgtggaaactgacacgggaacgagtttctggacctcgtgtccttattgctatgttctgtatgaatatgcgaaggctcatgaagagtgcaccttacggtgccagagttgt

SEQ ID NO: 127446 - DNA, 374 bp, Glycine max
  Clone ID: PAT_MRT3847_86089C.1
cggactgctctgccggtctgacattgccacggcagtctgcgtgccgtcggatccaggctctggcgtcgctccgaggaggccggacaggacgatgcatgcaacccagatcaacgtcgaatattcacgccttcgaaactctcagagatttccaccggtcgaccacagacggctagtcaccctgccgatggtcaccaagagagaggcgattcccggaaaggctgcattgccacctccactcccgccggtcaccaatggccatcatgtctttcaggtggtggttatgagagtgtcaatccattgtcaaggatgtgcaggaaaggtgaggatgcatatgtcaaaaattgaaggggagccatccttagacagggagctag

SEQ ID NO: 127447 - DNA, 321 bp, Glycine max
  Clone ID: PAT_MRT3847_8608C.1
ggggaaaataaaacaataatttttgaaaaattataaattctctcttttttcctattttctttcaaaatatctaaagggcatcagtggtaacagaaataacctataacatgtaaaatatattatttataattaggtaaaggttattaaaaatcacacctattcctactcctttgaattcactcacaatggtttatttttttaataaattttaaagaaatatcctatacacacttggttgattatattagtttttaaaggtaaacaatttaagaataccctttaagcaaataaggccttataaaatttttgtaaaaggttctt

SEQ ID NO: 127448 - DNA, 379 bp, Glycine max
  Clone ID: PAT_MRT3847_86090C.1
tgatgatgccaagcctccaactccaaaacaatgcgtcacccttcctactctaccccctccacctttacactctcacactcgtccttgaaagaccactgatttctgtcgacagcttgctcacaatcttatggtgatggtcaccacaccagaggcaggcgctgcacaagatgcgcgaacaactgaccttcttttttggccaaacccaaagatggcgaagactattcatgaagctcgtgacaaagttgaagatcaatatgcactagattcactggcagctgctggtgtggtagcataggtgggctcatctgggatgatcttagcatttgataagcatctcttaatgcctacgattctggatgtccgactcatcgactacact

SEQ ID NO: 127449 - DNA, 445 bp, Glycine max
  Clone ID: PAT_MRT3847_86091C.1
gcagaataaagatctaaatagaaaggtgataaatatttttattttttaccaaaacctacaaaaccaggttcatgctttaaagcgaaagggggtgggggtatactaaaaacttaaatgtctctcagtttctgacaatatcatatatcaaagtgacaaaatcaacagtctacaggctatcttacaatgcatttttcaggccatggaaacatttactcatgaaactgtgagagcttatgaggagttgctacaactgagcaaacaataaatttctgccctgaatcactagatactctcatatggtgcgttctaccttattgaatttgtaatcatattattcttaccattttccgagaagagaaactacctcatctccctctactaactctattctttacaataaaatcttcggaagacagcctctgttcacttcttactagtctaaact

SEQ ID NO: 127450 - DNA, 377 bp, Glycine max
  Clone ID: PAT_MRT3847_86092C.1
acagggctcgggcccatttaacgggcaagcaggcgaaatcttcgcattagtgctgccactctccaatctggtccaggacttggtgggcagacttttctaggaaagaacattacttccactctcttgtcaccaccgatccgcattgccgttcaaagcggtcttagttgaaaaacactacaccgtcggagcagatgtaggactcggtgatagactctgacgacaacaggctcactgagaaaacaatgcttacttgcaaagacaaggacatgtaggctgggtattatacaatcccacctcaatttagaaatatgctaccgcaggacaacaggtggcatctggataccttgttgacttacattctcccaccgatcctcact

SEQ ID NO: 127451 - DNA, 241 bp, Glycine max
  Clone ID: PAT_MRT3847_86093C.1
tctatctttacttacactttacataatccatttagggtcaacaaaactatggggcgcatcatctatttattaaactattttttcttccgcatcgggaggacatacacttttagaaatcttcctctgcctatatatttctaaatattatctaacgttacatcctagtctaactgtgtctatggatattagacacattaaatctgcgaagcgtgtaaaatggttagaatggtatatttgatca

SEQ ID NO: 127452 - DNA, 1092 bp, Glycine max
  unsure (1)..(1092): unsure at all n locations
  Clone ID: PAT_MRT3847_86094C.1
agtgaacaaattgtagattcctttcatgaacttgttcctgacatggcgttagagtttccctttgaattggatgcatttcagaaggaggctatttattatcttgagaagggggaatctgtttttgtggctgctcacacatctgctggaaagacagtggttgccgaatatgcatttgctctagcatcaaaacattgcacgagagctgtgtatactgctccaataaaaaccatcagcaatcagaaatatagagatttatgtgggaagtgtcctgttgggcttcttactggtgatgtaagcttgaggccagaggcttcttgtctcatcatgaccacagaaattttaagatcaatgctctaccggggtgctgatattattcgagacattgaatgggttatatttgatgaggtgcactacgtcaatgatgttgaaagaggagttgtttgggaagaagtaattatcatgcttccaagacatatcaatatcgtcctcctttccgccacggttcctaatactattgaatttgccgattggattggcaggacaaaacaaaaggaaataagggttacggggacaacaaaaagacctgtcccattggagcactgcctgttttattctggagaactttacaaaatttgtgaaagtgaaaaatttctgcctcagggattgaaagctgctaaaaaagaggcttcaagaaaaaagaatttgactgctggtggtggttctggaccaaagccaggtatttcaccaggtcatgacaaagctcgagttcaaaaacgtgaaaatacatctcacactaaacatcatggagctaatttctatggaactggtagaggctatcagaataatggcaatggccagagcaattgggaactgaggagagcagatgcttcaatgttgttgatgcttatcaacaaactctccaaaaagtcattattgcctgtggttatattttgtttntctaagaatcgctgtgataaatcaactgatattctgactggaactgacctcactagtagctcagagaaaagtgagatccgacttttttgtgacaaatcattttcacgactgaagggatcttacaaaaattaccac

SEQ ID NO: 127453 - DNA, 274 bp, Glycine max
  Clone ID: PAT_MRT3847_86095C.1
gaggagaactttcttctttgctctctgactaacttgtgcctacaccatctcatacctgccttcaaccaccggtcagttcgtgctcgacactgatgatgattctctatcaaaacgggggcgcatactatatgttgccaggaatgaaaggatcggacggggggatacgaattggattcgatctgcacaagaagtgtgcctgcttgctgttgagcgatcagaaagtgatctcgattacgaaatcggactattctaggcaaggacactacatgccgta

SEQ ID NO: 127454 - DNA, 504 bp, Glycine max
  Clone ID: PAT_MRT3847_86096C.1
gtgtaaataagccaattttgacttgatttaatactagagaaacatgtagcagaggtactcctccttcggatcaacaacctttgcagcttcattatgtgattgattcctgtttttgcaaataacaacttcatgacccatttgattacactgactgcacttagcatcaggtcttttctaacatctgaatggaggatgtcctttctttctacagtgttagcaagacggataaaatttcttccaatttccttttgcattggttgatgttgaacttgatcccattccatcaaagttcttatttttcttgtatttggttgcattctgatacctggctgataaaactccttcaattcttgattctttcctcatcaatcttctctaatcctgcgcttgcaagacatgtatcacctctgtcaacgagatcttggacagatcctttgtaatctgcaaaatgattatggatgcttcatatctctcacgtactgtaaccaatattttttcaacaat

SEQ ID NO: 127455 - DNA, 482 bp, Glycine max
  Clone ID: PAT_MRT3847_86097C.1
ctcaacccactgaaaaaggataccaaagaatctaacttgttagttgaacaatatacaagagtttttctaaataaccctgctaatgatacgagccaattaacagtaccacaatggtcactagcaggactaaggctgtccagcatatgatgattctcaaagtaaaaggacaacgtcaacatagaaacttttggcacataaaagccatagccagcacaatgctttccttttttctttttggctttaaacctctttccttgtgtgtgtaaatactaaaacagcactaattctacaaagtattggtcatctctgctatgtgccactgctagtatcagctttaatccccaaaagagcctttaacagggaattttgctatgtgagtatatatatatctacaagctatctgattacctttatgtgagtatatatagatatgtgcaataaccctcagttttatcaagtattgtatgcaactagtttcgtag

SEQ ID NO: 127456 - DNA, 524 bp, Glycine max
  unsure (1)..(524): unsure at all n locations
  Clone ID: PAT_MRT3847_86098C.1
atttagtttgtgtatgtgtgtgctgttgattggctccatattctacatgatattatggtttctccctaaatgaagcactagccaaggcatttgacttgctatcttcttttctctgtttcctttattgagcaattcctgcatcatcttacaattcatctgatggataggctatttgaagcaaataaattcagtctttccttcattctggaatcgattaatttattgaaattggcctcattttttagttggatccggaactggagtttgatcgtgaagtataccctttgggacttcttccaaatgctggtgttagttgttggtgtttcccagagaatgtcatttccagcaagtgctgaatttccatgttttgaaccatctcctccaagcacaaacaatactgcactgcctacccgccactcttcagtgttacattgatttaaattgaaaatgtttaaaatggctganctcctgatccatttaccttgggantttcncctggtcccttgtcctccatcntaaaggaa

SEQ ID NO: 127457 - DNA, 599 bp, Glycine max
  unsure (1)..(599): unsure at all n locations
  Clone ID: PAT_MRT3847_86099C.1
aaagggggtgntgaatgtgttctgnggagtgggggtgtttnctattgtgtccccaaatattgggccagatagaagctaatgagtacaacaatttcactagagggggttatgtgagcgaagcgcaanaanttactttctttgcgagctgcgtatgcgtanatctatggggtcctccatcaaaaaagtgatcttctgtgatgagcacataaatcgagcaccttatgggttctgtgnaaaaatggggaaggaggagcacagaaaatgggagggcaatttgtgtatgagaaaacaaggcgtgagattagtgaatattggggtttgagattcatatttccccgtatttttttacataaaaaaagtgtggactaatattttgtgactttagaggtaattttgaggcgagtgatgagttatttgagctgagcaaattttcttaattgattgtgactattataatcgaaaaagtgtgagttctaaacaacattttttaattaaactgtgtttcagaaacttatttgagattgggatttccatttcaacaatcatactcttagggtggtgggtcaattagataataaacatactacatgagaaaatca

SEQ ID NO: 127458 - DNA, 133 bp, Glycine max
  Clone ID: PAT_MRT3847_8609C.1
gcgtcgccagcgcggcaggaatgttgtgagaacgtggaaactggaagaaaacgagtgtcagagcaatacgcttgtatgtgaaggagagtgaataagttgtacgcaactaaggttggctttgaatggagtgatg

SEQ ID NO: 127459 - DNA, 129 bp, Glycine max
  unsure (1)..(129): unsure at all n locations
  Clone ID: PAT_MRT3847_860C.1
gcccatacaaaccangcagtatataataganagaggacacgacagtgaaagancagggagctatanccatnnggngaaaactttcaagaggtgaaagccaaagantcctcctttcctntgtataganac

SEQ ID NO: 127460 - DNA, 1013 bp, Glycine max
  Clone ID: PAT_MRT3847_86100C.1
ggctcgaggcagtataccctagctagcccaagcagaaaactttactttgttacgccgccccctctcctctgttgtcttacgacgttagccatggaagtctcaaaaaaagaagctcgagtccgttgttcatcctcgtctgcatcctcatcgactccaccttcttcatcatccagcccactctctcccgcatgggcccatccgaggcggcccacacattcctccctcgaaccgggcttgcccgcttcagcggcacaaggcctcgcacgggccgtattctggtcaggatcagcggcaggaggcagcgaatcatcgtcaccgacgacacgcgacgagttaatgttaagtccctttaagggcgacgagttaatgttaagtccttttaagggcgacgaattaatgttaagtcccttttagggcgacgagttaaaactattttgagaacaattgaggagtcgtgcgttttgtacagttcatagatagagtctgtgtgctaaaatattttttgggtttgacctgaatcaggagggagaggccctgacggactcttcggaatgtaggccttgggggtcacacggtttgagtgctcctttaagcctatgttgatcctatatggttggagcattctcgcaaaacactgtgaccctgactggtctccctatgatattacctagtgagagtgacttgactgactaatgtgaatccaatcttgtcatgtagttgttacgatgaagggaaaaggtttgctgagacgttggccatggattatcatcggggtgctggtgttgagaagaaagtaattcttgggaaagtgaacgttttgactcagaacaagaagatatagtggagggtattgcgtgtttcatggccgcatatttgctatccttaaagcagactaaggaattcaattgttaaagcatatgtatgtgcttgttattcagttggctctatactgtgtgtaaatgttatatttgccccttatgcaaagttaaattcattgtgatatcatttgaatg

SEQ ID NO: 127461 - DNA, 257 bp, Glycine max
  Clone ID: PAT_MRT3847_86101C.1
cggatcggctctaattaatgatatgcggctacactagccacatggcagctgtctatacagggttgattcatggcccgtctgtagattacctagatgtattaacacgctctgtgagcaattgactcttcattatcccctctcacattattatgactaattcctgtgttccctaatgaaggttgtagctttgcagctttgccgcagacgatatgtgataaactacaagggcagtgggacatgtggcggtcacatacaac

SEQ ID NO: 127462 - DNA, 583 bp, Glycine max
  unsure (1)..(583): unsure at all n locations
  Clone ID: PAT_MRT3847_86102C.1
cacagtgactagcgtcgatctatcgctagnaatgtaccagagtccgtcaactttgccaacataaacacaatgcccggggataggtgtaggtttacgcacctaaatagtcaggctagtgcccatgtgaagaaacgccatgaaaccgggtaagaggcaacagctccggccgcaacagcgccgcccacaatgaattaacgttagccaaaaaaggccttgccagagctctcggctgctgtgacggaagcagattaggccaataggactgccacctacaggtgataagtaccagcgtaggctgctgcgcaggtggccgatgcccataaagctactagagcgacaatcactatagctgaggttaaaagcctagccctggagattaaaagtaccacagagccggagaaatagccacgccccgaagggttcagtagcatagtggttgtgaatacaagagcagtgactgtgccagctgtacactggaaatttgccacaatacagggggcacaaaggcagggtgcctagcgagggcccccacgggcgaccacactgggaggcaacagccttcaacaactgcatggggggcctc

SEQ ID NO: 127463 - DNA, 304 bp, Glycine max
  unsure (1)..(304): unsure at all n locations
  Clone ID: PAT_MRT3847_86103C.1
aagccttattatttacacacttcttttaatatgcctggatatatatgaggccatgtgacaaagagtgaggtactcgnagccacacatattgagatagagaagagcatcttcacttgtagtctagctacgagaaaacatggcagaagtgatggctgagaagatgttagctgtggagggtaatgagaagactatgcaatatggacttgactctggcacttcttggcttggaagttgcatggcttcaggtccatcatcagaaaacgtgtcacttcacagatagctccctgtaactgcttgcgagtga

SEQ ID NO: 127464 - DNA, 423 bp, Glycine max
  Clone ID: PAT_MRT3847_86104C.1
acggctgcgagaagacgacagaagggtaccattaatgttgtcataactatcaccattgtcacaaccaacatccatcaccactattattattaccaacaataccatttttgtcacggttaccaaaactgtcagtactaccaacattgtcatcaccaatattgcttaccaataatacattgttgccacaaccattaatattgtcagtgtcatcacgatcactgttggattttaaatgttacaagataagtgaccgaacgaaattttgaatgagacaatgtattacgcatttttttttaaaaaaaattcaaggattggaacctttgaatttattgaaaaaatttaatatatgtgggatcattaaatttgatcactcacttgtttgatcagtaattccttcacccaattgacaactactaataaagt

SEQ ID NO: 127465 - DNA, 338 bp, Glycine max
  Clone ID: PAT_MRT3847_86105C.1
tctctcaccaattaaacaaagttatttttcacaaaccattaagagattttcatactcttaaagcataactaattctactctatcacttacttaccaatctactcaaaataaataccaatcttctctaacccttattctattaccatccttctattatataacaacttcatacactcacaaagacactataattatacctaatctcacaatctttaatacatacattaactcaatctaagccatattatacatttcatatcactattatacaatatccatccttgtctttttttcatatttatcccttttttcccattttttttatcattacttatttt

SEQ ID NO: 127466 - DNA, 408 bp, Glycine max
  Clone ID: PAT_MRT3847_86106C.1
aaataaaccaggcgaactttattcagaagcgaccaattaccaaacatttgtatatatatatatatataaaaaaaaggggaccatgacctttacacacccatcacaagtccaaaacacttgaacttgctcaaaggcaagaaatgaccactttattctaaagggggggggttagacacaaaacaccacagggcaacataatacattctacataattttgaaggtttgaaaccacataaagggtttatcattatttctaaaggccatttttgcttgaagctttagctctccaacacctcacttgcaagtgcagggggtggaggagcagttaggtgcacatttgcagccctcgttctcattgggaacacccatttcagcactctctaattgaaccttaactggggccactcc

SEQ ID NO: 127467 - DNA, 1126 bp, Glycine max
  Clone ID: PAT_MRT3847_86107C.1
tgcgagaagacgacagaaggggaagacatgagtttgtaaattgaagtgcgaaagaagcttaaaccccaaaaccaaaaccaaaaccctagcgaggttggttggttcccaattcccatggcttctccttctccaccgaaatcgaagttcagtgtctatcaaaatccttccttttctgcggttctcacttccaacagtcttcaaccttccaattccacaatcctctccatcctctccttcttctctgcctccgcattcgtttttctcgctgccttcttcagggaaaacggcttcgtccacattttgtgctttggaactttgtcccctgtcacagcttattggcttgccaagacgctacaagctatagtgggttttatcttcattggaactgtttctgcactcttcaacgttgtgtttctgcgtagagctaggtatgctggcggaggtgctgctgttgcggctaagtctctgtctgattctaacagtgttcataggaatgagattttgctaaccaaacatcaattagggcttttaggagtgaagccaaaggttgatttggttcaacctgactcggcgaagaagccccccaagtctaaaccccaactgccttcttcaggtttgctggttccccttcaccagccaattcccagtcccactcgaggttcttcgtctcgcattgatgccgatggttcaaactctaataggggtggtgctgctcgttctattggtactccatcaaggtcaccaggtttggcgtcgttgtatctttcaccgggtgtggtttctccacctaggagtttggctggcgtggattcggtggtttcgagtccttggtctaacaggcgagtctcctctgctaacaagataacgtccgaggaaaagctggagagattcttagctgaagtggatgaaaggatcaatgaatcagcggggaagatgtctaccccacctcctacagttcctggttttggcattgtgagccctagtacagttacaggctcagctaatacctcaggaactgcaaggcgtacaccactgaggcctgtgaggatgtctccgggctcgcaaaagtttaatactccccctaagaaaggtgagggcgagtttcctgcaccaatgtccatggaag

SEQ ID NO: 127468 - DNA, 191 bp, Glycine max
  Clone ID: PAT_MRT3847_86108C.1
cacgccctcaatcgtatgatggtattcatgcgttactctctcggccaatactgtaaacgggttacctatcttgctcgccatcatccatttgtggcatatatttggcttcagttgaggctgcatccttctgcattaatagaaccagattatgctggtgttgctcctggcaaatctgtgatggtggttgaaga

SEQ ID NO: 127469 - DNA, 445 bp, Glycine max
  Clone ID: PAT_MRT3847_86109C.1
ctctcgcgttcgttctcatggatttttacattggcatccctgtatgcaaccctggcgcggacaaatgcacggcctaaactctctcttaaacttttccttccaagacttcctccatgaccctaataaccacacccctaaccagctcctgaactaacacctgaacctcgaacacttagttgctaactttgactaaaactttctcgaccacttgctctatcactggctttgttcctgctttaggccagacctgaccccattctggcactttttatgggtccctgacaccctgaccgacatcaagcccccccccgacaccaccccctacaacaccaccaccgacgctgcttctaatggctcatttgatgactacttcgacgagcactccacgttacgctacaagctgcgcagctcccataacagctcgcataacaacgcccccaaaaac

SEQ ID NO: 127470 - DNA, 433 bp, Glycine max
  Clone ID: PAT_MRT3847_8610C.1
cctggaaatctatttgttgcggtgaatgaagggttatgggataacggggcagcgtgtggaaggagatacagaataaggtgtgtgagtggaaacaataggccatgcaaaggtggtagcatcgatgttaaagtggtagattcctgttcaaggtcaccatgtcccaacaccctcctcatgtcaaatgatgcatttgcagctattgcacgcttccctcatgttaaaatcaatattgaatatacccagatatgacttgccagtgatacgtcacaaccagtgcatatgtacactactcataaacaacatcaaggaataagctgtgatttgttgaagagaagtgcaaagcagaatgtgatccaaaacaggatgtggaatttttatgtacttagaaagaatattcaatatcatgacaaaaataaactgttgatgttcgtgc

SEQ ID NO: 127471 - DNA, 274 bp, Glycine max
  Clone ID: PAT_MRT3847_86110C.1
atatcccatatttagagtcctttttgtatattatatgaatataaataatctcattggaccataatacataacaattttttgaaatatggaaaataatatcttaatattaactagcctctggttatatttgatttgttttaagaatgactttatttattcccgtctctttttttcctgtatgaaagaatctttcctttatactatattttccaagagtctagaaaatattcattagaataatcgttaatagtttcacatataatcacgtaattca

SEQ ID NO: 127472 - DNA, 147 bp, Glycine max
  Clone ID: PAT_MRT3847_86111C.1
agcccggggcatgttcttcagtctgcttctctgcttgtatgcaacggccacgcgcgccctcagtcgcctgacaacgactgttggtgcatggcaaccacaaagatccgggtcgacccgtcgcaggtccgatgccaaataagaaagatg

SEQ ID NO: 127473 - DNA, 368 bp, Glycine max
  Clone ID: PAT_MRT3847_86112C.1
gtgtaaggatggattgtggctaataccgaatgcataaatgtccattgctttcgctggacatatgagtactacacatgctgatggtgctgttttatgactctcgttcttttggagtaagacattatcctctatctatcttaacacacgttacacaatactcataatgagatgaaatgtgaatctttaacattcatgtatgttgaattctatgtcatcatttttattattgagcgcatcatatgttcctgatcttctctaataggcaatgctatgaatagcaagagatattataggtggattctaggatttgttctatcagcaccagtgcgattgaaaatgtgtctgcatataatatgattggcacatgc

SEQ ID NO: 127474 - DNA, 423 bp, Glycine max
  Clone ID: PAT_MRT3847_86113C.1
ggattaaaatgacagcttctcataaaatcaaaagcctagaaacagtatcacaacaaaagctgcaagtatcttaattcctgtcactgctcttaacacaaaatactaacctgaatttgatattacctaatcacctatgaataagatacatttattaagtatcactttcttctgggttggattccagttccagtcctaggtgaatagtggtggtagaaaataaggtataattactgttggtgtttgtgatatctgcttgttcctgcattgaaagagcatgctcaagttgtacttctacttcccccatcgttggtcggtcatccagttcatactttaagcatcttattatgatatctataaagacttgccttcactctgtggcaatctttcctttgatattctggtcaatattcttctcaacaggct

SEQ ID NO: 127475 - DNA, 399 bp, Glycine max
  Clone ID: PAT_MRT3847_86114C.1
aattcggctcgagtaatgaacaagttttttatttgttagcatttagcgtgtagcaacgagaaaggatttggtttaggggagaagaaagaaaagaaatggggaaaaggaagtgatttggtttggaaaatcaaatggaatcagctacgaatttgagggttagggatttcatagcaaaggaagttgctgattgggacgacgaattgattgcagttgctcgattcaaagccttttccggtcaaagatgcgattgggaacccaccttccgcttctggaaacacttcatcatcaaaatcgccacccattttggcctcctcctcattcgaccctcccaggtcaagaatgattggtttaatcgaggagggttaacccctttgtgtcttgacgatgtactggtgacat

SEQ ID NO: 127476 - DNA, 386 bp, Glycine max
  Clone ID: PAT_MRT3847_86115C.1
ggtaccaatcaaagggaccaggttcgttggagttgatgacacactatagggtcctcaaggataaaggagtttatgtcctggtgacatatggagctccactatatcgcctgcgcttgctacaggaatcatgctcttggacaataaaacttcatgtgataggaaatttctgctaactcacacaaatgcatgactggggctgtttagagagggaggcatgcattttcactctctacaaatttatgttactgtagttgatcctggaacttttaatgttaattcctaagtcaaaaacttttctttgcgaccatacaaattatgattttctctgtgtgtgatactaagacagcagcatttctttaatttcaaatttgattgattacatttca

SEQ ID NO: 127477 - DNA, 750 bp, Glycine max
  Clone ID: PAT_MRT3847_86116C.1
gtccataccataccgcgaaacccaaccgctgaccgtcgctccggcaatgtggccggaactccaataatctccgtcgtcccacttctacccccgacaatgcctcacgccaaaacctcccaatcgcagcagaacataaagcagagggtactcacgtgcctaacgaagctctcagaccgcgacacacaagccgcgggagccaccgagctcgagtccatcgcgcgtaccatagacccacactcggttccagtgttcctctcttgcatccactccaccgactcctccgacaaaacccccgtccgcaagcaatgcgtgcacctcgtcgccaccctctcccacgcgcacggcgacgcgctctcgccgtttctgtccaaaatcatcgcctgcctcgtccgccgcctccgcgacccggactcctcggtccgggccgcgtgcgccgactccgtcggcgcactctcggcgtgcgtcacgaggcagcctttcgccgccgcgttcctcaagccgctcgcggaggcgcttttcacggagcaggacccgagctcgcaggctggagccgcgctatgtctggcctccgcggttgaagcggctccggatccggaccctgccaggcttgcgaggctgcttccgaggcttgagaggctgatcaagagcaaggtgtttagggctaagcctgcactgctggtgcttgttggaagcgtcgtcgaggcgcgcggcgcctctagtggcgtcgcgttgaaagatttggttccttgc

SEQ ID NO: 127478 - DNA, 570 bp, Glycine max
  Clone ID: PAT_MRT3847_86117C.1
ggcaccatgaacacatgccccaacagttccaatagccatcaaaacacaatcgtagaaatcagcaaaggagaacagcttgagaaaaggaacctttcttcgttcctgttgtgtgcccttttccttctttcttccctcgtttatatccatggtcaaaacaaggaaagaaactaagctctataagcttcaccaactccaagggcgttgcaaaaacatgcgatgattagttgtagcagaattgtagaaaaagaaggaatgtattgaaaacgtgaagaagaagaagaggagggaaagatagcagcaagaacagaagtgtggtggtggatgagtcataaatttataatataaggggaaaatgacgggacatttattattatgttgtaaacgttaaatacggttttgtaatttattatcgtatgcagataataattatatatagtccatttttattagagggatatatatatatatatatatatatatatatatatatatatatatatttatatatttttatatatgatagtgagtatatttagtgttgtgaggagaggtaggaagtaatccgcggtt

SEQ ID NO: 127479 - DNA, 1503 bp, Glycine max
  Clone ID: PAT_MRT3847_86118C.1
atgtatgttgggggggtggaagtgattctgtatatgttgcaatcaattctggaaggtgttatgctgtgggaagttctagaagctttatcacattggtgtatatttcaccgaagcaaagcagagctggtagtgggaacatggaataaacagtttcacaattcagagaaggttcagcgagtcccccttctgtatcttgcaaatgatatcctgcaaaacagcaggcgtaaaggaaatgaatttgtgaccgagttttggaaggttcttccctcagcacttaaggatgttcttgagaaaggtgatgatcaagaaaatcgtgcagtatttagactggttgatatatgggaggaaaggagagtgtttggatctcaggctaagagccttaaaaatgtaatacttggagaagaagcacctccacagttggaattcaacaaaaagcggtcccgttctgttagaattgtgaaaaaggattctcgttccatcaaaacgaaattgtccattggaggtacagcagaaaaaatagtctcagcctttcatacggtgcttaatgaacattccaatgaagatgcagagatgagtagatgcaagtcagctgttcatcgtgtgaggaagatggaaaaaaatgttgatattgcatgcgctgttgtaaaggaccctaagcgaaaaactttgtccaaggagctagtggaggaagaaaatattttgaaagaatgcattgaaaatctcaaattagttgaagcaagtagaacagcacttgaatctgagctggagaatgttcgcactcagattcaggtagcgcaagcacaagtagaagaggctagctacatgcggaagcgacttgatgatgaagattcttcatataaagcctcaatttcaacgacttcacttactgatgtgaatacaaaatcagaagcagcaactaagaagtcagctgctgcaattgcagctgaggttgcagataagctaacagcttctacgtcatctcagttaatcatgacttctgttctctcaacatttgcagcggaagaggcaaaaagtgcttgtctaacttctgagtccatgtcaaaacctgagaagtcaatacctatatcagatccaaatgtttttgtgtcttcacaacagttaattgccacacccaatcattcatatccttcagttttggtacctcaacccaccttgcagaatccagctgctgcatcacagggtcaatatcaaatgctttgtaattcatcctcccaacattatttgcaatcaacaggaggtgtcatttcttcttatggttatggtagcatcacaccattaccaccgggaccactcccaccccatatggtgggtccagtggtgcctttgacgcatcaggcaatgcaaataactcagcagcagccaacacctatagctcagcatcaaccaataaaaatgacacaacaagccccagcacctcctagtttccgaccacttcaaccgccaggaatggtgtactatggtaatcatcagcattctatatga

SEQ ID NO: 127480 - DNA, 272 bp, Glycine max
  unsure (1)..(272): unsure at all n locations
  Clone ID: PAT_MRT3847_86119C.1
ccgcgcattcattgtcganggcaaagtggtacgcatttcgttgtgtgagaaagangatgtgttgtccgcttgagnaacagcctggtagggttgcngaaactggcnctcctttgctcctgtcgatacccattctggtaaccggcgtgtgggctgnnacaagcaagcggnaanggnatgcgaganatggctggagaagcgccctcatcntgttgggcntttccncttngtggtgtcctgntcaggtcttctcggggngngtcgccgcctctctt

SEQ ID NO: 127481 - DNA, 406 bp, Glycine max
  Clone ID: PAT_MRT3847_8611C.1
aaagaaaacacaagataagcagacccatcatactgacatgacttgagccatacccaaaaccactagttggaccagcaatagtttgaatactaatcttctataagctctaattacgtggagatgaacacagagagtcctagttagagcaggttaagctatcttttcagatcctactactgaaacagctacgcctgggacagtgaaaaggatggaaaaaacaggctccttattatgattcatgtatatcctataagattagagatagacagagcagagattactatcactatcgatacatgacaatacttgttgatatgacagacctccgtgctcatagagatagctttcaatcgcgcactcaatctctgactgcctggtcatgacaaaaagatcatgctgatcacct

SEQ ID NO: 127482 - DNA, 1530 bp, Glycine max
  Clone ID: PAT_MRT3847_86120C.1
atgtttttcagtgtttcatgtgatccatatgccaaggagatgaacaacaaagcagagctggtagtgggaacatggaataaacagtttcacaattcagagaaggttcagcgagtcccccttctgtatcttgcaaatgatatcctgcaaaacagcaggcgtaaaggaaatgaatttgtgaccgagttttggaaggttcttccctcagcacttaaggatgttcttgagaaaggtgatgatcaagaaaatcgtgcagtatttagactggttgatatatgggaggaaaggagagtgtttggatctcaggctaagagccttaaaaatgtaatacttggagaagaagcacctccacagttggaattcaacaaaaagcggtcccgttctgttagaattgtgaaaaaggattctcgttccatcaaaacggtgagactgagggtccttgtgaaattgtccattggaggtacagcagaaaaaatagtctcagcctttcatacggtgcttaatgaacattccaatgaagatgcagagatgagtagatgcaagtcagctgttcatcgtgtgaggaagatggaaaaaaatgttgatattgcatgcgctgttgtaaaggaccctaagcgaaaaactttgtccaaggagctagtggaggaagaaaatattttgaaagaatgcattgaaaatctcaaattagttgaagcaagtagaacagcactttcctggtgccctcttgcaattgtttgtgcttttatgtatcaggaatctgagctggagaatgttcgcactcagattcaggtagcgcaagcacaagtagaagaggctagctacatgcggaagcgacttgatgatgaagattcttcatataaagcctcaatttcaacgacttcacttactgatgtgaatacaaaatcagaagcagcaactaagaagtcagctgctgcaattgcagctgaggttgcagataagctaacagcttctacgtcatctcagttaatcatgacttctgttctctcaacatttgcagcggaagaggcaaaaagtgcttgtctaacttctgagtccatgtcaaaacctgagaagtcaatacctatatcagatccaaatgtttttgtgtcttcacaacagttaattgccacacccaatcattcatatccttcagttttggtacctcaacccaccttgcagaatccagctgctgcatcacagggtcaatatcaaatgctttgtaattcatcctcccaacattatttgcaatcaacaggaggtgtcatttcttcttatggttatggtagcatcacaccattaccaccgggaccactcccaccccatatggtgggtccagtggtgcctttgacgcatcaggcaatgcaaataactcagcagcagccaacacctatagctcagcatcaaccaataaaaatgacacaacaagccccagcacctcctagtttccgaccacttcaaccgccaggaatggtgtactatgcaaacagtatgctcactggggttgagttggaaaatgcgtggacgccaggctag

SEQ ID NO: 127483 - DNA, 328 bp, Glycine max
  Clone ID: PAT_MRT3847_86121C.1
cccagtcgacggtgatattttaattgtaggccttgaaaccacatccacatccaggctcgtgagtgactgatacttattgaacgtatacgggtacaggaccagaccgatactactactaatagagatcgaggtgggccaggcctatgtctagctgctgccgttcccattcgtgaaggctgtgcctatgacgaacaccgacatcgacgcgcacgctgtctctgttgccgctgttgtgctggtggtgatcctcagcctcagactcacagtctatggaatttcatacgatagcgaccgatacactgccactgcactgacactgaccttgacg

SEQ ID NO: 127484 - DNA, 440 bp, Glycine max
  Clone ID: PAT_MRT3847_86122C.1
acccgtacagttaccttggaacccacagcgcgcgcgcactcgtttttttttttcactgtgatagactgctttgatagcaacacaataattaatccgcaactgtgcacctatattcgcataaggcagttgctgcaacctttttttaccttccagactaaccaatccatttacattctggattcgtgactcctatatcactggagaataaaatattctttcaagagtagacaaaaaaacaatgttacttgactcttcacatacacatacgccacgaaagatatatatttttttcgattatttcatggaccggaccgaattacataataattgatgaagggttaagggttaacccttcaaatatgggccaaacttatcaaacttttgccttcggcctgggtggcttcttcaaaaaaaagaactggctcaaaaaatgaaggctt

SEQ ID NO: 127485 - DNA, 221 bp, Glycine max
  Clone ID: PAT_MRT3847_86123C.1
ccacgcgtcgcacgctcgttattgtggactcgtcttccgcgtattctttttgtgttggtgctgtttttctctcacctgaaaatgcttgtgggggtaactgggttgcgagccctgagtgcgacgctgcggctgagagtcccagactgactcccggtcaaccaccaccgaacctgtatggagtggcccattaagtaaccaggtgcgaagggtgtccgtgagaa

SEQ ID NO: 127486 - DNA, 345 bp, Glycine max
  Clone ID: PAT_MRT3847_86124C.1
aaaacagccctgccatactgattattctgtgtaaaaaaaatacaagctaataaacttattaaaacctgccaacaagcctggactcattaaacaacggttttgaaagtcctttgtttttttgaacaaagtttgccccatggcaaccttaaaatgaaaaaaaaaaggggcaaaacgggatctaatacctaaactggtgagatttgtatccctaaaaattactttgttaagaaatccagggatttaaaaaatggggggaaaagagtttaactctttggttaacggggggccccctttttttttaaaaatttggggtttctaaccaagcttcctttttgaaaaaaggaa

SEQ ID NO: 127487 - DNA, 533 bp, Glycine max
  unsure (1)..(533): unsure at all n locations
  Clone ID: PAT_MRT3847_86125C.1
ccacgcgtccgcaaacccactaagatggcttcctttgtatccttactagtgctgcttcttgcagcccttatcctcatgcctcatgggcttgctacttactacaaaccaattatgaagccaccagcgttcaatcctgcagccgtacacatgccaccagtgaacaaaccaccggtttataagccaaaaccaccgctttacaagccgaaatcaccgacttacaatccaccatataagaagccaccatacgagaaaccaccttatggaaagtaccctccagatgaggacaacacccatgcctaaagcacgcaatgaggtctattatctacttactaaataagaggaactgctttgtgttttctaacattgcgacttacaacttcgtagcattgcatattcttgactcttgcatgcacttcaatccttcgtagcattaatgatgtggccgagtcatcatgagcatcatacttattcttttgtgaatgcttatcaaaattatcagataganaatggtgcttttgtactacagattacta

SEQ ID NO: 127488 - DNA, 278 bp, Glycine max
  Clone ID: PAT_MRT3847_86126C.1
gctcgtgcctctagggttatcatatctccattaccatttcctctctctcactttccaagaatcttaagctataggaacagtcttatccaaccgtgagcgctgagtaccagaaggccgttgagaatgcgaagaagaagctcagaggcttcatcgctgagaagagatgcgctcctctaatgctccgtttggactggcagtctcctggaacttaggacgtgagctcgaagaccggtggtcccttcgacaccataaggcgaccctctgaactcgctcacggg

SEQ ID NO: 127489 - DNA, 415 bp, Glycine max
  Clone ID: PAT_MRT3847_86127C.1
actactactacttttaccgccttaacccaacccaaccacatgtgaacatgtttgacatatgggacgacaggcactaggggacgaggccggagccgccctcaagcccgaactctcacaatactacctcgagcaggccggagacgccatcaagggacaaggccgactacgtcgtctacaccggataggcggaatcccagaagtcttacacccaccaagccggcgacgctctctccgggcaaccagaacaagagacaagggctcggtccttgactctgaccaggacgcccttggtatgaacaacaacaaccgaccttaagtccatcgatatccggccggcgccagatgagcgatccgagggaagaacgacgaagacatctcagtccactttcttactatgagatgggtggcttatctt

SEQ ID NO: 127490 - DNA, 548 bp, Glycine max
  Clone ID: PAT_MRT3847_86128C.1
attgttctttcttgttagaagtgctgacatagttattggttagccactatttttatcaaattttgacgttctctcttcatttatatagttacttttgtttgaatttctgtaaaaatattaggggaatgaatgtggttacccactaaatttgcagtttgacttgatgttttttctttgttttgtgattctaagcatggtctatataatgattgtcatgtaaatatgtacactctaaacttatatctattgaagaagacatcggcagtgtggtttaggagtttgaccttgctagtatgtatctccgttttcctacttcaccttcttcaaagcactctactccctcgatcttgtaatattttcacctaatctttctgtctccaagatcaagaggagtaaatgtgccacaggcagtattgatttttattttgaaaatcaaggaactgatgaaagttatgcacaaaaatggttcatttcatttgtatgcacttcctacatatttgggtacagggtcctttgcaaaaatacatttgaattgacaggatcttttt

SEQ ID NO: 127491 - DNA, 228 bp, Glycine max
  Clone ID: PAT_MRT3847_86129C.1
tgagtttcttcctattcattgtaattttacaggcatcctcattgaaaagcaaagtggtgcatgtaaagtaccaatggcgcaggcttttcaggtaaaaatatggcttgactattgcatttcagccttccttggcagggtttgaaagctgctcccaaaaagaaaaatatgaccaatatttgtgaagagaatttttcacctccccttggaatcccttgcaaagccaacccc

SEQ ID NO: 127492 - DNA, 165 bp, Glycine max
  Clone ID: PAT_MRT3847_8612C.1
cctgccggggcgggcaagctccctgacccatggggcgtggtccttagcaggccgggaagctgggaacggccccaccatgtaggcgccctccgaagtatgggcgcccttgtcccagcgtatcctggctgctggaaacagaggaccgatgccaacttaggcagcact

SEQ ID NO: 127493 - DNA, 422 bp, Glycine max
  Clone ID: PAT_MRT3847_86130C.1
ctattttgttgtgcaaaactacgacgtctgtagtttagtacttttgatacttcatccattttttcttttttttacaagtttcacttctttggttttcgccagttgccggtcagatagcaagatcgctcggatgaaattagcgaccttatctttacttagcttttcattttcaataaaagataagtaaagaggggcaactattagaccctaatttcatccatgaactatcattcattgatgttttgattctcgctaatcgaaaggtgttgttcgacaccaatttctacacaaggcgtgagatcgttcgacattttggtcaaggatgcaaaaaatacccaagagaaggggcaaaaaggtcatttcaggcaattttctggaccctggcttgcccaggctagcctttggcttgcctgggccccaaa

SEQ ID NO: 127494 - DNA, 278 bp, Glycine max
  unsure (1)..(278): unsure at all n locations
  Clone ID: PAT_MRT3847_86131C.1
attcgagccagcaaagcactggctacttcagagttgaaaacccagcatgtggttatatctctttcctaaccttaaccttggtactgatgctactgacaatcagggcaactcagcggaaactgtttcttttcagctaggaacaagtttcgtgaccgaagccaaccagaccatgantcctccaaggaagacgcctattgtgcactccctcgggaacaattaccaactcaataaggttgacgacaacggcaccccaaaacctcgtctcttggtcggcctct

SEQ ID NO: 127495 - DNA, 394 bp, Glycine max
  Clone ID: PAT_MRT3847_86132C.1
ctcattagtcattatttaagtatgaggctgcacacttagagagataaggttgtcttgagagctgttgcgcgtctctgagttgctgtgtaagccaatgatcattataattgaatttgccaaacagctctccatacacacacacacacaaaacaaacatacctcgcctcattcctttctgcttcttcttttggcttcttcttcttcttcttcttcttctgggtataacaaggcaatgacgatgtttacagcagttggactagacatgagtgaagagcagtgtcctggcaaggtgactcagtatctgtgaaactccatgtggtcttttgcactgatgctgttgatgcagcctgtgtgcatgacacttcctctcctgtctgagaaaaggcgaatctga

SEQ ID NO: 127496 - DNA, 425 bp, Glycine max
  Clone ID: PAT_MRT3847_86133C.1
ctcaaaacggaaagcagccccaagagacagaggggccggcgggaaaacctcccccggaaaccaacccccgcccgagagcggaaaaagccccccccacgaaagcacaaacagacgggggaaaaacccccaaacacgaaaaacaggggggccggcccacaccccgcagaagaggacccccgaaaaagaagaccaagaaaaacccaaaaagaccgacgccagacggagacaaagaaaagaaccccaacacacggaggcacaggcccaaacggaaacaaagccggccaaagcggcccccgaagacgccgaaacccccaaaggggccacggcggaacccaaaaatccccaaaccaaaaaagccccccccaacaacaccgggggaggaacccaccggcggagggagccaacggcaaaacccaagacagagg

SEQ ID NO: 127497 - DNA, 442 bp, Glycine max
  unsure (1)..(442): unsure at all n locations
  Clone ID: PAT_MRT3847_86134C.1
gcctttgtcntcatcgccggggagatggatatctgggggcctgggtgctagacacgactggcatgaacggcactggtaagtggaccgttcaaaaagcagctagattttaacatggctccactcattattgctctcaaaattatcatttgccactgttcattctaaacaatcttgaaccatcatctcaagctctctgaatttgtgttgaaatgtgcaaacacagttacaagtgccaggaggctctcagcaagcagagaatggttattgagagccttcagagggagactgagtccaagaatcataagttaatggagatggagcacaaacatagtgagacacttacatctgtgcgcagacttattgtagggcttgcggagaatattaattgcaaagaaagatgtctgcttcacatggaatgcaagcatagtgaatcattgaacat

SEQ ID NO: 127498 - DNA, 400 bp, Glycine max
  Clone ID: PAT_MRT3847_86135C.1
ggggagcaacatgtattaaataaatatcactcataggacccatagcaaaaatctgaattggtcaattggatccaagaagaaaaccgaataaaattgaaaacccaagaaacccccaaattaagcccctatggcctgactcccctcaaggtcacattataagccacaaggttgagatcccagaaaccaccaaccttgcaaccatcggggagccccccattggtggtgacctataaaaagatgtagtagtagtggggggttcaattgaaggggggggggatgttgaaattttaagattggggggggagggaagaataatgggggggtctttgggctcctcagattctgaaagggaatcctttggcgggggagggggctcaacaaaaaccgaggcctttttaac

SEQ ID NO: 127499 - DNA, 296 bp, Glycine max
  Clone ID: PAT_MRT3847_86136C.1
caccaacgccaaacaagcgctagatctctctgatctatcttctgcttgcttgaccatgagagagatctctgccgtgctgggaagccaatgcggtaaccatatcactatctaggactgagaggtgatctgtgaccagctctgtatataacccacctgacaggacctctaggaaggccacagcatgatgcaactcgaaaggatcaatgcgctttacaacgaggcctctggcggaaggaactaaccccgagccgtgcttatggaactcgaacctggaaccatggacagaataagatctg

SEQ ID NO: 127500 - DNA, 374 bp, Glycine max
  Clone ID: PAT_MRT3847_86137C.1
aattcggggcgaggctgttgttcaaagtagttatgcagcaaaactgaattacatttgttcttacactttcgctttatttacacaattattatcacacaatctttttcttctgagattcagcttactttggactttttacgggaccggctggctgaagcccacacagagcatcttgataaaggttgcagattgaaacccaaattttgtatgaggacaaagtttaatttaactgcactgtacatttcatgtgaaggttgtgatacatttgaggttgtaatttaacaggttcgttattatttggtatataaatatctgatcagcgtatgtcaaaaaaaaaaaaaatgtggcctgaaagaatgcttgcaatactcttt

SEQ ID NO: 127501 - DNA, 317 bp, Glycine max
  Clone ID: PAT_MRT3847_86138C.1
ttttcttttttttttctttttttattttttctttttttttgaggaacgtgaaaaaacccaaaaacccaccccgtgggctacatggtttcataacattttttaaagaagaggccccaatgcttttttatcgatgcctttgcccaaaaggccttgccatcccaaaagaaatcacccagtgggctttttactggccgcaacgcatacaaaaaaccaaggggggagtcaactccttttggatgttgaaaacagagagggggcgaccatccttcaactgtttaccaatgaatattaaacccctttgttccggggggataccc

SEQ ID NO: 127502 - DNA, 368 bp, Glycine max
  Clone ID: PAT_MRT3847_86139C.1
taccaggtacctgtcactgcgatagcgtctagtcgtaggtactctatactcacatcagttaacccttgaccctggaggcactgcgagcaacgtaccgagcgattcagactccgactatgggtcactatttttcggtgacagtgattacgcagccgcaaattagtacaaatccaaaacaagcacccctacgatataatagtgctactgaagccatgcatgccatggacacctttgaagtggacctcactatcacactgccagtcgacacattatctagctgaatagcatgcaacatcagagatgaccgcactagcaactgatatactagctactatgacattactgcatgaggcagaacagtacctatg

SEQ ID NO: 127503 - DNA, 283 bp, Glycine max
  Clone ID: PAT_MRT3847_8613C.1
gcagcaaccaaacggtgcagcgatcacctgaggcattttacatattatacttttttttctacctccttgacctgcgcaaagcctcaataactggcaaaggaacactatttccttctactatccagaccgggatattactcttcatatcccccatgcataattacccactactacccgaatgtacatctctgatcttggtaagactcccatcctgtggatcctgctctacatgtaatgagcacccaaatccttgtcatatgcacatgagcccataaccctgaag

SEQ ID NO: 127504 - DNA, 426 bp, Glycine max
  Clone ID: PAT_MRT3847_86140C.1
atattttgtttttacgagccctagaaagagaatctaattaagaacgctcaagagagagagagaacagttcaatgcaaagggtgggtttatccacttttcctatcaccgattgtaggtgcacttccattgacacgtctgaacaaaaagcacagaggacagttacttcacattctacaccaaccctgttttgcttaaactcccgagctaatgagaagaaggaggccacaacaagatgtaacccctatgcgatcccaaaaaagcgaatcacatcggccgccaagttaatgaccactataccaaagacgcgacgggagctcgtgcctaagcagtttttaattgggcacaagccactaccgatggttgccctgatgatgaaccctaatctgagaatcatgatgcgcagtctgcttttagtggcagaaaaat

SEQ ID NO: 127505 - DNA, 605 bp, Glycine max
  Clone ID: PAT_MRT3847_86141C.1
tcgggatcggtacttctcttttcattgtcgcgcagacacaaatcagtaccatacgaagcccgacactacgtgaattaagcatgtcgggcagaaaggaaacggttttggaccttgcaaagtttgtagacaaaggcgttcaagttaagcttactggtggcagacaagtgacagggactctgaaagggtatgatcagttgcttaaccttgtcctagatgaagctgtagagtttttaagagatcctgatgatcccctcaaaactaccgatcagaccagaaatcttggcttaattgtttgtagaggaactgctgtcatgcttgtgtccccaactgatggtacagatgagatcgccaacccctttatacagccagatgggtcttaagtgtgaagtatttctatcttaaaatctgtatgctagctgatcaatagtcatcgcttagctactgagacattaatgtggagattctgattaacgttttgtctattttgtaagcttggagattctgacccatttcttgttcttgttctgatgaagtttatttctctgtgatgtgtcgtcagctacactttgaggacttaatatttatcatggattacaattgcccat

SEQ ID NO: 127506 - DNA, 938 bp, Glycine max
  Clone ID: PAT_MRT3847_86142C.1
acggctgcgagaagacgacagaaggggactcctctcttctaagttctctctctgtatattcaaatccacagtatactatcacattcgcttcggtacttctctcttcattgtcgcagacacaaagcagcactaaaggaagccctacactacgccgattaagcatgtcaggcagaaaagaaacggttttggaccttgcaaagtttgtagacaaaggcgttcaagttaagcttactggtggaagacaagtgacagggactctgaaagggtatgatcaattgcttaaccttgtcctagatgaagctgtagagtttttaagagatcctgatgatcctctcaaaactactgaccagaccagaaatcttggcttaattgtttgtagaggaactgctgtgatgcttgtgtccccaactgatggtacagatgagatcgccaacccctttatgcagccagatgggtcctaagtgtgaagtatttgtatcttaaagtctgtatgctagctgatcaatacgtcatcgcttagctactgagacattaatgcggggatactgattaacgttttgtctattttgtaggcttggatatttattatatgctttggattaatagaatatcacccattttatgttattgttccgatgaagtttatttctctgtgatgtgtcgacagctaatttgaggacttaatattcatcataatgaaagaagctaattcatacttgcccatgagtgaaagttcttcttcatggcattttatgacacttcccttcctcaccattcttgttaatcaatcttaccacacatccacgcaatctagtctagatgttacaggttagaggagacctagtaatggagaatttggatagcttccactaagtcatagattctaaccttatactgtgtttaaaaaaaaaaaaaaaaaactcgagactagttctctc

SEQ ID NO: 127507 - DNA, 309 bp, Glycine max
  Clone ID: PAT_MRT3847_86143C.1
gtcgggagaaaactaacgacggaacgttttcattatagatggaaatcgattggtatatgggggtgttttcggatgtatacctccaatcaagcctaccgacatccaataacctttatcagacatagaaggactcaaagttgttcaaaaggaaaattgagggctaggccaataggtacaacacaattgggctaatgattttttcgctgtgaatgagatttagatgcaatttgttgagtctatgcgcaagcatatcacacatgaacttgaactacattaacaaccacaacgcccttatgaagatgtaagtta

SEQ ID NO: 127508 - DNA, 572 bp, Glycine max
  Clone ID: PAT_MRT3847_86144C.1
ctcttccactacctcttctcactactcacactactcttcctcttccaagccaaagaaggagtttccattagccctttgcaattgatcacacacccacttgaccccttaacaaagcaagaaatcaccctcgtccaagccacataggttatgatgtgcgagctggtgtgataatttcaactgcatcaatttacgaccctgaagtgcataagtcacgtcaagtattatacagagggtacatttctgaattatttgtgccatatcaagacccaggtgaggaatggtattacaagactttctttgatgctggtgaatttgggtttggtcaatctatggtttctttggaacctttgcatgattgtccaccacaagcacagttcctagacgtatattttgcggcaagtgatggtagcccacaacacttggagaatgcaatttggtgtgtttgaacaatatggtgggtatcagttgggcgtcacactgaatcaaggcattccccaatgaggcaaattcgagaagttagaatctgaatgtgaggtctaaattggtagatccaagttgtttaaccgttgggc

SEQ ID NO: 127509 - DNA, 442 bp, Glycine max
  Clone ID: PAT_MRT3847_86145C.1
gggtctaggggtgtgactgacataattgcgtgatttacctatgcctgtcgggattatgagccctcttatcgataggcgagactatggagaatattgaatccctctgtaatgactatgactttcagggtcacctataggaataaataagagatctatagctgcgggcgcagacctcgccaggtggccggccaccccacattgagtgctggaggactagacctcaggacttatactctttctcctggggatcctgtgcatctgcccaagtgccctacatcataggagatccttccttgcgttgagagctgcattggcaaaatctacatggcctcatgaaggcaacaaggccgatatctactattaccctctacccacgatgatgagtcatcgattgttgtttacagtatgccgaaaacaagttaaactaacaggtgttgctgct

SEQ ID NO: 127510 - DNA, 431 bp, Glycine max
  Clone ID: PAT_MRT3847_86146C.1
ccggaccggaaggcccggggcgacccacgcgcccgtttataacaaaagaaaaaaaacccggacacgaggggacaaaaaaaaaaaaaccgggggaaaaaccccaaagggagcaagaaagaagggacacacccgacgcccaaaggccggcgacgccagggcgccgccccagggcccccgggacacagcccacgggccgggcgcaaaaaacgccgggaccaggggggcccaaagggaaaccacaccgcggcggcgggccaacccccgcccgggggaaacgccggccaacccccaaaaaggcccccaccaggacaccccccaacagacagccggcaaaaaagggagaaggccacgcccccgggcccgggccaaaaacagcccaaccgagaggggcaaaaggacagccccccgggaaaaagaaacaggccccgggg

SEQ ID NO: 127511 - DNA, 222 bp, Glycine max
  Clone ID: PAT_MRT3847_86147C.1
ggaaaaaaaatctagccggaaattctccattcaaaatataagcttttatgaacaaagtttcactggtttcccaccccaaaagggattacagggttaacggggcccaaagggccccccaggggcctggttgcaataaagatcatttccaaaatagatctggcttttttaaaataaaaaaacttctttggacaaaggtcattgggttcaaaaccccaaaagaaa

SEQ ID NO: 127512 - DNA, 229 bp, Glycine max
  unsure (1)..(229): unsure at all n locations
  Clone ID: PAT_MRT3847_86148C.1
ctcgagncgctcgagncgattcggctcgagtgttgtgacagnttgtatgattctttgagtgacgtggatgaccngagtgtgcaagctttggaacgtcatcgaagtcacgtacttcactggctactgatgacgtgactatagtgcaatcactgtctgcttacgctgagatgatagtgatagcacttgacgctctgaatgccgctgatggatcgagtacatcagcgatatc

SEQ ID NO: 127513 - DNA, 1325 bp, Glycine max
  Clone ID: PAT_MRT3847_86149C.1
acgcgttaagctaagcaaagcttccttacctttctctcttttctctctttctcttcccttccaagcactgccataacgcgatcgaatgacaacctcgttggagacaccgccttctcctctcgacctccacaacaacagccaggaggggatgcgcgtgatgggttatttttcttctcctcttttcagcccttcctctgataaacgtttctggagcactctcaggagcaggatcgacgcgctcctcgatgctcgtcaatccgaaacctcaactcactctcctacgaatgaacaaggcaacaaccggttgaaggaagattctatgttgctgatgagagggtttgactcagttgcccacacactctctctgttgtccaataatttggacaatgcccttcatggtgctagggaattggcgaatccacccacattaactgacatattccacagcaaatatgataaggtggaaaacaaagaggattcgggggagaaacagaaagaggaggaggagtcaaagcaaggaatgaaaaggaaatttgaccctaatgatgtctctgaagagaatgctgttgactcacaaaaggaggagaatgggaaaaaaatgatggatacgaacatcaagaaagctaaaaatcttgcagtttcaatggcaacgaaagcggcctcactagcaagagaattgaagtccattaaatcagatctctgttttatgcaagaaaggtgtggtttacttgaagaggagaacaggagactgcgtgatggatttgcaaaaggagttagacctgaagaagatgatctggtgaggcttcagctggaagcacttcttgctgagaagtccagactggccaatgaaaatgcaaatctggtcagagaaaatcaatgtcttcatcagcttgtggagtaccaccaacttgcctcacaagatctctctgatgagtcatatgagcatgctcttcagggaatgtacttagacttctcgtctccgccgccaacaattccagaagagacaagggatggagatggcgacgaagacgaaaatggagaaccaacacacacacgcaggaaccatatctgcaagttttctgcttcgattgatgatggagaagagtaaactcagaatggagaaccaaaaacacccatgaacgatatcagcaagttttgtgtttcacttgatggtgaggagaaaactataatattaggcaccatcataacaccccttgtaatgatgctgctgctaaaattcctcttatttccgccaaaaataaattcttttctcatctaattatagtgtccatcattgttcataaatactatacatttatgctcgt

SEQ ID NO: 127514 - DNA, 1015 bp, Glycine max
  Clone ID: PAT_MRT3847_8614C.1
gcacgagtgcgccagttgctcagttccatgttctggccgttgttcttcgccttgctgccggatggcggagtgagccgctcctcaactcctctccctttcccggtactgccgggctttctgctgctgaggctgtgcagggtcctggtttcgccgtggagatgtgtagtcgggtgcctcccccctgtgttgctcttctttccctgctggatctagttgttatcccgatcatatctgtctcctgttcccccgcaattcctggatttgcgtacatcataaaatttttcccaaattataaactaaatgtgattactgtggtgctccgggtatccagtattgtacctgaaataatgggatctgacctcagagataacataatcaaatgagatctttgcccacctttcatgacaacatctcacaccctgtggccgctgtcgttgcaaccttcaattacttgtatatcttccctggtttgattttagaaaaataataacatgaagttattgatttgcaggaatctaaatctcttaaagacataccagtggtgattatgtcctcagagaatgtcccagcaaggattaacagatgcctagaagagggagctgatgaattctttctgaaaccagttcaacagtcagatgtaaacaagctgaggccacatttgatgaaatcaaaagttaaggatggggaagaccaacaaatcagtaacaaaaggaaagaaacagaagaaagccattccccagataaaactaggacaaaaatggagcctcaaaaagtggttaatttcagttaaaaattgattataattgatacatcatagatgttccctagaaaattttcctatcctctgtctcaccaactaactagtgagaagagtagatggcatctcaatcatactaaagaaatgtgtagtataggcccctgacattaaacagaatttcatttcaaattcaattttgtctgacatataaattataaattgtttcagctcttaatcttatgtgactaatgcaaaaaa

SEQ ID NO: 127515 - DNA, 421 bp, Glycine max
  Clone ID: PAT_MRT3847_86150C.1
aaccatgtgtggaacccacgtgaaaattatgctggggcttttatgctggtatatgtattgattatcaatttatcattgaaaggtttttatagttggcttctggtataaattctggggtttatttgtagtgaatactaggtcatccgagggagcgatacctggccccaccttctatatcttggattgcagaatgaagcaaatagtttattagatccattgatattttttcaaaaccgaattgagttgaaaaataaatatttgttggtgttggaatattaggggcatcaagtcctagtgttcaacagggtcaactttgggccagagatctctttcctatagctataggactgctccaaggttcagttttgagcccctatttttttccttggacttgaaggtgcttaccaagcatatctaacag

SEQ ID NO: 127516 - DNA, 597 bp, Glycine max
  Clone ID: PAT_MRT3847_86151C.1
ccacgcgtccgcggacgcgtgggttgcaagagaattgaagtccattaaatcagatctatgttttatgcaagaaaggtgtagtttgcttgaagaggagaacaggagactgcgtgatggatttgcaaaaggagttagacctgaagaagaggatctggtaaagggagttatcatatatagccattgctatgatgaattaggcaacacattctgaaacacactttatttggttggaatttattgaattaatggttctcacttcttatttaatgaacttcactagtaattttgtagttttcaataaatttaaccaatattaaagaatgtgttagagagtgtgacaccagtaactcctcgatagaaaatatatatacatagaacaaactaatctttgtgggggatttggtggctgcaggtgaggcttcagctggaagcacttcttgccgagaaatccagactggccaatgaaaacgcgaatctggtcagagaaaatcaatgccttcatcagcttgtggagtaccaccaacttgcctcgcaagatctctctgatgagtcatatgatgagcatgctattcagggaatgtacttagacttctcgtc

SEQ ID NO: 127517 - DNA, 208 bp, Glycine max
  Clone ID: PAT_MRT3847_86152C.1
ccaaacccagttgggcagtttagttttgcttttaaaccaaatttaagttccgaaaactttatttttgaaagaagcaaaatttttccccatactaaatccctgttgggtctccgttcaaattgtttttccctgaatttcaagataaatttaacggtttaatgcaaaataagcccaaaaaaaaagatcctgtttttttgtgaaaacgttt

SEQ ID NO: 127518 - DNA, 223 bp, Glycine max
  Clone ID: PAT_MRT3847_86153C.1
taaagagacaaatttcatcgtttaaaatctcaaaggacaaattaatttccaacccaaaaccattgaataaaaactaccaagccttcaaggtctattcatatcctaaaaattaaagcagcaagtgctttgttgggcggcattcctttccctactttcctcaatgattgatagcttaaatacctttaccctgggaaagagatatccacgggttttgttcccttgc

SEQ ID NO: 127519 - DNA, 149 bp, Glycine max
  Clone ID: PAT_MRT3847_86154C.1
cagagagtgatttcagtgagtgatcggtgttcacttgatctgatcatactcgtcagcgtcaattgaacgtagtgccgataggagacatcgccgtcagcacgattgaagaggcgactcacgacggtcaccttgaagagcggtttggctga

SEQ ID NO: 127520 - DNA, 588 bp, Glycine max
  Clone ID: PAT_MRT3847_86155C.1
aaataaatgggtaattcccattaatcataaatatttatttgaatatgaatataaatataattttctccaccttcacatacatacacatgccactattcatcatgtcatacatacataacatatgttccaacccatccagctgcgatagtctgacccaacaaacccattacggccttgcctcacccaccgttagtgacgtatactctctgccttcgttctttctttatatataaccctcttcctttgctctctttccactcttcaaattaaaccagcaaaatcttatcttagcaatagctacccctatcacaacaatactctattaggcaaaaacaccaaatgggagaggttagttttttgtttttagtttcatcatgtatgttgttcaccatagtatattcagattcctgaaattcctttttttgctctctcagtttctaattaattaaaactcgtgtggtacgtttatggcaggaaaaagagcagcctaagaatgaaaccgagaagaagcccgaggaggccgccgcagcccccaagaaagacgacggacccatccctgtcgtttacaaactcgacttgcattgcgag

SEQ ID NO: 127521 - DNA, 258 bp, Glycine max
  Clone ID: PAT_MRT3847_86156C.1
gacacatttactaggggttgaacggcgccttgggttatggcgtaaaaatggtggctttctattttagggaatagggatgctgctgcctgcggtggtggcttattattatcagaagaagtttaccttaaggttagtacctagaatctgttttggcaatgggttcagtcacggtctagacagtattgattgctacactttatgcaatcatctcactcaggacttacttgcctagtatcaatgtagatgcaagtaataatg

SEQ ID NO: 127522 - DNA, 479 bp, Glycine max
  Clone ID: PAT_MRT3847_86157C.1
ggtgtgtcactcgcgacaaagactcaagtatatcttatggaaaaatatacatttctctggccgctactcataagaaaatatagatgtagatgaccaagtactagacttacacaccccaaggtgaacccctcaaatacttaaccgttgcaccccaaaagaggggggggcgccatgcacatgaaccttatgaaccctaaattacaacaagtgaccgggggagaaatcatggttttccacttgacggccctgcaagtgataaaaccaccccttgaaggacactcctcactttatgctgtttggataaagacacaggggtgcctcacataattggtgttggctaaactaacacaggcatgtcttatgccgtggggggactatgaacgccaacaaaacgatacgtgctgagaatccctcgcatcatgatttgcgttcataaatggcaacatggagggaaatgaacatgatgcaaatcactgggg

SEQ ID NO: 127523 - DNA, 139 bp, Glycine max
  Clone ID: PAT_MRT3847_86158C.1
aatcttaagaacaaagtagtttttatatttaaaagttccaatacgagacaattaggggcagcaacacatgccttgttaaataaatttttgatgacaagtccaattatctttgcatgctgttttcttttatcctccagcc

SEQ ID NO: 127524 - DNA, 649 bp, Glycine max
  Clone ID: PAT_MRT3847_86159C.1
gtttgtagtcatgtagaatagctcccatagtctcatgctgttttgtcttatattccttgaaattttgagattctgctttctgtcaccacaccagaattggaacctgttacttctttgcagttgaacttgtgtcgaatccaagggaaccaaattaaatactaataacataaatttgcataatcctgaaatcaaatctgttaggaagagagaatgaattaatagcttttcagctcttactattgcagccaaggaggagaaatttttgcattgttatgttatgttgttatttctttatcctgttctctcccttttatgtttctggaagatagaggaaggaaattgggagtagataagaagccttttgtcctttctttgaatagacaaaatgcttgcagtagaaatgtttagaactttagattcttgaactgtatattcattagaaattgatttaacgccccctttagttatcatatccctttaaaaaaaaaaaaagttgtgactttggaagttcggggagaagaggggtttgacaaaggcaattggtgaattccatcctacataaatgtcggtgctccctttgactagtagagagtttttaagctactagctccatcaaagaaccattttagattaaattggattgtaagcg

SEQ ID NO: 127525 - DNA, 374 bp, Glycine max
  Clone ID: PAT_MRT3847_8615C.1
attattcctcctaaccttccgagggcattgaggggtctcttaccatgattaaggcgccattcatactcttgtatgagcctgcttatatatgaccaaattaaaccaatcaccttcgctttatatcggaactatggccataaaaatgggacacctaccaagcactacatccgcgactaggaaaagatgaccaaccatttcttcaaaatcctacacatgaaatggaatagtcgcccacataccaactaagaagcttacaacgtttggcatgcgcttaaggaccaatggagccatgaacacagctgcaccatggaaatcgaacctacccttgccaatatatctcgagcttcaacttgtcaatggctctcgcatgacaa

SEQ ID NO: 127526 - DNA, 419 bp, Glycine max
  Clone ID: PAT_MRT3847_86160C.1
cccactcgttcgtccacgcatcttccaactcgtacgactgtcagtgtgtcaccaccatgggcactttcacataccgaagccttctacgagattctccgtccatgtgccttgaaatcaatgtttctgacctgctcttacggctaacttaaccgagaagcgactatgaagccattggtgtgccctacttatgcctatttcatggttgatgccatgaagggagagtggttccatggccaacgttgactaccttaagatagtgcgtgtctcctgcatgaacatcggcttcgtctcaaatgatgtgggactggatgccgacaactgcaaggtcctcgtcaacattgagcagcagagccctgatattgctcagggtgtacacggccaccttaccaaaaaacctgaagaaattggtgctggtgacc

SEQ ID NO: 127527 - DNA, 763 bp, Glycine max
  unsure (1)..(763): unsure at all n locations
  Clone ID: PAT_MRT3847_86161C.1
gtaccgcactgcaggtaacccggtccggaaactcccgggtcgaatcacgccgtccgggctcgagctcaactcttttcctttttccagcctccctttaacccaaccaatttgccatgtcaagtttggaggaaccacttggtcttgacaagttaccaagcatgaataccattgacaggattcagaggttctcgtctggttcttgccgtcccagagtcgataacttgggcatgggaaactgctggattgaaaggaacgaagttgcagcacatctaacagctgcaatgaaagatgatgaaagagtatacagcagagacattcccatggaaaatacaaacaagggacttatccccagatgactccttcaatcaaaaaactctgatcaaagggaggaaagtcaatgaaatttggaatgattgatgattcattctctgattgccaaaccagtccaaaatgccataccaaagatttgcaaggtttggcttataagtatctgaatagtataccaaagtttgtaaagatagtagaagttggtccaagggatggattacaaaatgagaagaacattgtacctacagctgtaaagattgaattgattcacagactagcttctactgggctatctgttattgaggctacaagtttntgtttctcccaaatgggtcccacagctggctgatgcaaangatgtaatgcaagcagtgcataacttgagaggcatcagattaaccagttctgacccctaattaaaaggggtttgagctgc

SEQ ID NO: 127528 - DNA, 403 bp, Glycine max
  Clone ID: PAT_MRT3847_86162C.1
gcgctttggttcagcagagtgtcttcagtcttggctccgaacactgtttgcaaccgtcctctgtttaatgactcactacctccgaacacgtaggtagaaatgtctgtgtctttctcttcaacctcggtttcgttctcggaatcctcatttgcattccaaagacctgctccagcacatctttgctcaaattcactcaccgttgcatcgaacaactttcattcagcaacaggtggtggtcgtcttgtgctgaatgttggaggcacctgcttgtgtcgaaagtttcgtggtttgaaactgtggctacttgagagactcagcttccaattccagccaccaaagcaacctaggaatagaaaccatcacttcaggattaatttggaaaaatgaaagggatcggtttctg

SEQ ID NO: 127529 - DNA, 187 bp, Glycine max
  Clone ID: PAT_MRT3847_86163C.1
cttaattgttctaaaggcgaggcgcattgtcttcgactatattcactccgggaatggcttccgtacccttttcggtgatgaacaagtctatgccatatatctgttactgaaattctgtcctttcatcgtaggtctgaacatcagagggctcaacctctctgtggtggtgtgttccacattcacatgg

SEQ ID NO: 127530 - DNA, 265 bp, Glycine max
  Clone ID: PAT_MRT3847_86164C.1
ggattctgacccctcaagcaagctctcatgtttaagctttgtgaatagaaaaagtttggttgggaggacaaacttcattaaaagtagctagctagtcaggttcctcgaaggtgaaaattagtcaaacaggattctgacccctcaagcaaggtcacatgtttaagctttgtgaatagaaaaaatgtggttgggaggacaaacttcactaaaagtggctagtcaggttcttcaacggcaaaaattagtcctcaacaaagttgattaa

SEQ ID NO: 127531 - DNA, 455 bp, Glycine max
  Clone ID: PAT_MRT3847_86165C.1
gtcactcgtccggaaaaaatgtaaatgaaatgatactgggaagatagcgtataatacatggcgcgaaaccctagatgatagttagttccaaaagacaagggtatactattacgatgagatgttctaccccacactaaagtagagtcagtgaggctggttgagttcatgtgaagaaaactgcggagtgtctaggtggtgcaatcggggatggggagatggaggaaacttatcttattttgatttcagcatgacttatgtggaagcaggaatgatgcgttcccatcttgtaaatgtatccttgcttgttggtgctgcgattacatggggcattatgtggccattaatcaagggactaaaaggggaatggttacctgcaagcatagtagagagtatcataaagagtcttaatggttataaggtttatatctccattgctttgattcttgatgatgggc

SEQ ID NO: 127532 - DNA, 424 bp, Glycine max
  Clone ID: PAT_MRT3847_86166C.1
gggacaacactacctggggccccataaaattccggaataaggaaaagccctttaaaaaaaattggtaagcgggggttttttttttttcaaggggcaaatacaggcccaagggggataaggccctgaaaatattggggtcccgaaaaaaaaaaaaaaaaaggggcaccccccttttagccgggaatttaaaaaggggcattcataaacaaaaggggagggcaccttgaaaaaaaccattttaaaaacttcaggcaaaaactatttgaaaagcggacatcggggggggaaagaaccccttacccctcgcaatggggaaaagctgacattttacaagctccataggggaacaaactggtcttttttaatttggggaaaagggggtcgaccagcaatgggagaaaaaaatggatatttaacctgacct

SEQ ID NO: 127533 - DNA, 623 bp, Glycine max
  Clone ID: PAT_MRT3847_86167C.1
agccgtcggccacgccttcggaacccggttcatgtctccaactgcaattccacgaaccccccaatgccgtctctttgcccacatgggccattcacgtgtccagtgtcgctgaatggattatagctatggctttggtgtggcaatacggagaaaaatctggatacccagcttggaagggcctttcttggggaatggtacctctacttggtggagctttttgtgcgtgcacatggcatttcttttataactctgagtccctcgaggtattggtggctcttcaagcggcactgactgttataggtaatgccacaatgtgcatagctgcatatcggatttacaaatcatcccaaggctcctagaacttttgaattgcatgaaaatgagaatctggaagcatgtatataggcctcaatgaaaatcaaaggcttttgctgattggataaacatgctagcaggtgctcattctttctgaattttatgcacagtaggttcattgattttatgtaaggtagctttaagtgtatggtctgtactaaagagcacatatttattgtgtaaatttttaacaataggaagaggtaagtatatctggttgtacatagtgggatgatttcaaacaaaaa

SEQ ID NO: 127534 - DNA, 1154 bp, Glycine max
  unsure (1)..(1154): unsure at all n locations
  Clone ID: PAT_MRT3847_86168C.1
actgaaatctaatttcatttcattcattacaacatcatcgaatcagttttctctttttaaaatccagaacctgaataaaacctgctttcaattgaaacatattaaaaaattacaatttgaaaagaagtctcaggaaagtaggaagtgagtgttagtggtggacttctatgtttaatttgcaatgtcaattttctctacttttagtttgttaaaacaaaatactagcttgttgaaaaaagtaagtattagagacgaagtaggagaatcccttcctgtcatggtgtaaattgtataattagatattactaatttactagttacttcaatctgaacacttaaaattttctattttccctcatagaaactgaactcgtgtaccaagttaccactaatccactaccattactatctatacttctcagaatcaacaaagtttaatttttggattaccaagttgcactgtgagatccattctcatccattacatattgtcatctatgttagtgtgacactgtttagaaaattgtcttgttggattacaatagtagacattcggtcgttccgtcttgtaataaaaaaatgtttgactgtgaattatgctgaagatatgaagcgattggggttctctaatgggctgtaggtattggtggctcttcaggcggcactgactattataggtaatgccccaatgtgcatagctgcatatcggatatacaaatcatcccaagactcctagaacttttgaattgcatggatgtgagaatctggaagcatgtatatacgcctcaatgaaaatcaaaggcttttgctgattggtaaaaattatccttcatgggctgcatgaatgtgagaagtgtctgctggcataccaaaatattttagtgacgaagatggaattcatgtgtcctgatttctgtttcctattgtcttttattttcttgtgacaggataagcatgctaggagatgttcattctttttgaattttattcccagtaggttcattgattttatgtaaggtagctttaagtgtatggtctgtactaaagnnnnnatatttattgtgtaaatttttaccaataggaagaggtaagtatatctggttgtacatagtgggatgatttcaaacattttatgttgtctacattccggttgg

SEQ ID NO: 127535 - DNA, 2153 bp, Glycine max
  unsure (1)..(2153): unsure at all n locations
  Clone ID: PAT_MRT3847_86169C.1
gggcgacacgcggtgcgctggatccaagatgttgaattcttgttgccttggggaaatctgacttcaacgctgcgaagcataaacaacaatctatgatcttagtggatgtcaagactcctggcatccacataaagagaccattgacagtgtttggctttgatgatgctccgcatgggcatgcagaaataacatttgaaaatgtttgtgtgcccgcaaaaaacatcatacttggcgaaggacgtggatttgagattgcccaaggtaggcttggtcctggaaggctccaccattgtcatgactcatgagttcagtcttttagcgtaatctaaatgcattggagtatttgttaaaaaaacataggtttgagccaagcttcttgatagaagactaatagacatttatgaggctatggatgactacctattttctttattttttttccctttaataggcaaggagattcatatatcatcaatgggacaaaatggtggacaagtggtgctatggatccaagatgtagaattctgatagtcatggggaaaactgacttcaatgcagtgaagcataaacagcaatctatgatcttagtggatgtccagactcctggcgttcacataaagagaccattgacagtgtttggctttgatgatgcaccgcatgggcatgcagaagtaacatttgaaaatgtttgtgtgcccgcaaaaaacatcatacttggcgaaggacgtggatttgagattgcccaaggtaggcttggtcctggaaggctccaccattgtatgagactgataggtgttgccgagcgaggcatgcatatgatgattcaaagagctgttggcagaagaacatttgggaagttgattgctcaacatggttcatttatttcagatatggccaagtgccggatagagctagagagcaccagattgttagtgttggaagcagctgaccaacttgacaggcatggcaacaaaaaagctcgagggatattagcaatggcgaaggtagccgcaccaaacatggcactgaaggtgcttgacatggcaatacaagtgcatggagcagctggtgtatcatctgacacagtcctggcacatctctgggcagctgcaaggacactgagaatcgcggatggtccagatgaagttcacttggggaccatagccaagttagaactacagaaagccaaactttgagaacctgaacatttttctccacaggactaaatggaagtcaccaaataaaaactaagcgaaacgggaaattaaacttaaaccaagaaaatgttccaaggagaaaacctctgaaaatagccgtgtttcaaaatgctgtttgaagcattatgtaacatgaggttgttcaaaataagctttctctgtgtattccaggtttgaaaattgtaactttcaattccttgtttaatagtaaatatcactttcaaagctctaaaatgaatgagctttctcaaaaaaatttggggctattttgtagatatccttccccccctcccactctcaaaaaaaaaacttgataaaatctaagcttgttaaaaaaggatacttaanaaagaaaataatataaatataaagggtccatgaaacatgaattgaaaaagaactcatggatgctagagatgctggagggatgggcatttctagaaaatataactcaactggacagctaagaaaatattcagcctgaagagctagatggcctattgcaatattaaacatttggcttctatgattattttttaaattcttttattagctttcagtgttactatgtttttttgaaaggaaaaaaaaaggtgctctgaatgtatctgcttttatgcagcttgatagtgctgtgagagcaagaaatcttctctttgatgggagcaataattatcactctagtgatgcaaatgacttgctattaggggctggtctcacaaatctcgaatatggatacctttgtgagatcatgggtcgttctctttgggctccacaagtgtttaactgtggtgcacctgacacaggtaatatggaggtaaggatggaacttatagatttgcttggttgatcaataactgactgactgtacttggattctctcccgggttgagcgttaccacgcactctatgatgcatttttgtctcggacgcggg

SEQ ID NO: 127536 - DNA, 6750 bp, Glycine max
  Clone ID: PAT_MRT3847_8616C.1
tttcttaagaattgacttagtgaaatcccatatttcatatataagaaaaaggaataatccgcccggttcaagatttatcttggataatgagtcggaccgcaccaccatcaatccatttttttctattgatttgagggaaaaaattcaacaatcacttagtaaaaatcatggaactattcgtatgttgttgaatagaaatgaaaaatgccgatctttgataattttgtcatcatcgaattgttttcaaatacgatcattcaaccatggaaaatattacaatgggataaaagagggaattaatcaaattcaaagagatgctatgattccaattaaaaattcgttaggtcctttaggaatagcccctcaagttgcccattttgatttttaccgtttaataactcataatcagatctcgataattaaaaatgggcaacttgacaaattaaaagaaacttttcaagtattccaatattatttcctggacgaaaacgagagaatttataaacctgatctgtgtagtaacatcattttaaatccattctatttgaattggcattttctccaccataattattgtgaaaaaacgtttacaataatgagtcttggtcaatttatttgcgaaaatgtatgtatagttcaaacgaaaaatgcaccacacctaaaatcgggtcaaattctaacagttcaaatggattctgtaggaataagatcggctaacccttatttggcgactcctggagcaacggttcatggccattatggggaaatactttctgaaggagatatattagttacatttatctatgaaaaatcgagatcgggtgatataacacaaggtcttccaaaagtagaacaggtattagaagttcgttcgattgattcaatatcgatgaacctagaaaagagagttgatacttggaatgggcgtataacaaaaattcttggcattccttggggattcttgattggtgctgagctaacgatagcgcaaagtcgtatttctttggttaataaaattcaaaaagtttatcgatcccagggagttcacattcataatagacatatagaaattattgtgcgtcaaataacatcaaaagtcttggtttccgaagatggaatgtctaatgtttttttgcccggtgaactaattggattgttgcgagccgaacgagcagggcgttccttagaagaggcgatttgctatcgagttctattattggggataacaaaaacatctctgaatactcaaagtttcatatctgaagcaagttttcaagaaactgctagagttttatcaaaagccgctctccgggggcgcatagattggttgaaaggtctgaaagagaacgttgttttagggggaatgatacctgttggtaccggattcaaaagaataatgaaccgttcaaagcaaaggcaatataacaagatgacctcggaaacaaaaaaaaagaatttatttgagggcgaaatgagagatattttgtttcaccacagagaattctttttttttgtttcaaagaatttatgcgatacatcgcagcaatctagtatttaataattcctaaaataatgattcttaagagcggattcatcttcggtcattttattttgtataataaaagaaagataataaagagaataatcatattaaatattaaatagaaaaaatggcccgatcatttatcaaaggccaatcttcggtagaagagaaggttcctttggaacacttatttctatttcagtataccgggtctctttctttcatttcaaaaaatttatagaatttcgattttgaaatgaaagaaaagtgtggggataaatataaatgacaaaaagatattggaacataatcttggaagagatgatggaagcaggagttcattttggccacggtactagaaaatggaatcctaaaatgtcaccttatatatctgcaaagcgtaagggtattcatattataaatcttattagaactgctcggtttttatcagaagcttgtgatttagtttttgatgcagcaagtgagggaaaacaattcttaattgttggtacaaaaaaaaaagcagcggatttagtagcacgggctgcaataagagctcggtgtcattatgttaataaaaagtggctcggcggtatgttaacgaattggtatactacagaaacacgacttcaaaagttcagggacttgagaatgcaacaaaagacggggagactcaatagttttccaaaaagagatgccgctatattgaagagacatttagctcatttggaaacatatcttggcggcattaaatatatgacggggttacctgatattgtaataatcgtcgatcaacaagaagaatatacggctcttcgagaatgtataactttggaaattccaacaatttgtttaatcgatacaaattgtgacccggacctcgccgatatttcaattccagctaatgatgatgctatagcctcaattcgattaattcttaacaaattagtatttgcaatttgtgagggccgttctagctatatacgaaattcttgattaataataaaataaaaaaattattggatttagttggaggggttcatagatttagggaatcgattactatactagtaataaattgtacaaaaaataaaaatataaataatataaatataaaaagaacaaacacaaattttatgtgattagtcgcggtatttaaaataaaaaatgaaagtagacaaataaaaaaggaaaggagatgtttgaataaaaataattccccttcaagttcttattttttgagaggacaggacaatatgaatgttttattatgctctatcaacacattaaaaagattatatgatatatctgctgtggaagtaggtcaacatttctattggcaaatagggagtttccaagtacatgcccaagtacttattacttcttgggttgtaattgctctcttattggtttcagccattctaattattcgaaatctgcaaaccattcccgctttcggtcagaatttctttgaatatgttcttgaattcattcgagacgtgagcaaaactcaaattggagaagaatatggtccgtgggttccttttattggaactttgtttctatttatttttgtttctaattggtcgggggctcttttaccttggaaaatcatacaattacctcacggggagttagctgcacccacaaatgatataaatactaccgttgctttagctttacttacatcaattgcatatttctatgcgggtctttcaaaaaaaggattagcttattttaataaatacatccaaccaaccccaatccttttaccgattaacatcttagaagatttcacaaaacccttatctcttagttttcgacttttcggaaatatattagctgatgaattagtagttgttgttcttgtttctttagtacctttagtagttcctatacctgtcatgttccttggattattcacaagcggtattcaagctctcatttttgctactttagctgcggcttatataggtgaatccatggaaggccatcattgaccagttttctacaaaatagtccttttcgtttagcttgccgcacatatattgcggctcaatataatctacttagtaaacatctatatctatctacctatatctatatagatataggtagatagatatagatagatattcgattagcatatattagcatatattagtatatattggatattcaaaaaaaaaataataaataaaaaaattaagagccataattagaattctgtatgatatttacgtttacggcgtgtgataaaaagatactatatagaactaaaggagattcccgtttcagttacattcaattcaacgattgaccaaaagagaattcaaaaaataacatttagatcacccaaattccaatatttctatgaaacaataattaaatctaacgaatttatttcgattgattgtatccatatggggtaataataaaagggggaggagagcttaaaaaaacaagataacaaataaagtataagtgcggggggtcaaactgggtgtatataatcggatcactataagacaactctttcttttgaggtttcaaagaatgattttcgaattcgattgaatctaaaacacaaaagaattggtttacaggatagaagaaacccacgtatatgtgataggatattctatatgaactagttatatatgaactaaccatatccatatatattatataaaataactaatattttatatctaaaattgccccgctactactgtaaatttcgatagggattaaaaaacaaagcctttccgtttcatctcgaattgtgaattgaatattcaatgactaaaaaaatggaataaaaaaacgaagaattcaaagaatgattccaaattgaaggtaggataagaacaaaggttctacatattcacaaaaaaaaactatgtatgtaggtagagacgaaaaaataaatctcgaagtaattcgtagagttcaataactattattattttcaattcggaattcttattaattactttaaaccgaataaatcttgataattgaaaaattaagtcataatttattggttgattatatcattaactatttctttattttatatttaggttacgaggaaattatcatgaatccaattatttctgctgcttctgttattgctgctgggttggccgtagggcttgcttctattggacctggggttggtcaaggcactgctgcagggcaagctgtagaagggattgcacgacaaccggaggcagagggaaaaatacgaggtactttattgcttagtttggcttttatggaagctttaacaatttatggactggttgtagcattagcacttttatttgctaatccttttgtttaatcctaaaaaaatagaaatacatatccttttttccgtggacttgctttaccggtcttgctttttcgaattctatttatattaatatttcactcctataattctttatccgttcggacaagaacacaggggaaggactaattgaaaggtgaagaattcacatactgattcgccctctttcttctcttttttagtccaatgaccccccctttttttttaagataatttttctcaagtgttaaaacttgagagattttgcaatggatataagaactggtatctaattcgaataagtatcattcttttagggaatcttccaattgattgaccaatccaaataatatatggatatatatatatagatagatctatctatatatatatctaactaatataggaatcttagaaagataattagtctattcataagaggagatgagatcatatgaaaaatataaccgattctttcctttgtttgggctactggccatccgccggaagtttcgggtttaataccgatattttagcaacaaatctaataaatcttagtgtagtgttaggtgtattggttttttttggaaagggagtgttaagtgatttattagataatcgaaaacagaaaatcttgagaactattcgaaactcagaagaattacgggaaggggccattgaacagctggaaaaagcccaagcccgcttaaggaaagtcgaaacggaagcagatcgttttcgggtgaatggctattctgagatcgaacgagaaaaattgaatttaattaattcaatttatacgactttggaacaattagaaaattacaaaaacgaagccattcattttgaacaacaaagagtgattaatcaagtccgacaacgggttttacaacaagccttacagggagctctaggaactctaaagagttgcttgaacaacgagttacatttacgtactgtcagtgctaatattggcatgtttgggacgatgaaagaaaaaataactgattagtctttctattataaaatagagtataggcattatttttttcttctaaaaaaataaaattaagaaattttcatggtaaccattcgtgcagatgaaattagtaaaattatccgtgaacgcattgagcaatataatacggaagtaaaaattgtaaatacgggtaccgtacttcaagtaggcgacggtattgctcgtatttatggtcttgatgaagtaatggcgggtgaattagtggaatttgaagagggtactataggcattgctttgaatttggaatccaaaaatgttggtgttgtattaatgggtgatggtttgatgatacaagagggaagttcagtaaaagcaacaggaagaattgctcagatacctgtaagtgaggcttatttgggtcgtgttataaatgccctggctaaaccaattgatggtcgaggagaaatttcagcttcggaatctcgattaatcgaatctcctgctcccggtattatttcgagacgttccgtatatgagcctctccaaacaggacttattgctattgattcgatgatccccataggacgtggccaacgagaattaattattggagacagacaaacgggtaaaacagcagtagccacagatactattctcaatcaacagggacaaaatgtaatatgtgtttatgtagctattggtcaaaaagcatcttctgtggctcaagtggtgaataccttacaagaaagaggagcaatggaatacactattgtagtagctgaaacagcggattctccagctacattacaatacctcgccccttatacaggagcagctctggctgaatattttatgtaccgtgacgtcacactttaatcatttatgacgatc

SEQ ID NO: 127537 - DNA, 1640 bp, Glycine max
  unsure (1)..(1640): unsure at all n locations
  Clone ID: PAT_MRT3847_86170C.1
tacggctgcgagaagacgacagaagggggaaaaagggtgttatgttatccgaagcagggtggattgaaaagcacgaacaggagcgatggccgcggcaacgttgtacttggcaaaaccgccttcgtcttttactcccaaaattccgtttccaagagtgagggacagtggaattggaactgtaaagtgtcaagttaaaacccaagtgaaagcgggtatcctgggactgggtctgggtctgttccacttccttaacttcgtcgaacccggttcatgtctccaactgcaattccacgaaccccccaatgccctctctttgcccacatgggccattcacgtgtccagtgtcgctgaatggattatagctatggctttggtgtggcaatacggagaaaaatctggatacccagcttggaagggcctttcttggggaatggtctttactcacttcgctttcttcactccatttttcttcctccatctcttattttctgattcttctaggtacctctacttaggtggagccgacgcgcggcggcgtggtacgcgccaacaccagcgtgggccgcggctcccttgttcccggcgttgccgcctgcgtcggtcactcccattggtccggttccaaccgtgggggacgcgggagcgggtaccctggggcggcgtctgttccccctcctcaacgccggcgtccccggtccgggtctccgccgcttcccctccctcccccccgtccccccccgttcccctctccggccgctctcccgcccaccccccctggcccgctctttgccctcgcgggcctgtcgcgtgtccggggtcgctctggggaccctgcctggggcggccgtgcggcgggacggggacctctccggggtcccgccttgggtgcgccttcctggcggttcggttcctcctccggctcccgctttttgtgcgtgtacatggcatttcttttataactccgagtccctcgaggtattggtgactcttcaagcggcactgactgttattgctaatgccacaatgtgctcagctgcacatcggatttacaaaccatgcctttgctcctagaccttatggattacatggaaatgagactctggatgcgcggttggtggccgcggtgctcagggcggcactggctattataggtaatgccacaatgtgcatagctgcatatcggatatacaaatcatcccaagactcctagaacttctgaattgcatggatgtgagaatctggaagcgtgtatatgcgcctcaatgaaaatcaaaggcttttgctgattggtaaaaattatccttcatgggctgcatgaatgtgagaagtgtctgctggcataccaaaatattttagtgacgaagatggaattcatgtgtcctgatttctgtttcctattgtcttttattttcttgtgacaggataagcatgctaggagatgttcattctttctgaagtttattcacagttggttctttgattttatgtaaggtagctttacctgaaattggccctggttcctttgtttgggatggtttccgaatgttatggaatatgatgggaatgcattccataccatacacctccatttcttcccttcaattgaattgtggaatcagnctccttttttcttttttttt

SEQ ID NO: 127538 - DNA, 238 bp, Glycine max
  unsure (1)..(238): unsure at all n locations
  Clone ID: PAT_MRT3847_86171C.1
tcaccttgttcacatatgctccgatgtggctgcatcccttgtcattcgccattggggttttgctaatgaaccaaatcatctcttaatgcacaggaactcgccagcttttatatgggttggtggcgtagaattggaattgatagctatacctactggtggaataattgttcctatgtttcaagagttatttccacaaatcttgggaatggctggtatggttcgtgagatctccttnggc

SEQ ID NO: 127539 - DNA, 763 bp, Glycine max
  Clone ID: PAT_MRT3847_86172C.1
gccgcgtacgtaagctcggaattcggctcgagtgctgagcgaggcatgcatatgatggttcaaagagctgttagcagaagaacatttgggaagttgattgctcaacatggttcatttatttcagatatggccaagtgccggatagagctagagagcaccagattgttagtgttggaagcagctgaccaacttgacaggcatggcaacaaaaaagctcgagggatattagcaatggcgaaggtagccacaccgaacatggcactgaaggtgcttgacatggcgatacaagtgcatggagcagctggtgtatcatctgacacagtcctggcacatctctgggcagcttcaaggactctgagaattgcggacggtccagatgaagttcacttggggaccatagccaagttagaactacagaaagccaagctttgagaacctgaacatacttctccacggggctaaatgaaagtcatcaaataaaaactaagcgaaacgggaaattaaacttagaccaagaaaatgttccatggagaaaacctctatgaaaatggccatgtttcaaaatgctcctggaagcattatgaaacacatgaggttgttcaaaataatctttctcatagtgtattccaatgtagggagtaatgaatcttgaatatgcataagtatacctaagttctaactctaaagtgaatgagctttctcataaatatttgtggctataattttgtgtgaaatttttattttatatttttcttttatccct

SEQ ID NO: 127540 - DNA, 396 bp, Glycine max
  Clone ID: PAT_MRT3847_86173C.1
ggaaccgaacagctacacaaagttcgcgtcggttggagtaacgggttggctaagccgcgtaacaatgaacaaacactgaaacaccgattatcattacttacaagcgtttttgtctttctttctttctttctccatttcctcatcgatcagatctgaatcaatctcacattcttcaatttaatttcactcgtaattcacttatcgtgatttccgaatctggccgccaaaccctattacctttgtatagatcatctcaactttgctgctcgggagaaataacaaacgaaattagcggaggaatatctccgccattgacgacaattgacaaccggtgagtgctatcaccccgggttgagaatgttacggagagggaagagatggtaagcagaggctcgt

SEQ ID NO: 127541 - DNA, 245 bp, Glycine max
  Clone ID: PAT_MRT3847_86174C.1
ataacaacgtgacaccaaaggacctgacatctatgatctactactctcaacaatcttcctcctcacgaccttcacaggagattccaaacttgattaattccagttcaattaaatctttgagccagagtgctaaaactgcactaatgacaatctcatatcgtggacaagttattgtctttgatgaatttcccatcgacatagcaattgagatcatgtcatatgccaccaaacggatcccccaaagc

SEQ ID NO: 127542 - DNA, 268 bp, Glycine max
  Clone ID: PAT_MRT3847_86175C.1
aagagttaacgtttttttaattaagcatgatggagattgtacagtgcccataaacagccaaagtgttattttgcgatagcattgattctccaaagttaactttgaatacgatacaacgcatgtttacaaatttcaggccttggaggggggcggctgggtaacatggtgggctcgctctgggaccaaaataaccccctgggggcccaagtatccttttgcgggggccctgaggcactccttgggcttttgaacaagtagcctggccctg

SEQ ID NO: 127543 - DNA, 205 bp, Glycine max
  Clone ID: PAT_MRT3847_86176C.1
atatttttttgtatattttttataatttatgatttttttgggggaagagaacaaaacaaacgggtaggggccaaacaaaattgatttagggcaaggcccaagaaaagttcctacggcaaattttaacatgttattggaacgccaaaaaaaataatcaggtctgttcacctgaagttggcaaagggcgtcatggaacttcacatgt

SEQ ID NO: 127544 - DNA, 1080 bp, Glycine max
  Clone ID: PAT_MRT3847_86177C.1
gtacgtaagctgccaatctggctgaggagatagtgaaagagctttttcctctaattcgagtgtacaaggatggcagcgtggagcgtcttctaagctctgaaaacgtggcagcctcccctgaagatccccaaactggagtctcatccaaagacatagtcatcgcagacaacccctacgtctccgctcgcattttccttcccaaatcccaccacactaacaacaaactcctttttcgtccaccgctatctcaacatcttggcctcagaagccaacataatagccatctccgtcgacttcagactcctcccacaccaccctatccctgctgcctacgaagacggttggaccaccctcaaatggattgcttcccacgccaacaacaccaacaccaccaacccggagccatggctactcaaccacgccgacttcaccaaagtctacgtaggtggtgaaaccagcggtgctaacatcgcacacaacctgcttttgcgtgcacgtaacgaatgccttcccggggatcttgaaatattgggtggattactatgctgcccctttttctggggctcgaatcgccagagaatgtgtcaagtatgtatgaactttcagaagccttcaatgcaatatcattgaggcatgcatgcatcctttttatcttggagcaatttgataaattgagttcaaggccagggcactctcttttgattcagcgcataataccagagatccgcaattactttgttaaagctcttacaaaggccaactctcatgacaaccaactgtagtagcagtctcctgtatggtatacagcttgggtaaaagaaatatctaacgccggagtcatgcttcttcttctttttaaatgaggtgtaagcccctttgtgtctgtaacgtcattatcatagatatagcaaatatgaccttcaggaacattgtttttttttcatgcaatgtgacggttatatgacttaacagttcttctctcagatagctacgttcagggaattaccattgttgactttatgattatatgtgtaaatattgtttcccgtgtatatatgaacaagaagttttctgcaaggg

SEQ ID NO: 127545 - DNA, 312 bp, Glycine max
  Clone ID: PAT_MRT3847_86178C.1
gtcattcatagagcacgatatagcactcccattccggggaacccgccacgtgcacaatgctagccgtgcaaggagcacacaacaccctattatatacccactgcgagctacctttcagattccagaacttacgcttacaaacaacaaacctgctcacagaatttggctcaaacataagtcacagttaggttcgtgggagggaaagaaatcgcaccccactcattgcacactgttattatatttagaggccgtgggtaataactctgaaggaacagtcttaaacattaattccattaaggacactgaagggta

SEQ ID NO: 127546 - DNA, 280 bp, Glycine max
  unsure (1)..(280): unsure at all n locations
  Clone ID: PAT_MRT3847_86179C.1
ggcattgggggggcgacccaccccgccgccgcaacacatagtagaaaagatgccacggctgatcacagtgttgtggtgcgcggcggcggcactactgtgcgccgcggagttcgcgtagagagtggaggaggcgggnagcccggtagggagagaggtgggcgtggaggtcaaggtgcgttcggctgatagggcagggccgacgcgcgctgaagttagctagggtcatgagcaggttccgaaagaggtaccgaagccaggaagagatgaggaagaggaacca

SEQ ID NO: 127547 - DNA, 2236 bp, Glycine max
  Clone ID: PAT_MRT3847_8617C.1
gcacgagggaaattatcatgaatccaattatttctgctgcttctgttattgctgctgggcaagctgtagaagggattgcacgacaaccggaggcagagggaaaaatacgaggtactttattgcttagtttggcttttatggaagctttaacaatttatggactggttgtagcattagcacttttatttgctaatccttttgtttaatcctaaaaaaatagaaatacatatcctttttttcggggaccttggctttacccggcccttgctttttcgaattctatttatattaatatttcactcctataattctttatccgttcggacaagaacacaggggaaggactaattgaaaggtgaagaattcacatactgattcgccctctttcttctcttttttagtccaatgacccccccttttttttaagataatttttctcaagtgttaaaacttgagagattttgcaatggatataagaactggtatctaattcgaataagtatcattcttttagggaatcttccaattgattgaccaatccaaataatatatggatatatatatatagatagatctatctatatatatatctaactaatataggaatcttagaaagataattagtctattcataagaggagatgagatcatatgaaaaatataaccgattctttcctttgtttgggctactggccatccgccggaagtttcgggtttaataccgatattttagcaacaaatctaataaatcttagtgtagtgttaggtgtattggttttttttggaaagggagtgtgtgcgagttgtttatttcaaagaatagattggatccaaccaaactgcactttttagttataactaagaaaatgtgcataatcccgcgaattacttctgaaaattacttctgaattaatgaaattttttcaataatttaagaaaaaatatttaagaactatagcatttcgcgatttattggtaatccactttgattctctattaaccaataattttggactattaccatggttaaagtgaatagtttgaagtctagacgcagtgtagtactctttctaccactatgttaatacagaaatgaaatggtttcgataaaattattagatttttttttcgatatagaacactcatgtcgataaaatggcttgaatcctatttacttacggcaagaaattgaaaaacgggttaatttaaccctcccttttgtacaatgcgtaatcgatgacctatgtataaatgaataagaattctttggatttgaagaaaaaaaacaactttgctgacatatatttgtttggtcagaagagtcctccgaatattctggtcttatattggtaattgttttcaatattttaaaaataaaaatagcgaagagaggataggctcattacataaaaaattggtaaatttcccataagtaattgagtgtgagagccaaatgaatcgaaagattcatgtttggttcgggaagagatcctagacattttgaaatgaatggaaagagagtctactttcattaagtgatttattagataatcgaaaacagaaaatcttgagaactattcgaaactcagaagaattacgggaaggggccattgaacagctggaaaaagcccaagcccgcttaaggaaagtcgaaacggaagcagatcgttttcgggtgaatggctattctgagatcgaacgagaaaaattgaatttaattaattcaatttatacgactttggaacaattagaaaattacaaaaacgaagccattcattttgaacaacaaagagtgattaatcaagtccgacaacgggttttacaacaagccttacagggagctctaggaactctaaagagttgcttgaacaacgagttacatttacgtactgtcagtgctaatattggcatgtttgggacgatgaaagaaaaaataactgattagtctttctattataaaatagagtataggcattatttttttcttctaaaaaaataaaattaagaaattttcatggtaaccattcgtgcagatgaaattagtaaaattatccgtgaacgcattgagcaatataatacgggaagtaaaaattgtaaatacggggtaccggtacttcaagtaggcgacggtattgctcgtatttatggtcttgatgaagtaatggcgggtgaattagtggaatttgaagagggtactataggcattgctttgaatttggaatccaaaatgttggtg

SEQ ID NO: 127548 - DNA, 1301 bp, Glycine max
  Clone ID: PAT_MRT3847_86180C.1
ggctcgagaaaagggcccacgcgtccggttgctttggctcttgcacatctttgctcttcagatgatcagagaataatttttatcgatcactatggtcttgagttgcttattgggcttcttggctcatctagctctaagcagcaacttgatggtgctgtagctttaagcaagttagccaataaagccttgaccttgtctcctgtggatgctgctcctccttctccaacaccacaggtctatttaggagagcagtatgtaaacaatgctacattgtctgacgttacatttttggttgaaggcaaacgattttatgctcatcgaatttgtcttcttgcatcatcagatgcatttcgtgcaatgtttgatggtggttacacggagaaggaggcaagggacatagagattccaaatattagatgggaggtttttgagttgatgatgagatttgtatattgtggatcagttgatgtcactctggatattgctctagatcttctccgagcagccaatcaatatcttttggaaggacttaagagactctgtgagtacacaattgcacaggatatatcgccagagaatgtgtcaagtatgtatgaactttcagaagccttcaatgcaatatcattgaggcatgcatgcatcctttttatcttggagcaatttgataaattgagttcaaggccagggcactctcttctgattcagcgcataataccagagatccgcaattactttgttaaagctcttacaaaggccaactctcatgacaaccaactgtagtatgcacccattttattcttgacctctaaccgattgtgttgtacagaatgtagtagatgttattccttttgttgtaccaggtagcagtctcctgtatggtatacagcttgggtaaaagaaatatctaacgccggagtcatgcttcttcttctttttaaatgaggtgtaagcccctttgtgtctgtaacgtcattatcatagatatagcaaatatgaccttcaggaacattgtttttttctcatgcaatgtgacggttatatgacttaacagttcttctctcagatagctacgttcagggaattaccattgttgactttatgattatatgtgtaaatattgtttcccgtgtatatatgaacaagaagttttctgcaaggaaattgtgccgctggggttacttctgccagaccattaaaaactgtcacctgacatggaatgtgttgtaaattattgttgcaaatacttcattcaaatattcaaagtcgaaggcatgctgctgatgcggcccaaaattgttctt

SEQ ID NO: 127549 - DNA, 1117 bp, Glycine max
  unsure (1)..(1117): unsure at all n locations
  Clone ID: PAT_MRT3847_86181C.1
tcgaatttcgcctggagcaactctattcttcttctttgggtgatgtgtttgcaatcacagctgctggtgattttgtagcgcatgtgttgaatgcttatactggagaggatgttgctggaaagatcttgtcatttgcccagaagggtccaagaggaatttgcattctctctgccaatggagctatctcgaatgtcaccatacgccaacctggttcttctggtggcattttgacttatgagggtcggtttgagattttatctttgtctggatcattcacagttgttgacaacagtggcatgaaaagccgaactggtggattgagtgtctcacttgctggccctgatggtcgggtcataggtggtggtgttgctggacttttaactgctgctggccccattcagattgttgtaacgcgtccgatgcaaaattgttgcaagacccaaaagaggaagtatcaacgtgaacaacagatagtggcggccacccctacttcagctggtccagaaatagtgacagcagcaatacctatctcacaagcaaatgctgctgatggtgagaactttctgatacctatacctatctatcagattccagaccaaaaccagagagaatctatcagtgtttcaagtgacaaacagaacctagatgctactcctgatgctgctgctacttggaatggttctgaggaatattcagaccagaggacttctccagacatcaacatatctttgccagatgaatagaacaaggtgatgcagaggctgacatggtagtaatgaatgaaactaacaccggaaatctgtcatgacaactactgggttatatgacatgatgtacagttgtcagaaattagaaaggattattattattattaaggcctcattattttttcttattatagtttctgttgaacatttataagtttttctttcttttctttagaggtggaagagattaccaaaagacttcgtagtaggctgtttattattctgttgggattgttcggtaaaattatttgtagtttttaacattttgcacatttgggaaacctctaagagtttttctcattatcatggatccaagaactatacataaaagttgcttttgccccnaaaaa

SEQ ID NO: 127550 - DNA, 485 bp, Glycine max
  Clone ID: PAT_MRT3847_86182C.1
ggggccccctctttggccactcttgcctgctttaagatgctcgttactatcactggcaaagacgagttcagagacagagatattctcttccaccacaccgttgagcaaagtggctggcaaggtgaacttcaactctttgatgctggcgatgaggagcatgctttccagctcttcaagcctgagactcatcttgctaaagccatgatcaaacgcttggcttcttttctggtttgatggatggcttgtcatgagagattccaaacataataaatcgtgcgggccttcacctgtcttgtttactactccagtttaagattggatgttatggtttatttatttttcaagcatcaaatgttgagtttatgagtagtataggttgcccaagcatctaatgtatatatgacaattagatagttgtcttcatattatataatgaaatcttaaagccttttcactggaaaaaaaaaaaaaaaaaaatagagaaa

SEQ ID NO: 127551 - DNA, 550 bp, Glycine max
  Clone ID: PAT_MRT3847_86183C.1
gcagaaaactttttgttcatatatacataagggaaacaatatttacacctataatcataaagtcaacaatggtaattccctgaacgtaggcatctgatagaagaacctgttaaatcatatagcagtcacattgcatgagaaaaaaacaatgttcgtgaaggtcatatttgctatatctatgataatgacgttacagacagaaaggggcttacacctcatttaaaaagaagaagaagcatgactccggcgttagatatttcttttagccaaactgtataccatacaggagattgctactagagtcggtcgttttgagagttggcctttgtaagagctttaacgaagtaattacggatctctggtgttatgcgctgaatcagaagagagtgccctggccttgaactcaatttatcaaattgctccaagataaaaaggatgcatgcatgcctcaatgatattgcgttgaaggcttctgtaagttcattacatacttgacacattctctagcgatataatccgtgcaattgtgtactcacagagtctttaaggc

SEQ ID NO: 127552 - DNA, 226 bp, Glycine max
  Clone ID: PAT_MRT3847_86184C.1
caaccaaagtggctccagttgttgattcatacttccaaactggggggagctttttggtcttcttgtaaaaccgagcaagtcgggggattttgctttcaacaaaaatcaacctgaacttggagtccttggcctttctgttcctttaaagatgcttcctaattgaaactgcctttttaatcaaagggaaaaaatcctttggaatttagggcgccagccccgtgacctt

SEQ ID NO: 127553 - DNA, 240 bp, Glycine max
  Clone ID: PAT_MRT3847_86185C.1
ttaagatcatatcaccatagatcttcataacgtgatcaatcaaacacaatggttctttttcattgttgctccgcctacgtaaaaaaagagggggaaaagagagaaagatcctccaaaatccaagttgatgataaagagggagacagaaaaaattaataataattccgtccacgaaccaaatacatcatcttcggtccgttgtttcattctttctcaacagaggcacagaacggtgccgaa

SEQ ID NO: 127554 - DNA, 1164 bp, Glycine max
  Clone ID: PAT_MRT3847_86186C.1
gggccggattcccgggtcgacccacgcgtccgctcgtgttcaaatcccgagttccattggggaacggtgttgggttgcgttgcgtcgagggactcagcttcttcttcttcttcttcttcttcttcttcttcttcttcttcctcttctcgttattctctcgtccattctatggagcttcagaggcgtccagatcagtgcctcccggagaggaaagggcagaagaggaagctcgaggaggaattcgatgacgacccacagatctcccctcctcccaccggcgacgctcgcgacgccctcctctccgacgttaaggaacaggtttccctcctcgattccactttctcctggaacgaacccgatcgtgccgccgccaagcgcgccacgcacgccctcgccgatctcgccaaaaacgaggaagtcgttaacgtgattgttgaaggaggcgccattccggcgttggttaagcatcttcaagtgcctcctctgcctctgcccgaaaccgaccgtgtgccaagaccaatgccgtttgagcacgaggtcgagaaagggagtgctttcgcgcttggacttctcgctgtcaagccagagcatcaacaactcattgttgacagtggtgccttaaaacatcttggtgatcttttgaagaggcataagaatggcttaacatctcgtcccattaatagtctcattcgtagggctgcagatgccatcacttatcttgctctcaaggacaggggcatctcttctgatgtagcgcataacaccagagatccgtaattacttcgttaaagctcttacaaaggccaactctcaaaacgaccgactctagtagcaatctcctgtatggtatacagtttggctaaaagaaatatctaacgccggagtcatgcttcttcttctttttaaatgaggtgtaagcccctttctgtctgtaacgtcattatcatagatatagcaaatatgaccttcacgaacattgtttttttctcatgcaatgtgactgctatatgatttaacagttcttctctcagatgcctacgttcagggaattaccattgttgactttatgattataggtgtaaatattgtttcccttatgtatatatgaacaaaaagttttctgcaaggaagttgtgccgctgggtttacttctgccagaccatt

SEQ ID NO: 127555 - DNA, 523 bp, Glycine max
  Clone ID: PAT_MRT3847_86187C.1
acgagcaggagaaaccacccggaaagttttgatttttgtttggtttgaccgtcacgagctctacagcaaactctaccaaggaagaacaagatcatccaagtgtctctatctctgaggccgatgagctatattgactctcccaacctggaaagcttttgctgggcccaaaactgcaaggcggagggtttaggaccttcctcttctgggctggttaattacgcaccgacaccaccaccacaatttttcctttttacacaaatgaaaccggcggacggaagctaccactactaaaagggccctttctttgacttaaagtgaacctaccccgaccaaggggtggatgaaaaaccgcggcgaccgacaccactgacgatgaggatgggaagctttgcaggatctattccgacggaaaaagagaccttaaattccatcttttccctgcaacaacgaaccatagggatcctaacatgacacaaatccctccttaggacgatctgtcctccacgggaaagatggtgaacgg

SEQ ID NO: 127556 - DNA, 1154 bp, Glycine max
  Clone ID: PAT_MRT3847_86188C.1
ctcgagccgaatcggctcgagcggctgcggaagacgacagaagggggaccaaccatatactaattctccaagaataagagaatccaaaagtctctcaaaaaataaccatgatgatgcatgtcctttgcttctcagtgttcctagcagcagcaatgcaaggaacactggcggttgaatacagtgtcaccaacaacgccctctcaacccctggtggtgttcgtttccgtgatgcaataggggacgaatacgccaaacaaacacttgactcagccacccaattcatatggggggtcttccagcaaaacgctcctgctgatagaaaagatatacaaaaaataaacttatttgtggaggacagggttgtgccaaatggtgttgttgcatatacaagcaaggatgagattcatgttattgcaaaatatgttaatgactatggtggggatgtgaagacagagatcacaggggtgctgtatcatgaaatggtccacgtttggcagtggaatgggaatggtcaggctccaagtggattaattgaaggtattgcagactatgttaggctgaaggcaaactatgcacctagccactggaagaaagcaggggagggacagaaatgggaccagggttatgatgttactgctcgttttctggactattgtaatactctcaaaagtgggtttgtggcacaattgaacaagcagatgaggactggttatagtgatcaattctttgttcagttactgggcaagacagttgatcagctttggcaagactccaaggctaagtatggcaatataccctaggttaatgtcaacaccttgactctttataaaacaagcgagctttcccgctcctcaagcctgagactcatctttctcagtccatgatcaaacgcttggcttcttttttggtttgatggatggcttgtcatgaaagattccaaacataataaatcgtgcgtgccttcacctgtcttgtctactactccagttttagattgaattttatgttttagttattattcaacaaaaacacaataattccctctccctcgttgtttttgtttttgtttttgtttgtcaccattatcaatacctatcactgtatgtggtcattattcaacaaaaggatgccgtacactcctgaattaatatttc

SEQ ID NO: 127557 - DNA, 2583 bp, Glycine max
  Clone ID: PAT_MRT3847_86189C.1
accacagccgattaaccatacacttattcatcaaagagaaaccaaaaggctcaaaacacatactaattctccaagaataagagaatccaaaagtctctacaaaaaataaccatgatgatgcatgtcctttgcttctcagtgttcctagcagcagcaatgcaaggaacactggcggctgaatacagtgtcaccaacaatgccctctcaacccctggtggtgttcgtttccgtgatgcaataggggacgaatacgccaaacaaacactttgactcagccacccaattcatatggggggtctgcagattaggagtagaatggcgaaggagatagtgaaagagcttcttcctctaattcgagtgtacaaggatggcagcgtggagcgtcttctaagctctgaaaacgtggcagcctcccctgaagatccccaaactggagtctcatccaaagacatagtcatcgcagacaacccctacgtctccgctcgcattttccttcccaaatcccaccacactaacaacaaactccccatcttcctctacttccacggtggcgccttttgcgtcgaatccgccttctcctttttcgtccaccgctatctcaacatcttggcctcagaagccaacataatagccatctccgtcgacttcagactcctcccacaccaccctatccctgctgcctacgaagacggttggaccaccctcaaatggattgcttcccacgccaacaacaccaacaccaccaacccggagccatggctactcaaccacgccgacttcaccaaagtctacgtaggaggtgaaaccagcggtgctaacatcgcacacaacctgcttttgcgtgcaggtaacgaatccctccccggggatctgaaaatattgggtggattactatgctgccccttcttctggggctcgaagccaattgggtcggaggctgttgaggggcacgagcagagtttggccatgaaggtctggaactttgcctgccctgatgcccccggtggaatcgataacccctggatcaacccctgtgttcctggggcaccctctttggccactcttgcctgctctaagttgctcgttactatcactggcaaagacgagttcagagacagagatattctctaccaccacaccgttgagcaaagtggctggcaaggtgaacttcaactctttgatgctggcgatgaggagcatgctttccagctcttcaagcctgagactcatcttgctaaagccatgatcaaacgcttggcttcttttctggtttgatggatggcttgtcatgagagattccaaacataataaatcgtgcgtgccttcacctgtcttgtctactactccagttttagattgaattttatgttttagttattattcaacaaaaacacaataattccctctccctcgttgtttttgtttttgtttttgtttgtcaccattatcaatacctatcactgtatgtggtcattattcaacaaaaggatgccgtacactcctgaattaatatttcaattttcaaattattatttaggagagcagtacgtaaacaatgctacgttgtctgacgttacatttttggttgaaggcaaacgattttatgctcatagaatttgtcttcttgcatcatcagatgcatttcgtgcaatgtttgatggtggttacagggagaaggaggcaagggacatagagattccaaatattagatgggaggtttttgagttgatgatgagatttgtatattgtggatcagttgatgtcactctggatattgctcaaaatcttcttccagccatcgatcaagaggtttttgaacggcttatgagatttagtgagtatggaattgtacatgatatatcgcttgagaatgtgtcaagtatgtatgaacttacagaagccttcaacgcaatatcattgaggcatgcatgcatcctttttatcttggggatatttgataaattgagttcaaggccagggcactctcttctgattcagcgcataacaccagagatccgtaattacttcgttaaagctcttacaaaggccaactctcaaaacgaccgactctagtatgcacccattttattcttgacctctaaccgattgtgttgtacaaaatgtatatgttgttcctttttttgtaccaggaagcaatctcctgtatggtatacagtttggctaaaagaacattctaacgccggaatcatgcttcttcttctttttaatctttttgttagcccctttctggaagtctcttattatcattacagcagcgattaaaaaaattatctaccatcacgttcatgtacgttcatttctgatgcagtgtaagtcccttctagctgtaacgtcattgtcttagatatagcaaatatgaccttcacgaacattgttttttactcgtgcaaatattgtgatggttgagactttctctttctcaagcatctaatgttgagtttatgagtagtataggttgcccaagcatctaatgtatatatgacaattagatagttgtcttcatattatataatgaaatcttaaagccttttcactaaaaaaaaaaaaaaaaaaacaaacaaa

SEQ ID NO: 127558 - DNA, 1804 bp, Glycine max
  Clone ID: PAT_MRT3847_8618C.1
gtctcaacccgccacgaatcaaatccaattgaaatcaaaaataaaaaggaaaaaagaaaaagtaaagacctctcaacacatggctgcttcaatcccatttacaggtatcaactcctcaagggtgcttcccattcctagagaaccacaccacccattttcccatttgctctcaaacatgtcaaagtttgcatctttgagaaccccttcttcttcttctgcttcttcttcttcttcttctgtgtcttgctctctcaccaaagacccttactctgttgtgccattggaggaacatagcaaaatggataatgggtcggttctgcttcagagacccgattcgtttgggaggtttggcaagtttggagggaagtatgtccctgagactctgatgcatgctctcactgagcttgaggctgctttttattccctctctgctgatgaagagtttcagaaagaactagctgggattctaaaagattatgttggacgggagagtcctctttattttgctgaaaggttgacggagcattacaagaggcctaatggtgaagggcctcacatttatctgaagagggaagatctcaatcacaccggggctcacaaaattaacaatgctgttgctcaagctttgcttgctaagaggttgggcaaaaaacgcattattgctgaaactggagcgggtcagcatggagttgccactgctactgtatgtgctcgatttggtttagaatgcattatttatatgggcgcacaggatatggaaaggcaggctctcaatgttttcagaatgcgtcttcttggtgctgaggtgagacccgtccattctgggactgctacactgaaggatgcgacatcagaggctataagggactgggtaactaatgtggagacaactcattatattttgggttctgttgctgggccgcatccatatccaatgatggtaagagagtttcatgctgtgattggcaaggagaccagaaagcaagctttggaaaagtggggagggaaaccagatattctgattgcatgtgttggtggaggttcaaacgccatgggacttttcaatgaatttgttgatgacaaagatgttaggctaattggcgtggaggctgctggatttggcctggacagtggcaagcacgcggcaacgttaacgaagggagaagttggggttttacatggagctatgagctacctgctgcaggatgatgatggacaaatagttgagcctcactcaattagtgcaggcttggactaccctggtgtgggtccggaacatagctttttgaaagatttagggcgtgctgaatatcatagcatcacagatgaagaagcattggaagcttttaagagagtttcgcgacttgaaggcataattccagctctggaaacatctcatgcgttggcatatctagagaaagtgtgtccaacccttcctaatggagccaaggttgtggttaacttcagtggccggggtgataaggatgttcaaactgctatcaagtgcttgaagctttgaaagggttgtcatgaacttgtgtggagctgtggattggctgctgactgagctttattttcatacttatgagacataattaatacaatttatcattagaccaagttaaataatcatgtatatttgtatcagagaactgttgctattcaatcctcaatcaacttagttttatgttataataaaatttgtggctaaatgcagtaaaatcttatctgcaagaagcttgtagatgtaaacaggttcggtgtgtttgttgagagctatagaggtgaacaagtttgcatgtgt

SEQ ID NO: 127559 - DNA, 227 bp, Glycine max
  Clone ID: PAT_MRT3847_86190C.1
gttttatcttgcggttttggggcgatatcataacatcgttgggctctgtgatacaaagcgtacaatggcggcaactcttatcccagggacaggaacaccggaattcagtgtcaccaaaaccctccctctcaccgaaccctagctactgtgctatagacacaaaaacaacacacctcggacgccgttgatgcctctcacgaccaccaggagtatcgctggcttcagaa

SEQ ID NO: 127560 - DNA, 858 bp, Glycine max
  Clone ID: PAT_MRT3847_86191C.1
tttctgcttcttctaacactatactctactccttgtagaaccatctgaattctccttttgactcgactcaatatcgctttatccccagtttccactctttctcttcaccaaatcacccgccacatgaaccctccaacacgaccacaacttgttatcacacacacgcaattttgtggcatatattagcccatcaaaaagataggctctttcaaccacatcttcgccaccatcttgtacacgtcttcgccaaagtgagttattagtgatacaatacaacatggtttttcataggagacctctgattctagttatcatgtggttgttcttgtttctcttcttattgggtcactgccatggttctagagccacaacaaccgtcttcaaattcaagcccaaatcacaacatcatggccacttctctgggttcttgcctaaaaggatgcctataccgtattcaactccttcaaggaaacacaatgacattggcttaagaagttggagatcaccctgaggatcatacgcagaatatatagtagttttgttttgggttaaggtgatcctctgggttcttatttttatattaattttattttctcctccttcttctccacctttctttattaagaacaaggaaaagtgattaactaatgtacatggcagggcttcttagtgagatattcattgtctttacgtttgatgatgatgttattttgtttcaagggatgtaatgggtatgatcttagatggatatggatttctctccttgttacttgaaaaggaggaagtcatggttgtttaatttagtttctaatttttttttgtttttttttggagtgagaatcaattaatataaacaat

SEQ ID NO: 127561 - DNA, 588 bp, Glycine max
  Clone ID: PAT_MRT3847_86192C.1
ctcacgctttcgcaataattcgtaacacataccctgattgcaagcaatgcattctttcaatatcttctgaaatttatgaaaccgataaaaaacaatactatgaaatacttccgtgaaaggtttgcgcttgtgcagaatcaattgacgcaaggtcattttattttgtgtattgacgcggttggtgcggctgccgaggcttacactcatgacctcttgaccattgcggctaatgatactacagcggtatacatgtgtagcaggtatagcttactctctacacctactagagaatagaggaagacggtgagttcgttgatggtcggatctctgacacaggcctactctattggaccctggattagagaggctattcatatcgatccacgccttatctttagtgcatatgtgggaacagctttggacttagaatgcttcttaggagcagctttagttgcaaggcgtagggagtacctgtaccttgctggctaggttgctcctggattagacatgcttctctggctgcactttgcttattccatctttggaggctcaacagctctcttttagattgaaatgtactttgggcta

SEQ ID NO: 127562 - DNA, 695 bp, Glycine max
  Clone ID: PAT_MRT3847_86193C.1
ttgatggctcgaggcagtggaagaaaaaataacgatgtgacgcttttggggctaacagcgctagatcttgtgatgatggctttgttgttctcagccaatggtgcagcctgtgcagtgggagtgatagcacagaagggcaactcgcacgtgcaatggatgaaagtgtgcaacgtctttgacgcctattgtcgccacgtcactgctgcattggtcctctccctcttcggctccaccgtctttctcttgctcgtgctcctttctgttctcaaactccattacagaacaagaagctagatctcaatatgatacacactataatatatatatttgtagtgttaattaattaattaagggtgtgaatcgtatttttggcttagacctagcttgcacttattgttgtgtttgatgaagaacgccaaagcacttaaagatatagatatgccccaagtagtgattaaattgaatgtggttcgtttgtagtaaatatactttagcagatggtaggtcgatttatttaagagagcagtaacagtaaattaatatagctatctcctttgctagtgattaaattgtatgtggtgcgttggtagtaaaaaaaaaaaaaaaaaaaaaaaaaaaaaaaaaaaaaaaaaaaaaaaaaaaaaaaaaaaaaaaaaaaaaaaaaaaaaaaaaaaaaaaaaaaaaaaaaaatttgg

SEQ ID NO: 127563 - DNA, 542 bp, Glycine max
  Clone ID: PAT_MRT3847_86194C.1
aaacaatgactctgttttcagcaatattgtcccacagtctgatggatttttttgaagtcaatcctgacatgatgtacagggacagctgaatactctgcagttgtttctcatgtcttgcctcctcttctttttcgtcttcttcctcttgtccttttcccataataaggactcggaattgtttattgggacatgtatgactagggccaaatttcccatcaccaggataacaaagtcctttttctgccctctcctggaattcagcatctgaaatcctcctaaaaggcctacctctgtatgctctggtggacttcacactatttggttccaagctcaaactcgtctctcttgtttttgtcgtggtgcctttgtttcttggctcccatgttacagttcttgaggaactgtaacttctagttggaccgcctctgtttcctccaacattatctttttctattagtgagtttttctcatctatccattgcacatagtccatcagttccgggagagagtttattggatgcaacttcagctctgccctcgcc

SEQ ID NO: 127564 - DNA, 1249 bp, Glycine max
  unsure (1)..(1249): unsure at all n locations
  Clone ID: PAT_MRT3847_86195C.1
aacgggcccataataagtattaagttatatttttttgtcccggaaccacaaatcatccttgccacctcctaaaatacaatctacaacaaatcctaagcgacatacacaatgatagaaaatcaaaatctggagtagataatgctatcatctatattatgggacgatcttttttccatcacatttgtcctctgaatagaattgatacaagtacaacatatgctacatgcttctcataattttctcaagaccttacccaatgaagtaggacctgtaatcacatatgacaaagcgagctatttcccaagaaatcccaggttttgaggtatttggcacaagggaatgagaagattatctgcttttaaagcttaatatgaatgctaatgaagaactgaaataaaaactagtatgaggcagaaaatgtgcatctattaatgacccctcatccctccgagcagattttccataaagcagcatatttgtaccctcacaatccaaaatgaactgcttttcatctagtcatttatcaattttgcaggttggcaatctgtgcaatgcctatgcccaaaactaaatcttctgtttaagaacatggcgcaactgaaccttctggctttccattctcgcctccataagtctggctttcaaactattcttctgtgcagtgcgaggaatgcatcccttcatgccttgatgtgcatgtggacttcctgactcgggactcaactggtatagaaggtcttggggactcagcccacctttacctgatccatgatcaggagacatgatgacaccattagataacattccatttgaaagtctcccattcattccctccacagagattatcttgtaattatccccattgtttggatatgttgacctccaaagcttcgttatggatgataccttttttgcttgcttagttggtatagagcacacttcacttatttcagttattggtgtctcctcacctgcagtttcttcccattcaagtacacttctccctgagacgttactctctcggtgattcctgttcaaagatcggctactcccttctggtgaataacttgagccttgatcctcgacatggctcacnntctcccatccactttcatctccttctatatccccattatcatccataaatacatcagaacgcctctgaatgcnncctttacttatttnnttggcttcnnnnntcaccatgtgaatattnnnnnntgacnnncnnnactgnnnnnancatatt

SEQ ID NO: 127565 - DNA, 776 bp, Glycine max
  Clone ID: PAT_MRT3847_86196C.1
caggactgtgcattgcactttttagaaataaattgttccggacgcgtgggcggacgcgtgggttttttttttgtttccttttaatatcttcctaactcaaacagagatgtggcttttgcttgtctgttgtaaggaaaggtgagagttgagattctacttgatttggatcagccttgagctgattatgcttatccactcctcatagcgccatacaaccattcataattctgatgtgtacaatgttgtatctaacattgcagattttacagagatcatttcaatctcctgtctgagctttgatgttcctggctgatgaaccacttcaattatttaattattttgaaggtcgataggccggcgcaggtcatctatttcttctctttatcttgctctcctaaatggagcagctgacaaagtcagacccttggatctctctagatatgcataatattattttatcgggctgtcacaatttcatatggcaggatctttcagatcatattttgcagtctgctgatgcaactaatcctcattctccctttttcacattttacattacaaccttctgtcttctgttctctctttttgctctttcacccttgtttcttttttctgtgaaataagttcacagatggggcagtattttctatttggattttgttaggaaggattttgtcctgtgttgaaaggagagggtatttactattgcaaaagaattctgatacgcttaaatgataatagaaaatattataatggcaaaaaaaaaggattacccc

SEQ ID NO: 127566 - DNA, 209 bp, Glycine max
  unsure (1)..(209): unsure at all n locations
  Clone ID: PAT_MRT3847_86197C.1
ttggaattgggccgtcttcccatcttttgcttacctttatacatttaacacacaattaaggggttcttttcatgttggatgatggttgttagttggattttacttctttgttaatttgcagtgttttaattgtgacatgttgttatgtaaatataaaaagaaaaagatgttagttagttagttttaggcagctactgttattttatngg

SEQ ID NO: 127567 - DNA, 828 bp, Glycine max
  Clone ID: PAT_MRT3847_86198C.1
ggtaccgcccaattccggcactcttgtctcacttcttcctcttctctccaacccccacgtccaaagccctcgtttcacttttcccaatccgccatggccgccgccactgcattgctccgctctctccgcccgccgcgaccttccctcttcttctctctccgccttccgatcgttgacgagtggcacaaagacatcatatgtaggtaacaagtgggcaagtttgtcacgaccgttcagttcaaagcctgctggtaatgatgtcattggaattgatctgggtactaccaattcgtgtgtctctgttatggagggaaagaatcctaaagttattgagaattctgaaggagctcgtacaacaccatcagtggttgccttcaaccagaaagcggagcttcttgttggtacaccagccaagcgtcaggctgtgactaacccaacaaacactcttttcggaaccaagcgtttgatcggtaggcgttttgatgattctcaaactcagaaggagatgaagatggttccatacaagattgttaatgcgaccaatggagatgcttgggttgaagccaatgggcagcagtattctcccagccaagatggtgcttttgttctcaccaagatgaaggaaactgctgaatcatatcttggaaagtcagtttcaaaagctgtaattactgtaccagcttacttcaatgatgctcactgtacggcaacacatgaatgatgcagaattgctggtctttgatgttcagaagatcatcaatgagcccactgccgctgcactttcctatgggatgaacaacagggagggtctcattgcagttttttgat

SEQ ID NO: 127568 - DNA, 351 bp, Glycine max
  Clone ID: PAT_MRT3847_86199C.1
ctcagccgatcggatacaggggagttttaggtggtcacagcaaatgggcattgcttggtgcccttggctggacctttccagagatccttgagacgaatggtgttaaattctgtgaggaccgtgtggattaaggccggagcacagatcttttcatagggaggccttgactacttgggcaacccaaacctgatccatgctcagagcatccttgctatctgggctgatcagggtgagcatcatggggttcgttgaaggttacagaataggtggaggaccacttggcgaatgactggaaccaatctacactgggggtgcttttgaccctgtgggcctggctgatgaccctgatgc

SEQ ID NO: 127569 - DNA, 143 bp, Glycine max
  Clone ID: PAT_MRT3847_8619C.1
gctgacacgtgcttgttctgattcaggcgttccggcaagggctacggcgccggtggccggggctgtggctggaccgctgattgcaaaaagaaatgcatcgcttattgctaaaccataatatggttacacttgctatcactact

SEQ ID NO: 127570 - DNA, 1190 bp, Glycine max
  Clone ID: PAT_MRT3847_861C.1
gttgaaacccaagcacaaggcgcaggtgattcttttctgaatacctatatagcagtgtataattgtttctgacattagttcatatattattcggaatataagacttcggtatgttgccggcaaagacgagaaggaggcagcgttgaatctttgctaaatacctgtgtgtcaaagttcaaattattgcgagttttggatttaaggaattcgacatgcaagactttgccacgttccattgatagttgaagttgtttgctgcaggttgactccactacagtcaaacctatataaacattttatacaatccaaaaatgttaagcgggcaattactgaagaactgaagcaatcaaagattttggcctacgtaacagctctcaaaaagttgtgcaatcatccaaaggttcctataaatgctgctggtttgatcagatataactggtgccaccccttttttggtaaaattatcatccatctcatgaatatgataatatatagctcactgctgcagctgtgaaagattggaggttcctatatcaatatccttttgggttgagtaggttcctataaattctactggtttgatcagatataggtggtgccaccccttttttggtaaaattatcgtccatgtcatgaatatgataatatacagctcattgctgcagatgtgaaagattggagatactggaaggacttcttgaactactacagaataaagaatgtgctcactggaaagctaagtatgtatctggctggatctaaatgatccaactatgcctttgaatgtcagaaactgcatgcagttagcttgatactccctagaaataccggtattttatgactgatattgctcatacttaaacaatgatccttagctttgacctaatatatagcctacttaataactcaaatttttcataatagttaaatgaaaaccgcagacagtttcatgcatgatgtatcatttacaataaagcattctttatgcttatgcacccttttttattttgttgagtacttcctgacgaggttagcattaatatttgtaaaaggccggtcaattatgtaggatttgtattacgaaaattctgaacaattgatttttgttctaacagttattagtttcagactcttatacatattcaaaatggtattggtagaagaaagtttaaccaaccttcttttttatt

SEQ ID NO: 127571 - DNA, 366 bp, Glycine max
  Clone ID: PAT_MRT3847_86200C.1
aactatgataaacgttttatcctaagtatatttatttcaaccagtaagttttaccaaccaaaaacagacagtcacttcttttgctacactatcctccctaaacatcaaaacaaatcacctatatcaatatatcaccctaaaaacaatttaaaagaactcaaattacgctctacttcttaaacaatatttgcacttgcacccttaatgtaaaatctcgttagtatcaacatattgtttcttcaaccattatattcacttcctttaatacctaatataactcccatataaacaatcattcccttcaatattctacctgcccactccccattataacccctttcatctttaaacccaccaggtattttc

SEQ ID NO: 127572 - DNA, 285 bp, Glycine max
  Clone ID: PAT_MRT3847_86201C.1
gcataagtgagtttgttgatcgagataactacaaatagtgtgatgacaatgaatgtccatgttttcatcgattgctacaattttggtatcatggcaatactatgcgtacgatatgttccctcaccgaatgacaactggctatggtgcccgtactccggatgtgaaatgctcaagttggatgcatgctgtagaagcacacatcatctttggctctgagaccattcctgacgagtgcctagacgcaacaaatgaatacatctatggcgaacaatatatattatactc

SEQ ID NO: 127573 - DNA, 375 bp, Glycine max
  Clone ID: PAT_MRT3847_86202C.1
acttactatatatatatatatagggaattcaagtgagagtgaagtaaaagggttgaaaattttgaatatgaagatcagtattttgctatgtgtggtgcttttgggtttccttggggtttgtcaaggaggcagcctaaggaaaaagttctaccgggattcctgccctcaagccgaggacattattaagaccaaaacccagcagcatgtgtctgctaatcccgatttgccagccaagttgcttagaatgcattttcatgattgttttgtcaggggttgtgatgcctcagttttgttgaactctactgccagtaacactgctgagagggatgcaattccaaatttatccttggctggctttgatgtcatagatgacat

SEQ ID NO: 127574 - DNA, 871 bp, Glycine max
  Clone ID: PAT_MRT3847_86203C.1
aacactgcgacacatactcgctgctgattgttctctctttctctcgctcacacatggcttgtttacagcctccatggttctcttcattgcgcgtcgtgtccccggcaaaactcgcagcaggcccgccgccttcaacaacgtacaagcccgccaagctgctcttttgggccgtgggcccagacaatgctgaatcttctgagcccgcctcccccgacgctccagagcccgccgcacccgttgattccgtggagttggcgtttagcaaggccaacgtgtataaagctgactataataatgatgaaaattcggctgtagagaggatcgttagtgataatacgccacaagatttgtatgagaagcttaaatctcatccaaatcctaaagtaagcaagaaagcaagacagttcatgtacagctttcaggctatggaaatgatgaagatgacaacaggatctcaattttatttaaagaactcagactaccagaattattttgatgcatttgttgaaaataaatctaactatcccggaggagatggcccggttcaagaaagtgcaatgaatcaggttttgccgtatattctttttcttgtttctcctatttttgtcgtactacttattgctgttcggaaaggaatataaatctctttcttttgtatacaaattccgtttgttttatttcatattgtcaaatgtcaatctctaagcaggagataattcttccagtttggactttggacaacttcattcgagtttgattacaaaaactaacctctacgattgtatgtatatatataggataggattgtaaatgtaagaattgtgcaagtactattattataaaggaaatgttctattttggtgtacaaaaa

SEQ ID NO: 127575 - DNA, 736 bp, Glycine max
  Clone ID: PAT_MRT3847_86204C.1
gtagatttaacttttttcattaataaaaattaacaaataatatttgtgaataaaaaagtaaaagactatgcaaagcacgttgtaactgtacgtcatcgccaactttgaacaacagcaaacactcttgccccaactagcaagcacaatcaaatcaaaataattcccttacaaaactacccacatgcacaacattcctttagccaactactttgttgctgactaaattaattaatttaactcctaattaaaagacacctgtacacacccaaccactaatcacaaattaacatgaacatactttcatcacgcactctctacatatctatctacctttccatgtcattttgagaaaagattttgcccacctgaatgaagcttttgctgctgtgatcaaaggcaccgctcttttgtgactcaacgtcgtcgtttgactcttcatcctcattccccaacgaaaaatactccaccttcttctccccataaacttttaccaaaaccaagtacaaagaaaccgcaaaaacggtcacaccgataatgaaccaactgaattcgatgttgacaagtgaaatagcgcggtgaagtgcctcgtgagaagagcatctaacgaccatgtgaccatcctcgtcgttcatgtaacaacctttgggtatgagtgaaggtgtccaaagcatgaagcccatcacaataagccacaaaccctggaagaatatgctgacggagcgaacaaagttgacaa

SEQ ID NO: 127576 - DNA, 211 bp, Glycine max
  Clone ID: PAT_MRT3847_86205C.1
gaaatcatgtggggtcttcttcttgctcctcctgcttgtctttgcttcacgggtgggggagcatagggagggaacagtgtgtgagtcacaaagccacgggttgcaaggttagtgttgtagagaccacaactgtgctggcgtctgcgagaacgaatgattctccggtggcaggggcaaaggactaggccgacggagataatgtcaccagata

SEQ ID NO: 127577 - DNA, 1579 bp, Glycine max
  unsure (1)..(1579): unsure at all n locations
  Clone ID: PAT_MRT3847_86206C.1
agttgggcctagtgttggactggcttttccaagacagccatatttgtagtcgtcacgttctgcttcaaactcctatggtacaggatacctgcctaaccagggttctagctttggaggcacttccatttccaatcttaatgataggagttttgcttctcttgaaaatagcaggcggcaagggagaccaactgcttctctttgcaactgtaatggtactcttgatatccttagtgagcagaaccgaggaccaagggcctcgaagttgaaaaatcaaatttcaactgaaaataattctgtggatagtagtaaaaatagtgcatctactgccaagttccaaaatgaatcactcaatcggtcagattttgccacagattacaaggatgccaaattttttgtcatcaaatcttacagtgaagataatgttcacaagagcattaaatatggtgtctgggctagtacaccaaatggaaacagaaagttagatgatgcatatctccaagcaatggagaagcaagatgcctgtcctatatttctctttttttcggtaaatgctagtgctcagttctgtggggtagctgaaatggttggacctgtcaattttgacaagagtgtggacttctggcagcaagataagtggagtgggcagtttcccttgaagtggcacataattaaagatgttccaaatagtcagtttcgtcacattgttcttgaaaataatgataacaagcctgtgacaaacagtcgagatactcaggaggtgaagttgggacagggggttgaaatgttgaccatttttaaaaactatgaaactgatgtgtccatcctggatgattttgatttctatgaagaccggcagaaggctatgcaagaacggaaggcaaggcagcaaagcagcatggtggctactggattggttggagaaaatgaacatcggagttctgctaacactaccggtgatttcatgaagcagatgtcgaagagctttgctctagttgtccgcttagatgagaataacaaggaagttgttgttgcagatagagatagtttagtctctcatggtcatggccccattggtaatgtagttaaacctgatgatggtcaatcagtgactgcctcttcaactcaaaccagttaggaaggcgtaccagttgtgccaagaatgttgttcacatttggtgattgacaatgctttatctcattacttattttccaaacaaggtagcgttgctgttgttattcaagtcgttggagtctggggtttctaaatgaggtgtttacctagaagaatgggtttcatgtgtaaagtgcgtcaacttaaattgtcgtttcagttacccctacccacccacccacaaaaaaataataataatatcttctgctcattttagtataggttagattttaatcaccacttttttttttaataatttcgggttaggattgttttaggcgtgtttcatttgtaaaattttctcatcttcacgagtgtttcaataaaggcagcaaatccccttgaaaatactcnnaaaaaaaaaaaaaaaaaaaaaaaaaaaaaaaaaaaaaaaaaaaaaaaaaaaaa

SEQ ID NO: 127578 - DNA, 398 bp, Glycine max
  Clone ID: PAT_MRT3847_86207C.1
taattaccgggccgaccgactcgtacgtatggatccaccacgctcactgtcaatccattaataaccaaaagttttatttctataaaggcaacttcccatccttccgtggcatttattctgaatgactagctccaataacgctttcactttgactcaagctgagtacgctgccatatggtatcgcgtctactacaatggcaactgttttttgaccctatcataactcgttatagccttgttggatatttatcccaatcttaatcacaagcctgccatcatgcggtcttacaatgtcatcaacaaaaatgactattgtttcataaataataactaaatccgctatcttctgctcttcatacactactacaattaatttgtggaccaatttttaaatctat

SEQ ID NO: 127579 - DNA, 307 bp, Glycine max
  Clone ID: PAT_MRT3847_86208C.1
gtagattcagatcatcgggttggtttcttaatataatattatcgacactaatctgcaatcaaacaataaatgatcacatcaaatcgctcctaataattattattatccggcttcaatctgaggattaactaggctggagctctcacacataattgttgatcggcatggaacaagaaacctggaggtgattctcttagggtgccatgtgtatctgtggggtgtgggcgctaaaacttacgatccggttgcgactgggggatcgtggagaatacgaggctgcacgaatggcagttctattctgcataca

SEQ ID NO: 127580 - DNA, 448 bp, Glycine max
  Clone ID: PAT_MRT3847_86209C.1
gttttcttgccactcagggcaaggggggcaagggatggatatatctctcaatccgagacaacggcatcggcctgacgaaggaggatgtgataaagaatttggggaccatatgcgagctctggaacttctgaattggaggcgaagaagcaaacaaggggagatctcactctgattgggcagtttggagacggcttataccatgtttatctaggggccgactatgtcgaaggtattagcaagaataacgaggatgagcaatctggatgggacataaacgcagacggagctgtcgctagtacaaaagatgcatggaaggatccagctgtacgaggcactgacaatggatgtcacctcacggaagaggctggggaatactcgaaggagactaaactgaaagaattggtgaagagaccctctgaatcaattcacctccctatctatatttggg

SEQ ID NO: 127581 - DNA, 270 bp, Glycine max
  Clone ID: PAT_MRT3847_8620C.1
ggcattgctgctggacccaggggtgatcctaaaacaacagcgtgcttggacattgcggccaatggtatgttgaatggatctggcgactataaatccactggccagataaataaaatcactatcaccaatgacaggggcagattgacaaaggaagatattgataagatggttctcgaggcctgcaactacaggcctgaggacgaagagcactcgcacagagttcgggccagaagcgctgtggaaagctatgcctacaacatgaggaacacc

SEQ ID NO: 127582 - DNA, 1592 bp, Glycine max
  Clone ID: PAT_MRT3847_86210C.1
acggctgcgagatgacgacagaagggggacccaacactagcctactagtgtggttttttcccttcatcgtcttcctcttgaaggtattgaagttgttttgttatgtgtttgccagagggagagagagagccatggcactagaggcagtggtatttccacaatcacaagacccttttggtggtagtggttacggatcagtgaataataaggacttctacaactgcaccttgttggctgctacttcacccaactcatggggggactatgagcaacacatcaacatcaacaaagaagaagaacaaggtggtgcttctatctccacttttcaaccagagagtaattacccttatggaaattggaccagctcctcctcatctatgttaccccacttcaacaatgaacttcaagaaaccactactactgaccccagtaacaccttagatagcttaaacactcgtcccaagaggcgcagagccaaaagcagaaagaacaaagaagaaattgagaaccaaagaatgactcacattgctgtggaacgcaatagaagaaagcagatgaatgagtatctttctgttcttcgctctcttatgccagactcttatatccaaaggggtgatcaagcttctataattggaggtgctattaactttgtcaaagagcttgagcagaggatgcattttcttggtgctcagaaagaaggagaggggaaatctgaggctggtggtgcaacaaacatgcccttttctgagttcttcacctttcctcagtattcaactagtggtggtggtggttgctctgataattctgcagccgtaggtgaagacgtgggtgaggttaagtgtggcattgctgacatagaagtgaccatggtggaaagccatgcaaatctcaaaataagatccaagaagcgccccaagcagctcttgaagttggtttctggtttgcataccatgcgcctcacaatcttgcacctaaatgttactaccaccggtgaagttgttctctactctcttagtgttaaggtagaagatgattgcaagttgggatcagttgatgatatagctgcagctgtgtaccagatgctagataaaattcagcaagaggcaatgttgaattaagatcaaaccttgaccaaatttgccttgccccacttggtttttaacctcatgtcaacaccttacttcatggtggatcattgtctctcgctatttttctctttcaagatgtacctaattattgcaacttctgttcacttcaccctttgttaatctactgatggtgccttgatgtgggctccttggaggaagttttttggtttattccttcttgtgtatgtctgtgtagctcacgagctccttttaatctctctctatctctctcttctctttttctctggggtagggggtggagaaggctgtgtattatattgctcgagacatattctagtgcttggtcaattttgcctacctagctttgaaattggtaggtcttgtctacctcaaccataagccaaagccattaatttgtcaagctgaaattgagaacatctcaaaaataaaattgaatgaaaatgagagccgaagatttttggc

SEQ ID NO: 127583 - DNA, 243 bp, Glycine max
  Clone ID: PAT_MRT3847_86211C.1
ctctagccgactgatgtctaatgttatgtgggtggctcctgcggacaatgcaagtttatggtcacaactatattatgtttaatgtaataatctggaaatgcaaaaaccttattttgtcaatctcagaaatgtgttactagaattgacttttcacaatgcatatgaagctcgccaattgagaacgaaagctctctctcgcattgaatggctgtaaaaagctaatgtgcctaccatagcacaaat

SEQ ID NO: 127584 - DNA, 374 bp, Glycine max
  Clone ID: PAT_MRT3847_86212C.1
tggatccgaacgtttgggttgatttatgtgcgtgcatggtcgtaagatgataagagaccccatccgagtttaacccgacccctacctacatcggcgatggaaaacgatcgcgcgcatccacgcgggaaacgtccaaaccctaagattaaccgtatctatacgtacacccctacaaagtagtagtcggcgtcactaggcgcacactacgctccccgccagcacctcctacagccgctagaatcggcttggattggcctaaccgggaataggatcggcgactggcttggctatctcaaaaaagtaaacgaccctagatttagcgagaatcggttaagaattggctaaacaaaaattggccagaattggtatccctt

SEQ ID NO: 127585 - DNA, 226 bp, Glycine max
  unsure (1)..(226): unsure at all n locations
  Clone ID: PAT_MRT3847_86213C.1
ggtgnaagcgccatgganctctcangattnagcatctacaatgacctgctgattgaactaangnagacgantnngcatnnantgcctnctaatagagccaataagggatggngcnnnncctanactgacagtgnnaacgacattatggtggtgtgggatgatccgtggcatgagngctgtgatgtggtanccaagcattcagatacatncncangaatattngaga

SEQ ID NO: 127586 - DNA, 2455 bp, Glycine max
  Clone ID: PAT_MRT3847_86214C.1
gctattcctgatttcagttcaatatccaagcttacctatttagatcttagctggaatcagatcactggacccataccatcaaataaagtggcagacaatatgacaacttttgatctgtctaataatcgtctcaatggatccattcctcacttcttttatcctcatcttcaaaaattgtcacttgcaaacaatttactgtctgggtctatccctggtagcatatggcagaacatgtccttcagtgcgaaagataaacttacaattgatctccagaacaactcattttcagatgttttgggaaacctgacccccccggaaaatgttaccttgaggctttctggtaatcctatctgcaagaattctaacatacaaagtattggtcaatattgtggacctgaagcagataataaggcagcccaagattcaacaaactcaactttctgtccagttcaatcttgtccagtggatgacttttatgaatatgccccctcttctccagttccctgcttttgtgcagcacctctgagaattggatacaggctgaaaagtccaagtttttcttactttgctccctatagaagtagttttgaagactatataactaggtccttagacttagatctctatcaactatcaatagattcagttgcttgggaagagggacctcgtcttagaatgtatttgaaactcttcccttcctataatgattccggttctagtatgttcaatgaaagtgaggtccatcgcattaaaggcatatattcatcatggcactttcctcgcactgatttttttggaccatatgaactgctgaacttcactcttcttggaccttatgcaaatttaaatgttgattcaaagaagaaaaagaataatgtgggcataaaaatttctgctgtgatagcagctgttgcttgtgctttagcaatatctgcaataatcattctcctgatttctaaaagaaatatgaaataccagaagaagatttccaggaaacgaatgtctactaatgtatctatcaaaatagatggcatgaaagcatttacttacaaagaactggctattgctaccaacaaatttaatatctcaactaaagttggccaaggaggttatgggaatgtctataaaggcattttatctgatgaaacttttgtggctgttaagagagcagaagaaggttccttacaaggacaaaaggagtttctgactgaaattgagcttttgtcaaggttacaccatcgaaatcttgtctcgctgattggatactgtaatgaaaaagaggaacagatgctggtttatgaattcatgcccaatggaacccttagggactggatatctggtaaaagtagaaaaaccaagggaagcctaaattttagtatgaggttgagaattgcaatgggagcagccaaaggcatactgtatctgcatacagaggctaaccctcctatattccacagagatattaaagccagtaacattcttctggactccaagtttacagctaaagtggccgattttggattgtcacggcttgtaccagacttatatgaagaaggaactggtcctaaatatgtgtcaacagttgtgaaaggaactccaggttatctagacccagaatatttgttgactcataagctgactgacaaatgtgatgtctatagcctgggaattgtgtatctggagcttttgacaggcatgcaaccaatatcacatgggaaaaacattgtccgcgaggttaatacggctcgtcaatctggtacaatatattccataatagacagcagaatggggttatatccatctgattgtttggacaagtttttaactctggccctcagatgttgccaagacaatccagaggagagaccatcaatgctagatgtggtgagagaactggaagatatcattacaatgttgcctgaacctgaaactcttttatcagatattgttagcttagacagttctggtaacatagcacccccatcatttgcatcaacatcagcatcaaatgtgacaagggaggagcaacacatgtcctcatatgtttcaggaagtgatcttgtcagtgatgtcattcccaccattgttcctcgctgatgctgtactatgctagtctacttcaataagtgatcataatcaagtgatcaagtgatcaagtgcaaaatatggtgctggtcggaccaattatctcacctttttaaccagctttttttgtctttcaaatgccaaaaaatatataaaataatattttttaacatacattttaatcaaacaaaaaaagtaattcattgcaggaaaaaaacgtttagtgaattattaaattattaattaattaaacacagaagtaatcataaaaaaccataatgggtcgttacaaccagtcaatttaaactagtccacaatgtactattttctacatggaatttaataaaagtcatccttcctttctttcata

SEQ ID NO: 127587 - DNA, 216 bp, Glycine max
  unsure (1)..(216): unsure at all n locations
  Clone ID: PAT_MRT3847_86215C.1
ancgctnnnnnnnnnnnnnnnnnnnnnnnntttttggtaaatggttatttctctcgcatggaataattaggagaaaatttgcgaactttcaagcaaagcttttgtttggttaatgaaataagtcccccattccttatttgggggggaccattaatttatttatagtatggcaattcatatgcctggaatgccgttaaaaatgctgccccagtttat

SEQ ID NO: 127588 - DNA, 411 bp, Glycine max
  Clone ID: PAT_MRT3847_86216C.1
tttttttttttttttttttttttttttttttttttgtagtttttttttttggggttttttttttgatttaatgcttttattttttttaatcactatgggaaatttgaatcatcccacaaaatttggggaatcacaatgaacaaaaaaaacaacttgggaaaaaaatattaaatgccagaaaagcccgagacacgggcttaaaaaaaatttacaaaaaaattttggggacaaaaaaaatgtaaaggcctaaaaaaaaaatccaccccccctttttcggatgccaccgaaaggggtaagggataaagcccaccccggggggaggtgaaacaaaaaaaaatttgtcacaaagggggaaaccggatgaggaacccaaacgcttagaaaccaacaaacgaaggggggggagattcc

SEQ ID NO: 127589 - DNA, 493 bp, Glycine max
  Clone ID: PAT_MRT3847_86217C.1
gggaggaagaccattagccggttgaaaatcaatgacctgctagagtcacactttaaggagaactgtgaggagtcctctgatggcgttttctttgactcagaagatgatgagaatgccttgacagcttgtgaaaccccgagaacagcaccttccgagaggaagagccaaccaaagaaaccagtttttgaaaaaccaaggagctgttttgctgccattgttcctgccaacatcaagcttgtttatatgaagaggagtctagttatggaccttttaaaggaccctgaaacttttgagactaaagttgttggaagcttcataagaatcagatgtgaccctaatgattaccttcagaaaaactcacaccagcttttgcaagtcacaggtacgaagaagagttctgaagtaaatggggaaattcaccttcaagtttctggtttcattaaagatatcaggattcaaatgctttcagatgataatttctctgaggaggagt

SEQ ID NO: 127590 - DNA, 486 bp, Glycine max
  Clone ID: PAT_MRT3847_86218C.1
tcgaactgtccaaggtcctgtcactgggcgcataaagccacccgttggacggtgcgggtgtgggtggtgtgtgcgctgggtaattaacggtgtaaagtatgtggtggtggtatttggtgcagtgctgaaggtgtaaccgaggtaaaaggcccgcgcggggtcaggcaatgcccagcgttaacttatgctgacctagactccaaacaccaaccgtaaactaagcgtatgggcggccgggtggttgtacttattagcgaaaggcgcgcttgcaagagtgtaaaatgcaaacagtgtaatgatagccccggagtgcaggcggtagtgcgccataatgttacgtctgttggtgtacagcacatgaacagtaagtgcgaattgtaacatgatgcagtgtacatccccatggttcccggtgtaagtgtttcaatacaggtacagtggcgtggcacaacggtcaggtacgggcagcaaaacttatgcgggttg

SEQ ID NO: 127591 - DNA, 320 bp, Glycine max
  Clone ID: PAT_MRT3847_86219C.1
tcaggctgctacaacataactgaagggataccattcttggaaatttaatggccatttgagaaagacggggattcgtgaagataccagctttcattatcatgcattgcgacttaatgattgacgtacatgtcccacaagattcatctaacagacctgttctaaacacttcgtggctttcaagtccctagcgttctttatcatcattgtgctttgcaatatcgcctcatcacctgatagaggcctcttttagaggactggatcaatttcatgtcctcatagttgcacatccccaatggctcagcgtacacaccctatttcat

SEQ ID NO: 127592 - DNA, 686 bp, Glycine max
  Clone ID: PAT_MRT3847_8621C.1
gattgcatgtgttggtggaggttcaaatgccataggacttttcaatgaatttgttgatgacaaagatgtaaggctaattggtgtggaggctgctggatttggcctggacagcggcaagcatgctgcaaccttaacaaaaggagaagttggggttttgcatggagctatgagctatctgctgcaggatgatgatggacaaatagttgagcctcactctattagtgcaggcttggactaccctggtgtgggtccggaacatagctttttgaaagatttagggcgtgctgaatatcatagtatcacagatgaagaagcattggaagcttttaagagagtttcgcgacttgaaggcataattcctgcactggaaacatctcatgcattggcatatctagagaaagtgtgtccaacccttgctaatggagccaaggttgtggttaacttcagtggccggggtgataaggatgttcaaactgctatcaagtacttgaagctttgaaaggatcaaaacttgctgagtgagcttcattttcatacttagagacataattaatacaatttattattagaccaagttaaatagtcatgtatatttgcatcagagaactgttgctattcaatcctcaataaacttagtttatgttataataaaatttgtggctgaatgcaataaaatcttatctgct

SEQ ID NO: 127593 - DNA, 239 bp, Glycine max
  Clone ID: PAT_MRT3847_86220C.1
agggggttccaaattaccaaaagaagaaaccagggaaggttcctcccgaaggttttggcctaaatggccccaaaattttttccatccaagggccaaaacggcctttgaagcctttcaaaaaggggaacaaggtttttgaaaataaattccctttccttggatccaaggacaacaaccctgtggcctttcggaaaccccttgtccttggaaattggaaaaatcccatgcaaaaagggctt

SEQ ID NO: 127594 - DNA, 989 bp, Glycine max
  unsure (1)..(989): unsure at all n locations
  Clone ID: PAT_MRT3847_86221C.1
ggctcgagattatttatcatctattcacattatactacccaccttactgctcctcctcctatgtcccagatttggaaccattgcaatttgcaattccatctatcttcattcttctcctccttatatattccactcaactgggtaccctctcccccttattcctcacttctcttctcttctcttctcttcgagggtacccctcctcgcagatccgatccgcacccttcactaaacccattattattgattattgattgataataacatttgggtttcattttcattccaagttgttgcatttttcaacatgtctttagctcactgctgaaccccttttctttctttctttgcccccttttgtccaaacccccaaaacaaaaacaaaaaaaatgatgatcaacaaaacgctttttctcacttatgtctacttgttcatctacatcctgctctcttccggcgtcattttgtacaataagtgggttctgtcgccaaaatacttcaactttccccttcccataacgctcacgatgattcacatggccttttctggggcagtcgcatttttccttgttcgggtctttaagattgtgactcctgtcaaaatgacatttgaaatatatgcaacttgcgtggtaccaataagtgctttctttgcatctagtctttggtttggtaacacagcctacttgcacatctccgtggcttttatccagatgctcaaagctctgatgccggtggcaactttcattatggctgttttctgcggtattgacaaagcaaggtgtgatgtgttcttgaacatgttgctggtcaggttggngggttgtcatctcctcatatggggaaattcattntaatatagntggtacagtttaccaggtcacaggcatatttgcagaagctttaagactggtcttaacgcaagttcttctgcagaaaagggggttgactctaaatcctattacaagcttatattacatagctccatg

SEQ ID NO: 127595 - DNA, 411 bp, Glycine max
  Clone ID: PAT_MRT3847_86222C.1
gttcctgtgtgtttggctatgatcacaaagatggtgagaaccccctctcgtgacaccagtggaatgaagaaagggacttgaactccgcatgaatattgacgttaattgcttatgctactccctctagttgctggaattggagccacctccccaaatttgcaagacttgcaaggagtaggaaaagcagtagatactgatggatcaattatctaaaaccaaacctcaaaagaggaaactccactcaagagaaaggagaatgcatcgttagcatgcacataatactagataccagatggtctgctattgcggctgaattacctgtaatgacagataccctaatacaaaaacattggcacacctcactcaggaaaagatctcaacaaaacacagtcacaattgaagaaactagag

SEQ ID NO: 127596 - DNA, 807 bp, Glycine max
  Clone ID: PAT_MRT3847_86223C.1
caaagcaaacacacacttgatgtttagggctttagtattaggatcattcaagttttcataactcgtaagcaggaacataacattgcttccttccgtagttaatgccaataaaagtaactgcttgcaaatgtagagaatccgggaatttgcgtaaaacgggcaaataaaacttaaatgtaacacattgttctgaaaaaaaaaacctcccaatattcactgtttgcaaatattaatgaataactagccaaaagatttgtttgccatcaaacaagaccgagtctgaaaaacttggaaaagtctgggcgctagcagcattattaccaagaacactttgtatttttaatattctccaaacctcagtgttatgcttttgccaattcctcttctttcttgcccttgcctcctgtggccaacttgtatcccccatagatgagtagtccccaaccagttaaagagacaatcacaaagtgctcctccttccatttagatgggctcattggatctttccagcaggcaactttgggagggccatggtgatcggcgaggccacggcggtggatgagttgaaggggagtcttggaagtggaaagaccaatgcgggttaaagatgcggctccacgtgcaaatgaggccatggcttctgcgaaggaaagagagaaagagggcacagtgttgtgtgacacccaggcaggcgtgccctcggcctaatggcttcgggcgcaacttgcgttcaaagactcgagggtacacgggattctgcaattcacaccaagtatcgcattcgctcgtttcatcgaaaagaccgag

SEQ ID NO: 127597 - DNA, 376 bp, Glycine max
  Clone ID: PAT_MRT3847_86224C.1
agggtgtaatctttgttgtattttcacgatcctttgtgtgtgtggataattttatttgagggagagttgattacccaacacaaagtaacaaaatcaggagttaaaaattaagccaaaccaatttttattgcactgagacaggctttatgcataccaccaaacaactgaaccaagcaccatttttcaaggttccaaaagaattatacaagaatatagaaggttacatttctttaaccggtagtatttaactggttttaattggttaaccagtacaactgtacaagaactgttagttatcaaccaaatcaaatgcaacacaaaagataaatgtttcatgatctcccataatgttttcttcttttttggttggtttcta

SEQ ID NO: 127598 - DNA, 370 bp, Glycine max
  Clone ID: PAT_MRT3847_86225C.1
ccctcgcttacttggacgcatgggtccgaccatccccgaggcgttctgctactttattgtctgggtcgggatatctccaattcttcctagcaacaatccgaatggaaagaggtgcatacagaggccgtggccgttagcggagaggtggacgcaacatgaacagcggaggtcgcggcacatacggtggtggccgcgacggtcacggagaccatcacagttacggcggcggccgagttggtcgccaccctgaccgcaatagaagtgctccttctcaatcacagtggccacccaaggcaatccctcctttttatcatccacaacgccacgaattttattctcaagtgcaaacacacactcaagctcgaccaga

SEQ ID NO: 127599 - DNA, 708 bp, Glycine max
  Clone ID: PAT_MRT3847_86226C.1
cgaggttgcagcagagtggagatgataatggtcctaggggggctgaaggggaggaagtttcacagagcggccacggcccgcctgttgcgggtctcggttcgtctgcctgtgtctggtcgagggttggtgtacaaactggcgcgcaatcctagccactccacaaaccgggtctgccagcctgttctgcgccacttgacccgtctctcctcgatggaactgcatcccttcaagacatggctggccaagagatttgcacttctcaattcattgaacagaaatattcacacaaacctagaaattcctcaaacggggactgccagcttgatttacttgacttgaccaatatttcctcactggactttgggcaggaatcatcacagatgcaaaatgattgcgtagctcctagtgaaaatcacaacattgtgaatgttccgtttcagacttcgatggggttaggtgttgcaacgaccatgggacctacatctgttaaaccagaacacatgttgatgtctgatgatgaatgttgcagaatcctattttcagaagcaataagtgatgaatgcttttcttctggagattacagtaaaggtgtaaacatggttaacttgtcaggatgtacctcatttctttgtcagtcatcattaccatctgtcccatcagtagtttcttctgctggtgataggttgacgtatacatatacagccgaag

SEQ ID NO: 127600 - DNA, 220 bp, Glycine max
  unsure (1)..(220): unsure at all n locations
  Clone ID: PAT_MRT3847_86227C.1
aaacctaaagaaggctggtttccacacatgaattttgnnaattntnaaggatccacatataatcacttcaaatgctacttcatacacataacnactgatagagaatctgtcgaggtagggatacataattgttgtaatcattgaaaaccaatggagcgatctgcttggagaccccaatgctaaagctggacctctaagcttcctcaatcctgccttcttt

SEQ ID NO: 127601 - DNA, 131 bp, Glycine max
  Clone ID: PAT_MRT3847_86228C.1
acgaaaattctaaagtcttattgatactgagagtctgacttagatgatgaagtctagataacactagagggatacctgacatgatctctcctgattgagctggacaaatggactagacagagcctaaagaa

SEQ ID NO: 127602 - DNA, 222 bp, Glycine max
  Clone ID: PAT_MRT3847_86229C.1
tataagacgacagaagggtacaaatggtgatgctgtggaggatcataaatcagagaggaagaagaaaaagatagaaaagaggacattggaacaagagatggaggttgacgatcaggctgaagatgatggtgccaatggaatcacaagtgagaagaaggaacagctaaaaagaagaataaaaaggatagtattggagaagcattcgaagctggtgaagtgtct

SEQ ID NO: 127603 - DNA, 758 bp, Glycine max
  Clone ID: PAT_MRT3847_8622C.1
cctcatatatatgctgctattaatattatcaggtatgtggcagagcattgtccaagcaccgaccccaccgccattaatttccatatattgatttcgtgccatctatcttcttcttggttctccaattagggttcaacttcaaccttgctttcttttctgctcaacatggctgaagattatctccaagaagagaagaagcgagttcggaacccttttgtccccattggtgcacttgttactgctggtgtgctaacggctggcttaatcagttttagacaaggtaattctcagttaggccagaagttaatgagggctcgtgtggttgtccaaggtgcaacagtggcgctcatggttggcactgccttttattatggagaaaatccttggcgatcgagttaaaatttgaatggcctgaaacaaaagttgaagtttgtaattgcttggttccttgttggttttagttttatttttgtgataaagaatttggtcatttgaggaccaaatccaaacccttgccaacatttaaattttttctcacaacgcataacgattgagttcatctgaatgtacttttatatatagttctttaatcaaataaacaactctcaattgtctcttaaaaaaaaaaaaaaaaaactcgaggagagaactagtctcgcgttttttttttttttttttaaaaaaacgaaaaccctccacaatgacaagcaagcatttagtcatttacagaattgctgaacaattggttattccctcgt

SEQ ID NO: 127604 - DNA, 225 bp, Glycine max
  Clone ID: PAT_MRT3847_86230C.1
actcgagccgctccagacggatgcgagaacacgcagaagggggagattttactttttatcattaatcctgagcctccctctgccgctgcagcctgcaaattcaatggcttcagagtcggaactagtcgtcccaatgacggtgataaaggtgcaggtactcgtactcagacatcaacgttggcgatagtggaaatcgtcttacatagccgccaaggtgttggtgca

SEQ ID NO: 127605 - DNA, 458 bp, Glycine max
  Clone ID: PAT_MRT3847_86231C.1
caaatctctctgttctcatttactctctcaaaattcgtgcacgctagtcaccgagcgtgattcagctttttcccttctgtttcttcgctttctctgacaatcaaaacggaaaatgagaaatcaaagcgcgtttctatgaacccaaatgacatcacaatcaccggcatcacactgtttaatgcagtaccacgattctccgcaccctaagcattaacgtcaaatataaaataaagctgcacaagcacaaaaccttccacttcgtattccccaaaaccgtaactaatcaaaatttgatcaaagagaatgggaaaaacatcaagcagagagtggacacggatctacctcatctacggaatggatcagtggcaaaccttcgtcttccttctatgtcaagcggttctcttctcagttctctcaatactttaccttctctacttcaatgacatctctcacacttt

SEQ ID NO: 127606 - DNA, 838 bp, Glycine max
  Clone ID: PAT_MRT3847_86232C.1
tcctccactcatctctctgttctcatttactctctcgtattcgtgcacgctagtcaccgagcgtgattcagctttttcccttctgtttcttcgctttctctgacaatcaaaacggaaaatgagaaatcaaagcgcgtttctatgaacccaaatgacatcacaatcaccggcatcacactgtttaatgcagtaccacgattctccgcaccctaagcattaacgtcaaatataaaataaagctgcacaagcacaaaaccttccacttcgtattccccaaaaccgtaactgtacgcgatacactcctagaaatctgtctctttttcgggtctagtgaggattttgttttttcccatcattttcaatgcttttcaaattctactttcctaattccgaaacatttttttatttgtgaattgcagaatcaaaatttgatcaaagagaatgggaaaaacatcaagcagagagtggacacggatctacctcatctacggaatggatcagtggcaaaccttcgtcttccttctatgtcaagcggttctcttctcagttctctcaatactttaccttctctacttcaatgacatctctcacactttccaaagccttctctccatcgcctccgtgccctgcagcgccgcccgcttcgccgccgggtttatgggctccgtcacggcgctctccgcgctgtgcctcttctacgcggcggcgaatttcttctactcggcagtgccgctccattctgagatggcacagcacatcgtggacacagtcaatgactggccgacggtgcgacaggtgctcgatctcggctgctgcggtcgcggcattctgctgaatg

SEQ ID NO: 127607 - DNA, 206 bp, Glycine max
  unsure (1)..(206): unsure at all n locations
  Clone ID: PAT_MRT3847_86233C.1
aattagaagtttatttggacgaggaagccggaggggaccactaaagaggagaagccggcnaccaccaagagcccaaccagngacggggaagagcaaanggcngccaagcaacccncggaggaggggcagaaggagangaaggccacaccaccaggccccaagagggcaccanaggacccccnggacacaaggaagaagcccaacaa

SEQ ID NO: 127608 - DNA, 1431 bp, Glycine max
  Clone ID: PAT_MRT3847_86234C.1
acgagccggtatgagccaaggaaacctttcaggggcccggatggggcgcggtgggctgtgcttcaaccaccatctcaggcgtggcctcggtctgtctctggcttcgcctgccgctggctcggggtgcccttccccggggatgtcgccgcctgtacgccccgtttgtcgagtcagcagcagcaatgccgcagctaatatgcctttgtcacaacagacatcaggtggtatgcaatcggcacaatccaaatttgtgaagggctgggagggaagcttgtctggacaaagacaaggacagccagtatttatcaccaaacttgaaggttacaggaattcttccgcctctgagacacttgcagcaaactggccccctgtaatgcaaatagttcggcttatatctcaggaccacatgaataacaaacaatatgtaggaaaggcagatttcctagtttttcgggcaatgaacccacatggatttcttggtcagctgcaggaaaagaagctgtgtgcagttattcaattaccatcacagacgttgctactatctgtttctgacaaagccttccgcttgattgggatgctttttcctggggatatggttgtatttaagccgcaattgtcgagtcagcagcagcaacaaatgcagcaacaacatcagcagatgcaaaaccaacagcagcatcttccgcagttgcaacaacagcagcagctacctcacatgcaacaacagcaacttcctcagctccaacaacagcagcaacaacttcctcagctgcagcagcagcagcagcaacttcctcagctgcaacaacagcagcaacaacttcctcagctgcagcagcagcagcaacaacttcctcagctgcagcagcagcagcaacaacttcctcagctgcaacagcagcagcaacaggtccagcagcagcagcttgcgcagctgcaacagcagcagcttccgcaaatccagcaacagcagcagctacctcaacttcaacaactcccacaactacagcaacagcagcagcttccgcagttacagcaactgcagccgcagcagcaacagatggttgggtcaggaatgggtcaagcctatgttcaaggccccgggcggtcacagctggtttcgcagggacaagtttcatcacagggagcaacaaacataggtggagggggcttcatgagttaactcaatttttgataagtttccccacatctaacgcagggtatattttgggaagctattttataatgttatggcatttgtatgaacatgaaacttcggtgctagaaatgttctagcatccagtcacaagtatttagctcacaatttatgtcacaaattgataggtccttcgtttgattttcttcagcaatttagccattaaaaactcagctaaataatttatattgatagaatgtttgaaagttattttg

SEQ ID NO: 127609 - DNA, 897 bp, Glycine max
  Clone ID: PAT_MRT3847_86235C.1
caggaaaagaagctgtgtgcagttattcaattaccatcacagacattgctactatctgtttctgacaaagccttccgcttgattgggatgctttttcctggggatatggtcgtatttaagccgcaattgtcgagtcagcagcagcaacagcaccagcagatgcaaaaccaacagcaacatcttccgcagttgcaacaacagcagcagctacctcacatgcagcaacaacaacttcctcagctgcagcagcagcagcagcttcctcagctgcaacagcagcagcaacttcctcagctacaacagcagcaacagctccagcagcagcagcttccgcaactccagcaacagcagcagctgcctcaacttcaacaactcccacaactacagcaacagcagcagcttccgcagttgcagcaactgcagccacagcagcaacagatggttggggcaggaatgggtcaagcctttggtcaaggccctgggcggtcacagctggtttctcagggacaagtttcatcacaaggagcaacaaacatcggtggagggggcttcatgagttaactcaatttttgataagtttcggggcttcatgagttaactcaatttttgattagtttccccacatctaacggagggtatatttttggaagctagttgtttataatgttatggcatttgtatgaacatggaacatctgtgctaaaatgtcctagcgtccaatcacaagtatttagctaacaattcatgtcacaaattgataggttcagactaacggtaaaatgttcgtttgatttcttcagcaatttatatttagagtatgttaaaaagttattttgaacatgttgattttaaagttgggtagaattgattttaataaatattggagctgtagaaggt

SEQ ID NO: 127610 - DNA, 1055 bp, Glycine max
  unsure (1)..(1055): unsure at all n locations
  Clone ID: PAT_MRT3847_86236C.1
tattatttccaaacagtcgtgacaataatgagattcttgtttggggacctgannnnnnaaacttagaattggaagactccacccatcaccgtttccggcaatgtggatgttgtcgcaatccaaacccctccgcagccgcacctacctgctacacttcacgaggcggcgctgtcactgcaactcccaaaacgacgccgcatcggcggtgacccaagtagtggaacttctccaacttccaccggaccattgggaccacgacaagctccactccattctcttcaacccctcacccctctcctctcaccacttcctccaaatcactctccaactatcttccattcccaaatccctccaatttctcaaatacctctcagcaaaagccccacaacaccatccccattccctctcttccgtcttccagggctctcttgagctcgcttctcgacaccccaattcccaaacccaccttctcagcctccaccgcttccgaaaatccacccaccccactctccccctcactcccaaatccgcttcgcttctcttgcagtgccttgaaaatgcgcgactggtcaacgactcgcttcttctctttaaccagctcgacccttcttccaaaagtccccaactttgccacggattgttgagggtcttgctgaaatcgggtcgtgccggcgatgcactccacgtgctcgacgaaacgccccaagcgaattccgggttttccgtgacgggggacactgcttttggggagttggtcaggagtggaagacgttctcctgatggggaggttgtcgggctggttgccaagctaggcgagcgcggagtcttccctgatggggttcagcttactcagtcggtgggtaagctctgtggggatcagaggaacggtgttgcgtgggaggttttgcattgtgtgatgagattgggtggtgcggttgatgctgcgtcgtgcaatgctttgttaacttggctaggacgggggagggacattaagaggatgaatgaactgttggcggagatggaaaagaggaagatacggcctagcgtggttaccc

SEQ ID NO: 127611 - DNA, 741 bp, Glycine max
  Clone ID: PAT_MRT3847_86237C.1
tttttgctgcattagcttgctcattaattctccttgcattctcttcagcttgtattagtctctcctctagttttgacaacatctccaaggactgattatattgaacaagggcagcttccttttcagcttctactctagcaaggtcttgctttaaggattcagctgcagtttcagctctagttgctcgttcattaagttctcctacatccttttgagcagaagaaatattttcctccagattatatattttctccaagcattgctggtactgaagaagactagcttctctttcagcctgtaatttagtaagagcttccttcaaggtttgaacttcagcttcagctttgtttgctcgttcattaagtccttgagaattctctcttgcatgagacatttctgattccagattggacaatctctccaaactatactgatactgaagcaagccagcctccttttcactttctaacttagctaggactttctttaaggccaaaatttctgtctcggctttggtaatgcgttcagactcgggtaagacttgagctctagtattttggcttccgttgtcttgccctttaatctcctccgtgtcaagaaaattaagcccccttcttgcagactttgcatgacttacaggttctcctgacatgaacagatcattgagctgttttaaaccctttctgcttataccagaatcagcttcttcagtataagaaccatttcgactgattgcatgga

SEQ ID NO: 127612 - DNA, 277 bp, Glycine max
  Clone ID: PAT_MRT3847_86238C.1
tttctcttccgctcgcaatggttaaagttaatgtagcatgtgctgctgttggcttgacatcaagttacactccaactccattggtggaagctggatcgcaaaaagacagagggataattgtggagtctcttggaaggacgtattacgctgctcataacgctcatcagcccccagagaaagattttggtggagggaaatcttttctttgatactaaatctagctataaaatggaaaaagtggcctcatacaaaagcccaattgggttgtgggaaaacc

SEQ ID NO: 127613 - DNA, 775 bp, Glycine max
  Clone ID: PAT_MRT3847_86239C.1
caactgtatccatctatagagtctagacatcacccaagcttgtgcttattcactgccctgtgtcccccatacactcgcacaccatatgtttgattatttgcgtcagccaacactgaataaaaattgttccttggcagtgttgaatgtggatgcacttgaggccgttctttcgcgaggctaacctgttaaacgggttaacctcgcgagtgcaagcccgttcctatgctcgtcgtcgcgaaccgtttcccaccaaagtttctcactacctccaccgtgcaaaactcattgactccattagacttactctacgctccaacacccccaacccctcccttccctctctcataaaccaccgtcttatggactctttcgtggccactcatgcacttcgctctgccccttctgctgattccgctctctccttcgtccgtgccctcgaaaaaagttctcatttttcccacacccaccacacactccattcacttgccactgttcttgccaagtctggtcgaagctctgagctcaaatccctcgttgatgatatccgagccaaccggttcggctctgttcagatcagtttcatgaatctcatgcagtggcatgctgcagttagggaccttgacactgttcttcaggtgtgggaacagtatgcacttgagaatgaccatctatgtactgaatcttacaacattgttatgactctttatgctcaatgggaaagaactttgaggctgttcgagtttttcgcaagatgattgatgaagggtctcttccg

SEQ ID NO: 127614 - DNA, 175 bp, Glycine max
  Clone ID: PAT_MRT3847_8623C.1
agcattaccaatctagttattagttatggaacaatttgcacagttgcacttgatctatggttccataactaataaggaaagagcaactgtgcaaattgtgctttgcattctaatactgccctttggggcttcttttttttcctgccaaaaatatagtgattcagttcagaggatt

SEQ ID NO: 127615 - DNA, 280 bp, Glycine max
  Clone ID: PAT_MRT3847_86240C.1
cgacactctaccgggatatggccgcgtccaatcaaatcgagactcacgaggcagctcacgaagagtcacggcgggaacttgttcatggcgatgattcaggcctccttaacactcggatactctctgcgtatacgatggaactggcgctcagacactctgggatgactctctgtcaccatagcactctgctcgcactaggattcctctccctctcaaacagaggggcgctgatgactgccatgcccacgctccgggtccttatgggactgtacggcggcta

SEQ ID NO: 127616 - DNA, 228 bp, Glycine max
  unsure (1)..(228): unsure at all n locations
  Clone ID: PAT_MRT3847_86241C.1
cctaattccgaccatggaagccacggacttccgcaatganctttcgcccttccctccaancaaagnncaannccaancccnagttctnganccgggncaaccatncanttancntttccctccggnagccaagccaacgcnccccggccgtgcntcccaacnatccgggcngcaattccccgnanaaagaaagaggcaagggtggagactgtncggganngntcnaga

SEQ ID NO: 127617 - DNA, 290 bp, Glycine max
  Clone ID: PAT_MRT3847_86242C.1
cttcgtttttttttttttttttttttaggcgaaacatacacgtcctaaatttattgaaggtagctcattatgattcttttacgctttttataacacacttcattgcctcactctatgaacccgcatgaaccaaccccatgattctgataattaaaagggactgggaagggttcttaaatgaatcttctccccatattcccttaaactactgcgctttttgcgtatgaatgtaaataccaggctaacccgactcctatagaaaagacacctcttcattgattaaagtcgcg

SEQ ID NO: 127618 - DNA, 268 bp, Glycine max
  Clone ID: PAT_MRT3847_86243C.1
ctcgcaccgggtatatgggctgccttactatagaggttctaagttgtgagccttgctggttgctcttatcatacccatttcggtgggcagagacaaacctataaccccgttgctgttgataatagaaacgaatcgttatttgatgaacataaacaggcatcagctgttgagtgtcacatgcgtcggcttcttacctcgagggcacggtatggttgcggctcgcttgtatcctgatgcacacacactgaaatacaggcatcttatcttg

SEQ ID NO: 127619 - DNA, 488 bp, Glycine max
  Clone ID: PAT_MRT3847_86244C.1
aagacgacagaagggggattgggtttggttctcagtgtacccaaaaacagaggcagaaggaggaagaagtagaagaagattagagagagtgagtgagtgagcgagggataattggcgagttagggtttcgaattgactcactgagtctttgcattgtgtcgccggttttttttttcgccggagaaaactcgtgctccgatctcctctgcttttgttttcgatagcatagctgtttgaaaggcaggaaccactggccattccgtttctcaaattttttggcctcattctttcacaaatctttggcctccaaaagagcttcttcaaccattgtgactctttggcttttgaaatcatcacaattgggagtatggctgtctctctgacacgtttgtcatggtggttgtggggtcgtagcaacaaagaaaaagagcctggtgtttctggtggctctacactgaattcatcttctgaatggagttttaaaggaa

SEQ ID NO: 127620 - DNA, 482 bp, Glycine max
  Clone ID: PAT_MRT3847_86245C.1
atttcggctcgagttctaatgacctcaatgtgacctcttctgcttcggttaaaacactaagcatggacaaagtgtaaaactcactttttatggctttcattgtcttcttcaacttgttcctggaagccaagtattttccacccacttttgtgaaaacagtttcatcacctttccttctttggatgacagagtgaagttcctgcatgctttcctttgatatcaattggcactccttagctgtactgcagatatccaagagcctcagagacacttctagaatgtcatcaacgcacttgtcactgcactctcgtgccaaggcttgttgtttaattggcacttgaagcaacttataagtgcagtcatgcaaatcccaacaatccgtaagtttgtggcttagtgaagatgatgatgatattgaagaaatggctgcagagtcctgcaatctttgcatatgctcctcacattgtgatatgagtgggtta

SEQ ID NO: 127621 - DNA, 471 bp, Glycine max
  Clone ID: PAT_MRT3847_86246C.1
atgggggcagggaaaggggctgtttggttctccaacgcggtggcgttagtagctatcgcggtggtagcttgccatgcccaaccttcggcgacgttcaagtgcagcagcgcgaacaaacccacgtgtcgtcccctgattagctactctaacccgaacaccaccaccctcggcgacattcaaaagctcttcaacgtaaaacacatcatggacatcgtgggagcgaacaacgccacaaaaaaaatatacggtgggccccaacgaggttgtgaagattacaatgtgagccatcccaactcaaatcaaccaactggtcttcttggccctctctggagtgttcaagcaacgtcattccctccacagattcctgcaatcgcacaacctgcgcctataccgtgccaccgagtggttcaggaggatcaactggttctgattcaggagcgtcgaggagcaccttccaaggcttgcttttga

SEQ ID NO: 127622 - DNA, 435 bp, Glycine max
  Clone ID: PAT_MRT3847_86247C.1
atggttcattggactatcccttgcttgtcccaaatgctacttacgaatgcgtcaaatgcaagtgtgactccctttgttgttcacatatttttattgaacatgtatttggtttgcgtgtttagattacaatgtgagccatcccaactcaaatcaaccaactggtcttcttggccctctctggagtgttcaagcaacgtcattccctccacagattcctgcaatcgcacaacctgcgcctataccggttattataccttccgcaatatctcagcagaagttgtaacagagaacaccacttgtgctgtgccaccgagtggttcaggaggatcaactggttctgattcaggagcgtcgaggagcaccttccaaggcttgcttttgagtaatcttttgattgtcattcactttgtcctctttcttgtctatgttttgtag

SEQ ID NO: 127623 - DNA, 458 bp, Glycine max
  Clone ID: PAT_MRT3847_86248C.1
gagttataattagtttaatttagagaacttatatttttcaattccgtgcttcaaatacgaaggaatttttcatgaagatatgttagatatatgaatcagttgacggataaaatacaatggctagtaaagattttaaaataactattatatatatatatgtgtgtgttaccctgtatataaacacagtgactacttgcatgctatattaatgagatatcccacgaattaatcaaaattcttagggctaatttgatacaaacagaaaatcaccacactatataaacaattaacatcaatgacaaaacaatttacatatgatttttaaaaaattgtcactatttttttgtgacaccagtattaatgattaaaaaaataatttttttactaatttttgttactaatccattaatttctcgtagtgtcggcatttgtctactattatatagaaaccatactca

SEQ ID NO: 127624 - DNA, 400 bp, Glycine max
  Clone ID: PAT_MRT3847_86249C.1
gggaggataagagctgctttgatggtgtgtaggcatatgccaaggatgaatgtggtggcatggaatgccatgctttgtgggttggccatgcatggtatgggtaatgttgaggtggacatgtttgctggcatgctggaagacgtgaatgctgatgctgtgactcacatagcttagtgaagttgtcgcagccattcgggtctagatgaacatgattagcagtcttaccatgaactttagcgttcttataggatcaggccatatattgagcactatgctttcaatactaatattcttggtcgagctagacgtctgaaagaagcttacgaattacattagaacatggcagattctccaaatgaaatttttatgaggtacatcaatggtgcttggtatacacact

SEQ ID NO: 127625 - DNA, 135 bp, Glycine max
  Clone ID: PAT_MRT3847_8624C.1
ttccttatccgaattcaaaccctcataaacatcaaaaacctgccgtgccttcatactacgcgggggtggcacaaactatatccttttgcactatatctataccatatcacaatcattgtattctaagctcaatgt

SEQ ID NO: 127626 - DNA, 326 bp, Glycine max
  Clone ID: PAT_MRT3847_86250C.1
atgggggcagggaaaggggctgtttggttctccaacgcggtggcgttagtagctatcgcggtggtagcttgccatgcccaaccttcggcgacgttcaagtgcagcagcgcgaacaaacccacgtgtcgtcccctgattagctactctaacccgaacaccaccaccctcggcgacattcaaaagctcttcaacgtaaaacacatcatggacatcgtgggagcgaacaacgccacaaaaaaaatatacggtgcagcaacaacacgggatatcgtcacgacgacgtttgcgggtctgatgaagtggccgcagatccagatggcgaataa

SEQ ID NO: 127627 - DNA, 509 bp, Glycine max
  Clone ID: PAT_MRT3847_86251C.1
gtctcatcctacatagttgtctctttcttctgttcgccttgaacaatacatagttgcttgctgatattcactgtgtgctatgatatatgatccgaaatcatgaggtcaatggaacagaactaccgtatcgtgatgctcggggccatggaacggaatcgcaagcgatccgacgcctgacaaatacctctcccgcttataagaagtattgctattgcatcagataccaccctgaaccaccggcgcactctaactttcattacacaagtatcttttgtgtctatgatcactagattgccagatcgcattatcagaacaattgatcgctggagagatcaagaatcgatctccagacctgatctgaagcactggaagagttgacgaggaacttggcacgacaagatactgtgcgcatgaggcttattatactagtaactgcaatctatgaccctgagctgacagccgtcatagtcaaaggctcttgaaccgaggctacgttctgtactgcaaca

SEQ ID NO: 127628 - DNA, 298 bp, Glycine max
  unsure (1)..(298): unsure at all n locations
  Clone ID: PAT_MRT3847_86252C.1
tagggaagcacttgtatgttcttttgctttgaatcccctgatccaattatactgcttcatccttaatgctatatgtctagtacctgcttctaaatttgtttatgcagtgaattctgatagttggttcagcaccaattgaacttgcagttaagtttgttctgtgatatagtgaaggaagatttgtgttcactgtccctttatttgctgtctgggctgtaaaagctttcaagtgatttatgcaataactaataactatacctantatggattgctgacattttcagagtttctagggtag

SEQ ID NO: 127629 - DNA, 1361 bp, Glycine max
  unsure (1)..(1361): unsure at all n locations
  Clone ID: PAT_MRT3847_86253C.1
aactacggctcgagtttattaaagtctttgcgtgcaatctgacatctcttttcaatctcaaaaaggcattgtgaagaaactaaaaacacaagcgcgtttctcttgttcccttcttctcttttggagttttttaaaatgtgtgaaggacactaatgggttcacgggttctaatcgagaatttaccaagggggaatttttgtaccctgctgttagttttgtgggtttgtgcagttacagcctctgtgacttatgatcacaaagccattgttgttaatggccagagaagaattttgatctctggttccattcactacccaagaagcacacctgagatgtggccagaccttattcaaaaggccaaagatggaggcttagatgttatccaaacctatgtgttttggaatggacatgagccttctcccggaaaggtacgacttggttaagttcatcaagctggtacagcaagctggtctctatgttcatctccgcattggtccctacatatgtgctgaatggaactttggnggggtttcctgtttggctcaagtatgttccgggtattgctttcagaacagacaatgaacctttcaaggctgcaatgcaaaaatttactgagaagattgtcagcattatgaaggaggagaaattgttccagacgcagggaggtccgataattatgtcacagatagaaaacgaatatggaccagtggagtgggaaattggtgcccctgggaaagcttataccaaatggttttctcggctcgaggtgggtttagatactggtgtcccctggattatgtgcaagcaacaagatactccggatcctcttattgacacctgcaatggatactactgcgaaaactttactcccaacaagaaatacaaacccaaaatgtggacagagaactggactggctggtacactgagtttggaggcgcggtccctcgtagacctgcagaagacatggcattctcagttgcaagattcgtacagaatggtggttcatttgttaattactatatgtaccatggaggaactaactttgatcggacatccagtggcctcttcattgccaccagctatgactatgacggtcctattgatgaatacggacttctaaatgaaccaaaatgggggcatcttagagatttgcataaagcaataaagctatgtgagccagctttagtgtctgtagatccaacagtgacatggccaggaaataaccttgaggtacatgtgttcaagacttctggtgcttgtgctgcattccttgcaaactatgacaccaaatcttccgcatcagttaaattggaaatggacaatatgacctaccaccatggtctatcagcatccttcctga

SEQ ID NO: 127630 - DNA, 514 bp, Glycine max
  unsure (1)..(514): unsure at all n locations
  Clone ID: PAT_MRT3847_86254C.1
natgtaggggagattgttttttancttttcttattttttgtttttacaaaataacacacactttacacactattaccattattaaaataggggctgaaactttcaaatgggctgaccctactcacaaggaggggcatgccgaatttgctttattagattaagcatcggaacatggaaaagaaaaaccaatttccaaatcattcacaggattccattttttaaaaaaacttggacataccctgtggaacaaaaaacccggccttataaattttaccacaaatttcaaaattttgcaagattccccaaataatatcaaaacctgaaaactgttcgggattgcccctatagaaaccaatttgccaagaagttggatttcccccctcagaactctcactttgaaaaccattattaggaccacctacctttattgggaaaaataattcccaagaatgaggttttgattttgcccacctacttgttttaaaaagttttttactgttactggtttggaaaa

SEQ ID NO: 127631 - DNA, 147 bp, Glycine max
  Clone ID: PAT_MRT3847_86255C.1
atggagttagggctctgtcaaggtggacagcgaaacagcgccgtagctttaacctcctcgtggtgctactacggtggagagtgtagcagaaacattgggcttacaatgcaatggaccttttctaaagggcctttttggcatttttga

SEQ ID NO: 127632 - DNA, 629 bp, Glycine max
  unsure (1)..(629): unsure at all n locations
  Clone ID: PAT_MRT3847_86256C.1
ccacgcgtccggccattgatgggtttctgcaagtggaattttaattgtgtgtttgtgtatgtgctgttttaaattgaaatagttaagctgcttaagcactctttttgtcgtgcaccccctttgatttgtttatcctcaatttgcatgtttgattttgctttgtgggttaatggcacattgccacttgtgcttagatcttagaatttgcacgactatggaaaagtttcataattcaacttatgttcttcaaattcttcaacttttataaaaactctctttttcgacttctccaaaagcttagatgattttttttaggaataaacaatcatttaagcaaaaaccagcataacccgccataaatcccaaccatcccaaatacaaattcctttcccaaaaacataatattaagaaaaccatcgctcctaagtctcgaattgcagcatatcagcacaaaattttcaaaagctgagttctataaattatttttatctgatggaagatgtttaattttatttttttttgnattctttcttccataactgcttattgacaagtttatttaccattgtaagaattgtttgtagcctattagttataggtctgatcaactgtaatatctatatgtcatg

SEQ ID NO: 127633 - DNA, 495 bp, Glycine max
  unsure (1)..(495): unsure at all n locations
  Clone ID: PAT_MRT3847_86257C.1
tacggctgcgagaagacgacagaaggggatgatcagtctgaattagagaacaataggtttgggaaaaataaaacaatatggaagtgcatgagaatggtgggtctcctaggcagagccagagcctctcagagttgcagattgtgactatgatgagcgtgccacccctcaagatgaccgaaccacgagcagttcgcaaagttttggtgagtgaggacaacacaagggccattcatggatgctaccaagtagttatgtattatgagaatttgaaggagaaggagcatggttggtgtctggctggtttgattgtggagtcactagccagggttctgttggatcaccctctactcgctggtcgtcttcaaagaagggaagacaccggtttcgaaattgtggccaatgattctggcattcgactctnggaggcatgctatccgaccaccttgtcacactttcttcacttgaatgaagaacaacaccaccttgtgttctgga

SEQ ID NO: 127634 - DNA, 338 bp, Glycine max
  Clone ID: PAT_MRT3847_86258C.1
ggggaaaaaaatttgatttttaacttccattaatagctaacagggcaatttttggccattcctgttttttttaatcaaacttctttaccttttttttttgattcgaacaataaaaaattttctttttaaatttattccttatctaaagctaaaaaggtggaaaaaatttgaatttttgagaataatggctttgaccaataaactaaactttgggagtctcatgaaaaagcagagtttgacttccattcatgagcaggggggcagttaaatccttggggaccccggagcattggttacttacttccatcaccggtttttaagacccaaacaaaaccttt

SEQ ID NO: 127635 - DNA, 362 bp, Glycine max
  Clone ID: PAT_MRT3847_86259C.1
tttttcatcgtgtatgggtgtaaccctttttggtaaatgaaatctacctataaaaacaaactcaattctacctcaaagctgtgcaccccattaatatccttcttctctcattatataatgcgccatgcacgacctattttctgttcaaaacttgctgacccgtggtacaatacgactactttgtcacaaaacccctctatcaaatttttgctgggatgctatctttccctctaaaaccgatttcaattttatctcaaaacttgtctaccccaatttgcatgttttctccatcaagccctcgtatttaaatgcaacagccatgacccatttatgaaatttactacacaagttgtgatcattgc

SEQ ID NO: 127636 - DNA, 278 bp, Glycine max
  unsure (1)..(278): unsure at all n locations
  Clone ID: PAT_MRT3847_8625C.1
ttctcttaggttttttgaaatagtgggaggaggggggggggagaaacaaattngtccatttttcctaatttcttccaaatanctgatacaacattaaaagacattcagtaacctttttgatacacgcaaccaaaattatgaaggaagagggtaaatacccaacatcccaaacataacaacggttattgttgatctcggtttataatcatacgaaacggccactagtctctagaatatcattccccacaaaacaacataccaacatgagaaccactaaa

SEQ ID NO: 127637 - DNA, 348 bp, Glycine max
  unsure (1)..(348): unsure at all n locations
  Clone ID: PAT_MRT3847_86260C.1
gctcgagctcaatgttctntctcctttatcaagtttttctgccacaacaacancattaatcaagcgctcttctcccttcacactcccccaaccatcnccacttctcttcaaacattgctcccttttctatcctaactttcttttccacactctaccacaaccttattttataacccataatcaccaattgccataacaatctcaatttctccattgagggactccaccaccacctaccttcttatcttctgttctttaaacttttatccctaagttatgaccttcactaatcacatactaacatttatttattcatcccattccttcataacatgtttaaaaaattat

SEQ ID NO: 127638 - DNA, 388 bp, Glycine max
  Clone ID: PAT_MRT3847_86261C.1
tttttaaaactgtgattgtttaataataaacggtacagacgctctttgaaacaacacacaattcttctgtttttgaactcaatgtaaagggaaaaaaaaaggaacaaaaacaaagtactaaacatgtgggattcaagcccgaactttactctaacactaaataatttacaagagaaaaaggattacaaaaatgtactaaacaagggggggagaaaaaagaataaaatgaacaccctttaaagatgtgatgctacacaaaattcaagactcccatcttcctataaaaaagactgaataactttaaactcttatataaataaacccaattgggagaaaggtaacaacggatatatgtagttctatcccggaagacccatttatggaaaaa

SEQ ID NO: 127639 - DNA, 157 bp, Glycine max
  Clone ID: PAT_MRT3847_86262C.1
gacctcatgctaataaaagtccccagcttctggagaccccctgccggcagcccctttccctgccaccccaggagccaggcttaccctcagctgggtgaagactacagactccctggggttggcaagggctccatctcagtggaccaggaagcaagag

SEQ ID NO: 127640 - DNA, 361 bp, Glycine max
  Clone ID: PAT_MRT3847_86263C.1
tgtttggaatcaaatggtgtcctcactgttgccatttgattccaaacagcctgctgcgaaacggaccgaggaatggcgcccataatacgagcacctgaaataccaggattgatcccatatgcacacatattagctatggttgccaacttaacaccaatgtcaaatatacctgttactgcttacactgaactatcatgcaccactatgatacattgatggcacaccaattaggcaacatacttacaaagctttaactgtaaatagaaggagcattggattaataagctttacattgtaatcagtaatagagttttccattattatgatatacatcatttttgctcagaaaataccttctaat

SEQ ID NO: 127641 - DNA, 214 bp, Glycine max
  Clone ID: PAT_MRT3847_86264C.1
ccacgccgtccgtgatcaacatcataaagcgcctcgttccatattaccgactgaggtactacggatcctatcacactgagggaagagcttatgtgacttgttgctgttgcatcagcacaccttcatatgaccaccgaagtatttttttttttctacggcgcggcggatatggcatagttggaggaggagaactctagcgtaggacgagcagtgg

SEQ ID NO: 127642 - DNA, 298 bp, Glycine max
  Clone ID: PAT_MRT3847_86265C.1
gccctcgtaagctcgattcggctagtcaccttcaccatgctcctttcttgttcctaaagagttatgggggcaaaggaaaacgcataattacaacaaacttttttttgtatgttgtgatttttttttgcgaacggggccctgcttttataccataaaaatttgtctttgccctaactttacagagtgtgtaccgattctaccaaggaagaataggatgatcaaaaataatctcatggaaaatagaaagaagtgaacacgccactaaagctggagattatatggccaatcccacgggaag

SEQ ID NO: 127643 - DNA, 384 bp, Glycine max
  Clone ID: PAT_MRT3847_86266C.1
gggaaacactattatccggcacctttaccggaaaaggataaaacaggacaaaaccctccccgaaacaaaaaaaaaaacccagccttatagttggaaaagccataaaggggttttccggaccttaagaaacaaaaaagaggaaaaccaaccaaaaattttcccctttttgggggaacaataggtattcggacataatttgggggacttctccaaacaggggggccagcatttcctcaaaggggaacaaaccaggggaaggttcccggcctattatgcataaaagcagtttttggacacccccaaaagcccggaacacgtatatccagggattaaaaggttcacggcaatctcgggaggaggaggccctcctccctaaaattaggg

SEQ ID NO: 127644 - DNA, 658 bp, Glycine max
  unsure (1)..(658): unsure at all n locations
  Clone ID: PAT_MRT3847_86267C.1
gaggaggaatttgcgggaaagaaacgaaacccagacatgaattgggtgaaacaaaaggtaacaagccaaccccacgataattcgccatgaaagctcgtcacttgagcttcttctacctccacatcatcgtcttcacactctccctatccctacccatacaagtcaacactgcaaaagggatcaacaacaccatcacgaatgaatctggcaataatagaagaatcctgcaccagccattgttcccggcgagttccgctcccccgccagcaggcacggcgtctccaccaccgtctacaccggtggtggaaactcctccctctccggacggcggcaacaacatccccttcttccacgagtacccggcggcccccccggcggatcagaaccaacacgcagcaccgtcgtccacggtgaactccacaatcgcaaacccaacggcaacacagccgacaaagggaacaaaaaaagtagcaatcgcgatctcagtgggaattgtgacgcttgggatgctctcggcactcgctttatttttatacaaacacagagcaaaacaccccgtggagactcaaaaactcgtggctgctggaacttcccacaacaataactcanacaggaacagcaacgaggntgcaaacacaacctcggcaccgtcgagttt

SEQ ID NO: 127645 - DNA, 262 bp, Glycine max
  Clone ID: PAT_MRT3847_86268C.1
gggagatccatgaactttcataatattcaggggttttatcatagaattaattgtttccaattttggttcatgagacgtggaactcatgaagtttgacataataaaaagtgtactgcaagtctgcaacaatataagttaacacagtgactacatatgcttcgcagagactttcaatcaatcttttagttaaaggaattttacatttgggtccaagaccacgttgaaaattcatggtttaatttttaagataccaagggaaaaa

SEQ ID NO: 127646 - DNA, 409 bp, Glycine max
  Clone ID: PAT_MRT3847_86269C.1
gggcgaccacgcgtccgcacgcgtgcgccaaaaggagcataagcagccgatttatacaagtaaaggcaaacgaagctgcccaaattggctgggggagaaggatatcaaccacatttaatacctgatctctctgcacgtacttaatgtggcaccaagcaaattaatcgtacgagcaatgaaagcaccagctatcttgtctgaaactccgaggaactagccatccaaaacactcacttcactaactctcaaagacaggagagtagtacttagtgatcaaaaacttctgtttaagcacatagtgaaatttgagtactgagctttggtggctctgttctgcgcttaatatattcagcagaaaactccatgtgatgttggagtggatactgataatgagatactacttttgctg

SEQ ID NO: 127647 - DNA, 298 bp, Glycine max
  Clone ID: PAT_MRT3847_8626C.1
acactctcaaaggtaatacactttataataagacatgggggactggtccacaaggtttgtatgaatcctatacatatctagggtaacagtagggccgccaaagataaaataggcactatactttatcattggtcaaaaactcggtctaaacaaccacttaggatctgcaccgaaacgcataagaggaacgaaaccacaggatttattttcttgtgaaactgcgggacttgtatctggactggggcatgatgagtcgccaccagaaatcggagcaatgcacttctttgccctcgcatat

SEQ ID NO: 127648 - DNA, 434 bp, Glycine max
  Clone ID: PAT_MRT3847_86270C.1
cccaaaaaacccttttttgaaggccccacccatggggggtaaaaactttgacagggacggggcatgattaaaactgggtgactccccaaaccctgggggggggaaaccgcccccatttttttttaccaaaatttctttttttggaaattttttttgccaaaaacaggggaaaaacatttttaaacaaattccttaagggccacaagggccgtccgggcaagggccattagggccacaattggactttccattatggtcaggggggggaacattcatggtaaaaggctcgagggagcttttttaaggttttattttaaaaccaaagttggtttccttggggcaattagttttgtgagcgcaaccccaagtgccccatgggttcaaaatgtttggttttgggggaataagcaaaccccaagaaaagaactttattt

SEQ ID NO: 127649 - DNA, 522 bp, Glycine max
  Clone ID: PAT_MRT3847_86271C.1
ggctggcggttgctccactaaaaataccttgattaaatatttatatagtgaatagcagcaaagtggcaggagcttgcgtctgcaaattctatgttgtttgatttgcgtgagtgaattgggaagatgctgtgtctgggtcgattcggcggggtctcttacggttggagttggaatcggaggagggacaacaccattaacaggcccagatggcgtttgatggcccaggaatcaccctctctcgactcagacaaaaccgccactgctggattctgcatcattgaaggccccgaaactgtacaggattttgccaagatggagcttcaagaaattcaggacaacattcgaagtcggaggaacaaaatcttcttacacatggaagaggttcgcaggcttaggatacaacaaagaattaaaaacgctgaacttggaattttaagcgaagagcaagagaatgaactttctaacttcccatcattcattccattcttgactccattgacttctgcaaacctcaagcaatat

SEQ ID NO: 127650 - DNA, 401 bp, Glycine max
  unsure (1)..(401): unsure at all n locations
  Clone ID: PAT_MRT3847_86272C.1
cggacgcgtgggcggacgcgtgggttggaatcggaggagggacaacaccattaacaggccgagatggcgtttgatggcccaggaatcaccctctctcgactcagacaaaaccgccactgctgggtccctctccttcccttttctcttctcttctcttctctttctttcgctttttcctttcttcattcttcctttctattctctccgcagattctgcatcattgaaggccccgaaactgtacaggattttgccaagatggagcttcaagaaattcaggacaacattcgaagtcggaggaacaaaatcttcttacacatggaagaggttcgcaggcttaggatacaacaaagaattaaaaacgcttgacttggaattntaagcgaagagcaagagaatgaaa

SEQ ID NO: 127651 - DNA, 1928 bp, Glycine max
  Clone ID: PAT_MRT3847_86273C.1
cttcttccactgatccacctttttcctcgacgcgcagaatatctttttttttttttctctctctctcgtatatgtaaagacaaaaccaaaaccgtggatgtgtctctacaacccaccatttcaggctcttccctctctctctccctgtctttctctccttttccgtgtttatgcttcaccctttcatagatctgcctgaaaaaaacccctcaattccaaacccttgcgatccgatccaggtcaattaatttctctctctctctctctctctctagaatgtcttcccaacgcgcagatctagcgtgccggatcttcccggagcccgatgcctccgaaatcgaccacttcgaccggttaccggactcgctcctccttttggttttcaacaagatcggcgacgtcaaagccctaggccgctgctgcgtcgtctcgcgccgcttccactccctcgtcccgcaggtcgaaaacgtcgtcgtccgcgtcgactgcgtcatctccgacgacgactcctcttcctccgccgccgccttcgacaagtcccgcggccccttctggaacctcctccgcctcgtcttcggcggaatcgtgaaacccatccaaaccctcggtcagttcctcggccccaaacgcccctcctcctcctccgtcacgtccccttcctccaccacctcctcctccaccctcgccgtcggaaccgacgacgactccgacgccggcgtcacccaccactccccgacgcaagtcctcaaaaacttcaacgagattcgcctcctccggatcgagctccccagcggcgagctaggcatcgaagacggcgtgctcctcaaatggcgcgccgatttcggatcaactctcgacaattgcgtcatcctcggcgccacctacggcttccaccccaaagacaaccgaaccgaccccatccccaccaccaattgcaacggactcgacgacagcggaagcatccctgattccttctacaccaacggcggtctcaaactgcgcgttgtgtggaccatcagttccctcatcgctgccttcgacaggcattacttgctccaacccattatctacgagcacgccaccctcgacaacttggtgctcaccgacgccgatggccagggggtactttacatgaacagggagcaactcgaggagctgagggtgaagccgctctcggcctcgtcggcgtcgaagaggactctcgttccggcgcttaacatgaggctgtggtacgcgccgcacttggaattaccaactggggttgtgttgaagggtgccactcttgttgctattaggcccagcgagctatcccccaatactgcgaagaaggaggcgtcggatttgtcgtgggtttcgacggcgtttgaggagccgtataggacggctgctacaatgcttgtcaagaggaggacttattgccttgagatgaactcattctgatgcgtttgtgagggaatgcagaatcatttgaaaagggagaaaatgttaagttcttcatagaagggaatcacaaaactcaaattttcttgggcggacatgaagtggaagcagcttggtcgctggaatcttgctctttccagcttctgaaactatggcccacatttgagtagttactaaaggagctgcaaatcattcaccaatcatgcttgaactgagaactgaatgcatctgctggtttttttaatttgaggcaatgcttgtaagagtgcacccctgcaactaggaatgatcatgtaagagctttaagtttgtagtcatctgtccctatcagatctctctgtgaatattctaggtatcagtttggtttgcctttatgatatatttttctcaagttaaatgagcaatgtactttgcttctgtaattttaaataacttctggatgagtcaatcatgccaaatgcaatacttgttcctgcacttttagaaaa

SEQ ID NO: 127652 - DNA, 309 bp, Glycine max
  unsure (1)..(309): unsure at all n locations
  Clone ID: PAT_MRT3847_86274C.1
ggcggataagccatcggcaatgcaacgtgatgaagantgctcatgggatgaacggaactcagcattaaggggttctcctttctcgcaaagagagtttagaggacaccatggtagccctgaattgcattattctgataaatccaagctgagtgatanaaatccagaacccagtgaggntctttggattgggttcccagctcagttgaaggtggacgaatctatttnaagaaaggcttttnctccatcggtgagatagtgangattacnncatttccaggtcgtagttatgacatgnncgctttaggagcc

SEQ ID NO: 127653 - DNA, 626 bp, Glycine max
  Clone ID: PAT_MRT3847_86275C.1
ttcgtccgggtccggataatacgcttcgtcctctttctgtttgttcttcttccttattttcttccctagtcaaggagattcatctctgcaggttgttttagaaaagaaaaaatggtgaagatttgctgcattggtgctggatatgtggggggtccaacaatggcagtcattgctctgaagtgcccctccattgaagtggctgttgttgacatctccaaatcccggattgcagcatggaacagtgaccagcttcctatctatgagccaggccttgatggtgtggtgaagcaatgtcgtggcaagaaccttttcttcagcactgatgttgagaaacatgtctatgaggcagacatagtgtttgtctctgtcaacaccccgacaaaaactcgcggtcttggagccggtaaggccgcggatttaacgtactgggagagtgcagcacgcatgattgctgatgtatccaagagtgacaagattgtggtggagaaatccactgtccctgtgaaaactgctgaggccatagagaaaattttgactcacaatggcaagggaatcaagttccaaatcctttcaaaccctgaattccttgctgagggaactgcaatccaagatcttttcaatccgga

SEQ ID NO: 127654 - DNA, 429 bp, Glycine max
  Clone ID: PAT_MRT3847_86276C.1
gcagtattcatgtctaggttcttcaccagttcacctgcatggcaatctcaaattggaaaataaaaatggagtgccgttttttgagttcaaggtgaagtgccccaaatatgtgtttgtggccaatacatggagaacaggtaatgctttcaactgggtgtatacctttcactcaattgataatagaaagaatagcaatgtcaatgggttgggatcccatgattttgataaagatccctcaatagtagcacagatgctagtttcctgtaatttatgttctgaactagaagacaaagaatttgacaactctatggtgacagaatttgtgttgtctgattttacacaatcaaggcagagtgtttcgtgcgaaaaaaagtctttgagtgaactagatggttccaaaactccgaaagctttccatgttggatcgaa

SEQ ID NO: 127655 - DNA, 113 bp, Glycine max
  Clone ID: PAT_MRT3847_86277C.1
ggctcgagcatatacacaattctttggctttttcctaccacatcatagctttctgccggaatagggactcttattttagatatgacactatgccaattcaagtcttccttcat

SEQ ID NO: 127656 - DNA, 540 bp, Glycine max
  Clone ID: PAT_MRT3847_86278C.1
caacaaatggattccccccactttccttcatttgcatctctcagagttcttctgtttggtttctgcgttataactttgtttcctgagtttgtagtgagcataacaaggcactacacatttaatgtggagtacctgaacgtcactagattgtgccacacaaggaacattctgagtgtgaatgggaaattcccaggacctcgcttggtggcaagggaaggtgatagggttgtggttaaggtggttaaccatgtctcaaacaatgtatccattcattggcatggcatccgtcagataacaactgggtgggctgatggaccagcatatgtgacacagtgccccatacaaaccaaccagtcatacacatacaacttcacccattcatggcagtgtaagtctcaattttggcacgctcacatactctctcttagacaatgttacatgtaatattctaggaataaataatttatgcaccttttatatcttcatttcataaaaaattgtaatttacattaaaattattaatttttataatagcaatct

SEQ ID NO: 127657 - DNA, 470 bp, Glycine max
  Clone ID: PAT_MRT3847_86279C.1
aattcggctcgagacggctgcgagaagacgacagaaggggtcattgttgtacattggattgtgggttcaattttatttgggaaaaataaactaaaatcggtttgatctgggttccatgttaataaatgaaaagccaaataaatttagtaaattgttgagagtcgttgacaagttggaccataaaatggcttttataatattttgaagtttcaaggatttattttgcaacttggagcatacttaaataattaaaaataagtacatgctttgccttgtctcaaaatgaaatattgaggtttttatatttggaattttgttggcaaagtggattataagaatgattgtacatttagcttaaatttgttttcatttgttaaaagtatgcattttaatatgtttgatcgagatttcacagttgttagtgcacatgtatgcttgaaataacatagagttcacttgataaataagga

SEQ ID NO: 127658 - DNA, 1267 bp, Glycine max
  Clone ID: PAT_MRT3847_8627C.1
ccacgcgtccgctcaaaagagctggcaacattgcttaaagcagagaagatttcatgtggtaaatctgaagtggatttcattgtctctttttttttatggtaaacccgatttgatatggtagttttggacgcttatcgaagccaatgggtatggaaaatctaccatcttgaagaagataagaaagcttttgaaacaacgcaacattgcttgaagcaaagaagatttcgtgtggtaaatctgaagtggatttcattgtgtcttatttttttatgaaagctggctaaacgcttagcgatgtaatacagttcatcgctcagttcacatgggagtgccatgtaacttcacgacaatgtcaatgaacaaggaggccaccatgtcagattacaagggagcataggctatttccagaaagctggctaaacgcttctacggtccatttcaaatcattgaccaagtcggcccaattgcatatcgattgcaactcccgaaaagtgctcgtatatatacaccctgtatttcactactcaatgctcaaacagtttcacggcacccccgatagcgccaacatcgcttaattgccagaccacttcatcaatgatcagcctttaatcactcctttagttattttggattgtcatcgttcatctcctaacaaggatgctccatgggaagtgctagtccaatggtggggaatgtcccccacgacacctcatgggaagactaggaccagctgcgacaggatcatcaccttgagaacaagatgattcttcaagggccgaaggaagatgatagcacagcagaaccaataccagaaagagaaataggaatcacaacagcaaacacgggtacaaatggcaaagagtaagagcagtattaccagaccttcgtacctcaaggattatgtctgatatgcaatgcaaaagctgagtggcagtgaaggatttgctggattgtgttgtctccagctagggaacattcccaaccaattcttttaaagaaatattcctagagaatcaggataattccgttagtagtaggcattatatatacatatgtaaataaccagcaaatcaataagaacaatactatccttttcaatctttgcttctctactttcttgcctctcctttccttatctggaggtcctggccctcaaaggcagtccctgagcatagcagttgtatcacattgttacaggagttttttgctccataataactatgtcaagactgaagctaatttaaagatgaattgggttgctaatggc

SEQ ID NO: 127659 - DNA, 493 bp, Glycine max
  Clone ID: PAT_MRT3847_86280C.1
ttatctatactttttacttttttttagaaaagggacggatttcctttgtttaataacggaattggatggtccacactcatgacacctgaagattttgaatgtcaatttgtagcggtctaagtttttcctcaacattggatttttcgtatgtggatgtctaccagcctgttaagtgtattctgcgcttaattttggtaaggggtgcttaggactttcacaaaggtgtccaaattttttatgggttcaatcaaatccttcttcatggccttttaagggtcatatgccatggtctttgctttggttttcaccttatatatcaccttttgcctacgagctggaaaagttgttttagatggattccccccagctgaccaattaccaagagcccaaagatcttccaagggggtttgcagtacacatgttagtggcgaaacatataaaccagccccacctaggtgtccagaagtccctaaaatcatttcccgcacttctt

SEQ ID NO: 127660 - DNA, 137 bp, Glycine max
  Clone ID: PAT_MRT3847_86281C.1
aatctctacatcatatcactcaatatgatcaacctaaaacttaaccccttgccttcacctttcgttgatgacaaatttatttccaccctcaataaagtaaaacctcatctccttaaaaagatgctctcccccatcat

SEQ ID NO: 127661 - DNA, 281 bp, Glycine max
  Clone ID: PAT_MRT3847_86282C.1
tcgcgatctagaacgctggtgttatcatttattaggacaccaaaacgaaggctcatttcacacttcgatccgaggccataagcatctgccaacaccaggatgtgacatgacggaaccgaatatcgaatcaccaccagcatgggatgccatgcatccgagctagacatcaccgccacctagcacaatggccaattatcagcctggaaccagaactatgccaatgcggacagagccagcctcctggaggaccaccaaggctagcacgcagggttcgtataccc

SEQ ID NO: 127662 - DNA, 275 bp, Glycine max
  Clone ID: PAT_MRT3847_86283C.1
atgcagcgaatcggctcagacggctgcgagaagacgacagaagggggacgcacattcaatttgtctgattcaagggcccaagagagagagagagagagaatggaaacaagcttcctcactcattcagctgatacactacactccacttaacacctcctttatcaacggtcattccacagggacgtttcggtagattcctctcgctccttcgttccacggtcgctttcaactgtttcacactgaactctcttgttcgttttcacaccattttgctt

SEQ ID NO: 127663 - DNA, 273 bp, Glycine max
  Clone ID: PAT_MRT3847_86284C.1
gaagctagtagttcatcttgaatttctatgtacaaagtggtccaatcccgtcattcataagaattcaagagaagctaatagttcatcttcaactacgattggatatcttgactggaacagtggtttagtggtttctacagacgaaaatcaatcccaagggaaaatctggaagcttcatggaattgccaattattgtaatccaaggtcctccttggatgcatctagagggaacacctgcttgtgctggatatataccggttccagttattttct

SEQ ID NO: 127664 - DNA, 412 bp, Glycine max
  Clone ID: PAT_MRT3847_86285C.1
cccacaaattcacaattttatatttccccatcataaaaaaacccataaggggttcacgactattcaaactatgaaacataatctggggggcggggggaaaaaaaaaaacctcatttggtttaaaaaaaaaaatcaatctttcaacaagttataaagggccttttcaaaaaaaaaaacaaacaagttctaagggcacaatggctagggaaaaataaggaataaccgggttaacgaaggaaaatagggaacgggaccctagtccccaccccaaatcaaagatttaactatcacactacaatacatggctggcttaccaatatgaagcagcgaacaacttacaataattaataggattctcattttaaaagattttaattggatttttcgttaatggaaagttaatatcacaaat

SEQ ID NO: 127665 - DNA, 358 bp, Glycine max
  unsure (1)..(358): unsure at all n locations
  Clone ID: PAT_MRT3847_86286C.1
atntantaaaaaaccaaaaaaaaaaagcctccctttacttttaagggaagccatccctccgaatggggctgtgtctaaaaactctctttttaaaaaaccctccccttacaaagcttgtttaaaccccccccctttttttgcccctctttcctttggggtcccccttttttttttaaacaaattttttgggcccccccccagggccaatcgtgtattccccttatttgggttccccccagactcttttttctccaccaaaaactttttttatattcaatatatagggtggttactctcccttaggttcccctttcatccctcccccccccctgtttgtcgccgtgctcctttcttttta

SEQ ID NO: 127666 - DNA, 411 bp, Glycine max
  Clone ID: PAT_MRT3847_86287C.1
tgctggcgctagcgaccggtcacggaacagggtcgaggagcgaccctgctcggtaggccgcccttcgtccttttttttcttttttttgtttttttttttttttttttttttttttttttttggtattttttttttatttttttttttaaaattttttaaagttaaaacaaacaaccaaacaaataacacacaaaccaaaaacaaaaattgataagaaaacaaacggaaaaagctacaccgaaacaaaaagacaaaaaaagagataaaagaactgggccaaggcaaagaacaactcacaaaacgtcaaaaaagggcggacccgctaggggagctgaggcacgacgcgagggggggccggggggcccggaggacacgggggggatcccaggactggaccggatacctggggaa

SEQ ID NO: 127667 - DNA, 805 bp, Glycine max
  unsure (1)..(805): unsure at all n locations
  Clone ID: PAT_MRT3847_86288C.1
tcctgtagagcggccgcgagagccccaanttttttatctttctttttactttannnaaaccccttattaacccggttgttaaaaaagaaacatatcctacacacccctattacatacacaattagtaatattttgcttatgtactcaagataactgtaattataccaaccccagcttcaacaggcctattacatcattaaagagtctccttatctttttaactgtttaaagctttaacgtaattatgcaacgcttatacagattaatatacttaaaaatacaagcttattttattacaaacccggaaacagtttctacaaattgattttctccctttgtagtactcaaagtttaatttttcttagcaatgaagttaaaattataacctttataataatttatttttaaaaaaaagtatttctttataatactcttnattattttttttaaattttaaataccatctctctccttttttttgtatatacccccatacttgttaattanttatttttttttataaagtttatctttaatcatttacatttattctttctttcagtgaattttattcatatatttaattaatggatttttattaattttattttttntttttaaatagttatttattataattaattgtggtttttattttttcgttaattatttttgtttctctcattaaagtgaaaaatattatatttaatatttgttttttatcattgtatttttttttttaatataaaatacatatttttccttcttttatatcttatgtttatgtaagttaactatttttttc

SEQ ID NO: 127668 - DNA, 167 bp, Glycine max
  Clone ID: PAT_MRT3847_86289C.1
gggaaaaaaattagcagggattccgttcaatcatgtcatgaaaaaaggaaagggtgtttgacccccaaaatacaatccccataatgtttttagctttgcccccggggaaagatttttgtttccgggccggggccggtttgcaaaaaaatgaaagctggtttcccaag

SEQ ID NO: 127669 - DNA, 178 bp, Glycine max
  Clone ID: PAT_MRT3847_8628C.1
tgaacatcatgctcgtcttgctcttgcaggaaatgagtccttgtcttattctcgttgggtgagaactgttagtataccatcacggcactatcctactcctgcgagcaccgtgcatgatacttatcttccgcgacatgaggtttctggacacttgtagtcatctgactttctgtacttc

SEQ ID NO: 127670 - DNA, 253 bp, Glycine max
  Clone ID: PAT_MRT3847_86290C.1
gtcacagcgatcgacggcgcacatcagccgcagcaactttaaagcggcggctccagcaaccgccacttgcgtaccggaaccttacatttgggcctacgtctgagcgcacgagttcgtaagggctttggactcagtctctgcggcggtcaggccggcgtgaacgatcaacttcctacagtcctacgatcctttcggtgcagcctccgctgaggactcgggcgccgggtcagatgtgtacgtgcacagtcgcgtt

SEQ ID NO: 127671 - DNA, 506 bp, Glycine max
  unsure (1)..(506): unsure at all n locations
  Clone ID: PAT_MRT3847_86291C.1
agtagtgcctcacagcatattatgctcatctagcagcctacagggctcgattctacatggaacctgatgttgctgagattacaaaactgcgaggaacaagattgaaagaagggcctgttcggccactgcctgctctgaaagagaaggtgaagaatgttatgttttactgttgaatagagcagggtgaagaatgttatgttttacagttgaattaggcacaataaaaggcttcaaagtagagaaacagcagcatatatatagtagacagaaactaattagaggtgaaaaaattatccatgttcatattgtaagaaaattctgcatggaatttttttagtgtaactttaaagtcatagttctctctgcgtagtgccgttttaagttaaggtaaatatccaatgttgatattggttggttgccttggacaatttcattcaaatttgtgtcaatgttccaagcatgtgtatctcattcacaaaannnnnnnnnnnnnnnnnnnnnnnaaa

SEQ ID NO: 127672 - DNA, 148 bp, Glycine max
  unsure (1)..(148): unsure at all n locations
  Clone ID: PAT_MRT3847_86292C.1
gccggngaagccctccgnatttcttcaatcttcgtttccggggaaaccaaaggaggagttacctaagaagttgggccatcctaaagggttaacanaanattngttggtttgngggcggtgngttgaaaacggcggctttcaatttatt

SEQ ID NO: 127673 - DNA, 254 bp, Glycine max
  Clone ID: PAT_MRT3847_86293C.1
aatgaatgaatgaaaattaacaaataataacattccaaataaacattagaaataatgaataatagtatattgttatctgagttgttgtttgtacatttttaatcacaaaagtatcgttaattattttgttattaagttatatctgttgggagaccaaagtgttattacataacaacacattagcatgaaatcagaaagagaaacttcttctcaaaatagtcgtttaagtttaaaaatagaaaaatcaacatttt

SEQ ID NO: 127674 - DNA, 894 bp, Glycine max
  Clone ID: PAT_MRT3847_86294C.1
gggtcacaatttcaaaattcataaaaatcagttcatgagtatctctctacatgcacataaatttcaacggcagattatatgaataaatacaatacactggaaggatttattgtcagcaatataaatgaaatttctaatttccatcaaccattcaatacacttcaacactagccattctagccaacattctgtgtatgtcaggatttggttgtctggtgatatgaatttattgaaacacagaacgacagattgctacattactgagctatgtagttatttgcgttcatctgaattctgaagggtaacttttaggtaggatataagagagaaagaggtgtttaaattacaagatctcattatctcaataaattacattttacatgtaactcaaggaatagcatctcaaaaattagtagtagtgtctgccgcaaacaaaagttcacatatggtaatacaactacaattgagacgttcccccatccctcaagtatgtctcaaaccatcattgaatgttaccactgaacgtcgggtgtttcaatatcagtcaaaccatgataaagttcatatcttcttgttcacttttccactctgttagccatactgttcaactgtttttccaactgaacatttttcatcttttgtctttgcaattcctcaacaaggcttccaatgctctgttggagttgaatcacctgaaaatgcagctctcgctccctagttgttgcaggtggtgcctgcaacatatcacctgtccctgcctctactgattctgtattcttgccagaagattgttcggcatactttattaatttaataatctcttccctctgcaaaccattatgttgcaagatgcactgcagtgatggaagaatagcggtagacatgaaattttga

SEQ ID NO: 127675 - DNA, 517 bp, Glycine max
  Clone ID: PAT_MRT3847_86295C.1
ttaaagaaaatcatgtaccatttgatccaatcacccgttgatcaaataagatatttagtttccatgttcgtggaatgatacaatttacagactctgacagtcactaacaaatcaatgagtgtttagcacgatattaaagcataattgcaagaggaatacagaatagtaataaacaaaaagatgtaaaaaaatactgaattaatactattaaagtgaacaacacagatataacatgcatcgtgccatgtgtgtacgtgtaacagcgaagcaatagtagcattgtcatctagactgccataggatttgttcatcaatcttgctcatcttctcatcatcaaggcgtttccaagtcatgattctctgcacgttcatccaggacttttttcccttctgaagttcagcaagtataatccttgctcttcttggccaccctgctttcccatagccatggtatccgaagccaccaccataacaaaaccatatgccatccaagtttccacaaaagtcattggtgtgc

SEQ ID NO: 127676 - DNA, 465 bp, Glycine max
  Clone ID: PAT_MRT3847_86296C.1
ccatgccgcgtacttcgctcggatggctgcgagaagacgacagaaggggacgggatttttgtgataataggatatcctttggtttccacgacatcctcaaacacccgaaatttgacattctcatggtcatggatagtgaagtgttagtaaattcccaagttccaagaccctacctcgctttctgcttctgaatatcaaaagtgcacacaacataatccacacccttttcacctaaaccctctaattaccctgttgctgcatccaaaccatgtctaccatcatcctcagagtagcagggacgtatgatgcactgcttaagccaagctttcgtacccccacttggacgaagcttcatagttcccatctggaagtgaaaggccactcttatctgcctgagagtggaggaagctgtgcaattcgaagcatgttgcggggtccagttgctgttttagaacttcccttaag

SEQ ID NO: 127677 - DNA, 257 bp, Glycine max
  unsure (1)..(257): unsure at all n locations
  Clone ID: PAT_MRT3847_86297C.1
cagggctnacncttgaagctgatcaagctagggaacgacaganaagagaagaagaagaacatcttgcatgggaagctgctgaagccgagagaaagcacaaggaagangaggcggctcgtgaaagancagcacaagaagctgcagagaaacaagntgcnttggctaaaatacgttcaagagaaagcccantntcttggtgaagaacctgaaaaaggacctantgttacacaggttttggtacggtttccaactggtga

SEQ ID NO: 127678 - DNA, 198 bp, Glycine max
  Clone ID: PAT_MRT3847_86298C.1
aaagcagagactcacattgaagacgactctactcagccgagaccatgaatattcccgactgcgtgagcaccatggctcacgctaagtgatctatgttgacgcccctcatctaaaactcaagcgagactaacaccatctgtacttgtacttccaactgatgcaccgacgatggccgtaaagggaagctcacgattgatg

SEQ ID NO: 127679 - DNA, 368 bp, Glycine max
  Clone ID: PAT_MRT3847_86299C.1
gggctcgagacacaacaacactctctcttctcgctcttggcatgacgctcttcactcactctcattcattcatttccaccgttcatggatccagtaagcgtgaggcgtaacacgcccttggcgacggcggaacccgagacccatgacctaatcctgaaggagaaagcgcacgcgatgccgcggaatcgagctcatcgtctacgagaacttcaccaccttcgtcgttatcgagggcctcggcagcgctatcacgaacaaatactccgagggcatgccgggcgaccgctactacggtggtggaggccacattgaccggatggaaaacctttgccgataacgcgccctccgagcgtttcacctcgacaccc

SEQ ID NO: 127680 - DNA, 392 bp, Glycine max
  Clone ID: PAT_MRT3847_8629C.1
aagcttttcatgaaaaatagaattatgtattttaacatataaatcaatcaaatcaaaataattttttttgttaatttattatgcaaataaaagatatttctatttttaaaaaaattttaaattcttttctattgatatcaacttttttttactcaatttacatatcaacttatttaattattgatatatatagttaccccaaattaaattatcttcgaagatacattcttttgtcattttttgtttccttgatcgccttctattatccaactctctttgaatcataaactagagaggataaaatacaaacacttctttacaattaattgttatttttcgtttgttgtagttgctttttttttttatatttaaaataaatttgcaacaccgac

SEQ ID NO: 127681 - DNA, 423 bp, Glycine max
  Clone ID: PAT_MRT3847_862C.1
ggcccaaaaggaaggggccctaagtacaactttattcaacttcagctgatttgagggtaataatgcgcttcatttgaaaaatatgaacaccttccctaatgaccgatgcctaagtctggaacttacccttgaaagaccattcgaatttaaaagaacaaaagccctacatttatccgagtggggggtgggaaaaagaatttgaagaaatcccaaaggcctaagcctgaagaaattttaaaaggggggataatccactggattgcgtttttcccaaagtcttgaaacccaaattggttaacacaccggcttgggggaaattaaccatgccgtgaaaagctcaaaaatttcagctcccttatctttctttttaagccggggcatctctcaacagaaacggggacactttacccttaaaagggaaac

SEQ ID NO: 127682 - DNA, 447 bp, Glycine max
  Clone ID: PAT_MRT3847_86300C.1
tcaataggtcctggacgaagaattcagtgtcagattggaacaaagccggagatactatcaaacatatgtgaatgactatgcttttgtgtcctacatcatccatacagaataaagtgcaactttcttcttaataatgtgattgagaaaatattgctattgatacggagagcagaaagatacttagttgttggtgctgtccggttcattcgaactattctctctcgccatgatgaacatctgataaattattttgttaggaataatgttctgaagccaattattgatgcatttgtttctaatggcaatcgctacaatctgctccattctgctgttctggaactttttgagtttattcagaaggagaatctgaaattattgctgaaatacatagtcggttctttttgggaccagctgatgaaatttgagtatttggcttcaattcactca

SEQ ID NO: 127683 - DNA, 264 bp, Glycine max
  Clone ID: PAT_MRT3847_86301C.1
ctcaccttctttctttcttccttctcatcacaaagacacaagctttcttcctcaactatcctacccaacttcttattccactcatcacttcctttcaaattgaaaccaccaaaattgtttttttttagctcctttacccgtgtaatattttgaaaagtgttgtaccttgggttgataattgtggtagggcctaatgggtacgtgcctatcttcttgtgcctaggttgatgcacctctgatactcgaatccattgctgcatcagg

SEQ ID NO: 127684 - DNA, 1281 bp, Glycine max
  unsure (1)..(1281): unsure at all n locations
  Clone ID: PAT_MRT3847_86302C.1
aaaatcctttcttcaatttatcaactggtgttctctcaattttttcttgctttgcttttgaagtcaacatactaagttttgtttgtgcagggataaattttgaatgttgagttgtattttataatatatctgctgaattgttggaaaaacttgtcagttaaagtttcacgtaagatgaaagtctatttctatgttcgtataataggtattactgaacttgttttattgactgctttagttttatctgacagagggacactattattgacatattctttgagaggcatttggggcaattgattgaggttataacagcatcttgtccttcagaaaatactgctgatgcaaatggcaaatcaataggtcctggacgaagaattcagtgtcagagtggaacaaagccggagatactatcaaacatatgtgaattattatgcttttgtgtcctacatcatccatacagaataaagtatttccttgttgctctgcagtatcggttgactttttgctgttaagcatggaaattatgttcatggntctctttgctgtttttaggtgcaactttcttcttaataatgtgattgaaaaaatattgctattgacacggagagcagaaagatacttggttgttggtgctgtccggttcgttcgaactattctctctcgccatgatgagcatctgataaattattttgttaggaataatgttctgaagccaattattgatgtctttgtttctaatggcaatcgctacaatctgctccattctgctgttctggaactttttgagtttattcggaaggaaaatctgaaattattgctgagatacatagtcgattctttttgggaccagctggtgaaatttgagaatttggcttcaattcactcactgaaagttaaatatgagcagtgtttggataatggtgggacaaatgatgatgccactgctgcagtggaccttcgaagaagaaatgatgagcgtgctctggagagagaagaagaacggtactttaatgaggacagtgatgaggaggatagtgcttctgcatctgttccacgcaatcagaaaggacaccagcaacctaatctatccaatggagttgctgcaagctattcacagttaagtccaaggtcactggttgactatgaggatgatgaggatgatgaagattataagccacccccaagggagcagccagaaacttctgaggaagatgatgggataatggagtctctcaggctgaagaggaaattaccttccaaagataaagagcctgaact

SEQ ID NO: 127685 - DNA, 535 bp, Glycine max
  Clone ID: PAT_MRT3847_86303C.1
ttggattctcgtataataagaggagccttcttaggaaatgactgaacttaaaagacagatgccaccgctgcgagggagtaacttgtctgatcttgcggtgcactcactcccgttacgagaatgaaatgacgccccagctcgactcgagaccaagactccttacaactcgcaccaatagcggcactgagcggccggagattgattgaaaaggcagccgcccctccccccgcctacctactcgtgctcgtagctcgatcggaggttaagagtgtggtccggcggaaaaaaagaagtcgtccgtatcaagtgatacgttaattgctccgtagtgcttcgccactaccgttgctggcggaaatagcttaatggtagagcatagccttgccaaggctgaggttgagggttcaagtccctccttccgctcttggcttcgtcgtttagtggtaacgagtagagtaggcatcgcctctcgatccaatccgtctttccctggcctccccaccacactcttgatacgaaagaaacctcccgcaga

SEQ ID NO: 127686 - DNA, 403 bp, Glycine max
  unsure (1)..(403): unsure at all n locations
  Clone ID: PAT_MRT3847_86304C.1
accaaacggcnncggcgcaagaagccgaggcncnccaacaggcgnncaaagganggggggcngacgacaaggccanaanagcaanaccgggccacagaaangnacaacagaggcaagaaaacagaaaagcggaggaggagagaaaccaagaggancacaacaaacgccnngaggccgagagcccaggngacanagagagagcnangaaccggnggagggggcagccngcggaccgggaggcnnggnaggcgaaggaggcaaggaagaanggcaccaaagaccaccaggcgagcgcagagaaagnnngagggcaaacagcggaagagcccaaggaagggaggcggccccaccaccgccgaaacaagagaaccacggaggaagaggggcgagccaacaccaccgg

SEQ ID NO: 127687 - DNA, 354 bp, Glycine max
  Clone ID: PAT_MRT3847_86305C.1
ggctgtctggatcaaccgtggtgacaggttgccggtcgttactactgataccaatcgtgaaaatgccttgtgtacaataattgttgaacttctcactggctgtaggcgcactatggctgaaaggtaagaaaatccctctgtgcgctgggcaccaaccatgagtataacgttctagttcactctcaccacatccgctggacactttgctaatggaaataagattgcgaggcagatagaaactgtagctggtgctgtttgaggtctgtcattaagttacagttcaagctcatggaatgtaggagtagtgctaccagtctcctgtctgatataggactatttgggaaggctgtttta

SEQ ID NO: 127688 - DNA, 384 bp, Glycine max
  unsure (1)..(384): unsure at all n locations
  Clone ID: PAT_MRT3847_86306C.1
agattgtcaattgtttcatcatccattattttttccgatttgcttatgatgttgttgttttctgttgagatcttctcacttcaaagttgaaacctttctgtgcgcaacaattagaatccctcagcccctcgtctaacgcatactctgttatctaaatttgcattcttttacccaacaaaaccaacccaaaaattataacaaaacataacctctcagaaaaccaccttaaaccggaaaaaaccactatttccccacaattttcgccggaaacccgctattgtgccttgtccctccatacccacgtcaccgaaaccggttttccgatacccaaaagcctcttttctggccccaagtcatttttaatccgtcnttgacgggtttttt

SEQ ID NO: 127689 - DNA, 300 bp, Glycine max
  Clone ID: PAT_MRT3847_86307C.1
ttagttctgggtgggtaaaacaaaaaaagaaaatgccacccttcgttgttacaccctcttcttcttcttcttccgtgctcaccccgaaactgtgcaatcctcaagtgaaacgattcgttttgcagttcgcgtatccaaagcgttcgcgcacatttctagaaccttcttcttcttcttctttctctcctatgaggaaaactaaggaggaggtggttgaagaacggctttacagagaagaatatgttcaccctcgaaacgataaccctttgggggacgaaaaagaacgagacaagaggcttg

SEQ ID NO: 127690 - DNA, 722 bp, Glycine max
  unsure (1)..(722): unsure at all n locations
  Clone ID: PAT_MRT3847_86308C.1
cacgcgtccgagaacacgtaaaaaaccaccaatccttaatagataattgcacaacatgactgataacaacacctcagcctaaagtttgaccaactagagaaagcaaagcaaattgcacaaaattcagccccaaagatacaaagggtagcacatcatctgcgagatcgaaaacattttgccaagcattacttacccaggttggtgtcaattggtccaatccatcatggtgcagagaaactgcagctgggagaaaaatacaaggttatgtgggcagcaatgtacctcgaacgcaccaaacaagatgcacaaactctgtaccaaaagattgcatcaaatattgaacaactgaaggaactgttttctgaggatgttgttagagacttccctgatgatgaaaagctctcgtggtcgtggatgctatttgtggttggatgttctctgctacaaatcttggagaagggaaaacttcattatccaaaagaaatgaatgtaaagggttgatcaactggctcttgtgtggcaggatgtgctcttgttagagaaccagcttccctatcaagtgcttaaactgttgtcagaccacgggaatgatgcaaagctagtaaagagcatgaaatgagtttctttaagtgccatcatttgtcaccagttagacaggagcanaaagctaagaaacaggacatggggcatttntaaagccaggatgaagatagagcattgct

SEQ ID NO: 127691 - DNA, 239 bp, Glycine max
  Clone ID: PAT_MRT3847_86309C.1
ctcttgtcttatgattatccttgcaacacacattgtcttatcggcaaaatcttccactaacaatacataatcatggcatgctcaaacattcttactctctctcctttccttcccaaaacctacagccactccttaaaccaaaacgcgttattccaaaagctttatttctgaacctcaaattccaagccaccactaaaccacgtgctctcagagcgattctctcgcagacatgctgtcaa

SEQ ID NO: 127692 - DNA, 399 bp, Glycine max
  Clone ID: PAT_MRT3847_8630C.1
acggctatgcttctcatagatcatcctaactcaattttcgtagtcgtacctcattcggatgaaggggaagatgacaacgatgcgtaaaactccgtatgtgacttagatgaataggacgctgacgaacatctagaggatccgccaccataaaccctaaaggatcaacatgatcctctgaccctgtcggctgctatccactctctagtgaactgtgataatcaacagtacaaccaagaatatgatgacgttgatctcactctctaggaacatcccgtagtgcagcttatagaaccgttcacttatgagcatcttgactctctcgataaacatgcactggatatgtatcctgaattcgtatattgcatgcgccaacttgctgacatgtaccctgctcacagg

SEQ ID NO: 127693 - DNA, 444 bp, Glycine max
  Clone ID: PAT_MRT3847_86310C.1
agggggggaaatcatgtcattaaatacccccctcttctcaaaaaagggcaaagaatcttggaacaagaaaaccaccgggcccacacgactcccttcatagggccagtaagcattccaaccaaggggttttacaatccccagttttttaaccctcgaaatgctgctgcgactgttattgcccaaggaaacaagagtccgtaccgccaacaccgggctcccaatcctaaactgaatcgtgatgcaaagttgaagtcgtaacccgggaagccatgttttatttcctcctctttccaaaactcgaaaagagactctccgagacctggagaaccatttcccgacaaatcactcaagagcgaaccgcttacaagaaagcaccgacggccccatcgatggcgaagaaaccaacgggggcctttgccgcggcccccgtgaacttaggggtgg

SEQ ID NO: 127694 - DNA, 348 bp, Glycine max
  Clone ID: PAT_MRT3847_86311C.1
gggaacaaacaagccatggggggggggcacattggattccccccctttaaacaaaggcccgaacctgagcatgggggggggaaaaacaacggggggacaaaaccccttggacccctggaacaattttttttgaaacaaaaattacaaagggggtcattttttcaaaaaaaaatttaaaaggggccccaaaaaaggaaagcttcttatggggaaaaaaaaatcttttttcggggggaacaaaaggacccataaaaagacctggaaaaaaggggccatccaccccgaacgaaaaaagggcccacaccaaaaaggttaagccaacaaaacccagggggttggggtaacccc

SEQ ID NO: 127695 - DNA, 395 bp, Glycine max
  Clone ID: PAT_MRT3847_86312C.1
attactacacatccctagctctgtcgatccctctatgacgatggcgtcacgggtgccaagccctgacctccgctctttttactttctctctctatagaccatcgcttccggcaatgtcttctttgaagagcgtgtcgatgaccggacggaaaatctatgggttaactcagatgcggaaaaaggacgagaacgaggctggggagtggaaccacacctctggtcaatggaatggagacgctaatgacagaggtatgtcaaaccagcgaggattacacattctatgctgtttcagctgagtaccccgaattcagcaacaagggtaagacactggtctgtcaatgttatgccaagcactaacagaagcttgactgtggtggttgctacatagaagagct

SEQ ID NO: 127696 - DNA, 481 bp, Glycine max
  Clone ID: PAT_MRT3847_86313C.1
cggctcgagctgcgagaagacgacagaagggtatctgtcgtgttcgatataacttaatttctgccaattttcttgacagactttaataatttgtctgtgttagtccttgaagggaatgggactgctgattttttggccatatctttgttgatttcagcaggggcctgatctcggcagtctctttggatatttgatctttcgaacgcatggccttttcatgtactcatttcctctacacattttgactttaattttttggaatttttttttcttttgcatttttaactttctgcgagtaaatgggatttgttctgctatcttcaccaccatgtcgattgaatttcaatcattgtgtatagtacgtattggttttcttggggattttgcctttgatacgtatatatacatatataatatatagcatgattaggcaaagactggtttgattatgttgtctctgtccattaaatttgatgtttta

SEQ ID NO: 127697 - DNA, 626 bp, Glycine max
  Clone ID: PAT_MRT3847_86314C.1
gggataaggaaatatactcccttaggacaggcaactgctcaacaagtgttgattgacaaaatatctgcaggtcctataactttgattgcgataggagtgcaaacaaatatagctatgtttctcatgaacaatccacacttgaagaacaatgtacaacatatttacataatgggcggtgctgtgaggtcaacagacccaactagttggtgccccaaaaatgcatccttttcttgcattcctgggcagtgtggtgaccgtggcaatgtattcacaaattatgaagcgaacccttatgcagagttcaatatatttggtgacccttttgcagcataccaggtgattcattctggtatacctgttacccttgttcctcttgatgcaacaaacacaatccccatcaatgaagaattctttaatgaatttgaaaaaagtcaagacacatatgaagcacaatattgtttcaagtccttgaaaatggctaaaatggctcgtgataagcttgacaaccaattctatacgagttattttatgtgggactctttcgcatctggtgtagcggtctcaagcatgagaaactccaataaaaaaaaaaaaaagggcgcggacgcgtgggcggaagcgtgtgg

SEQ ID NO: 127698 - DNA, 227 bp, Glycine max
  Clone ID: PAT_MRT3847_86315C.1
accagctgaccttgcattatttcaatttgaatatactccgcgcattattgcgtaatgaaattgagtgttcatccgtctttggactattaagaattaaaaaggcaaaattgtaaaattgattcaccactttatctttaatttcagatttggtccccctataatttaattcacaaatttggtccttcaattttataaatccctgcaaaattggtcttggaagtccaatt

SEQ ID NO: 127699 - DNA, 519 bp, Glycine max
  Clone ID: PAT_MRT3847_86316C.1
ttgtttttgattaaacctttgtaaacatctgataaaagaggcaaatgatcctgaaatttgatgacctatttctttataaagtttccctcaggtaagcacataaaggaactgaagtgcaaatctttcttaagcagaccttttgaacacaagattgtaattactgagaatctaggtataatcctcttctcaaagctgtaggttataacctgaggataatgagcaatatcttctgatggcaaacccatatccttcactaggaaagtcatcttttttgtatatgtctcctctgacaacatcataaaattgggagacttgacaaatgctcgaagagccatttcgtggttccagcccgacctcttataaacctcaaattttgaatcccacaaggttttactagtagttaaaagcaaacggacagcatgcataaaaaccattttcgaaggatcacaacctatttccctggctttgttgacagcttccacaaatttggaatgcttcatatatgcttcacctgtaaaa

SEQ ID NO: 127700 - DNA, 574 bp, Glycine max
  Clone ID: PAT_MRT3847_86317C.1
caaaccttgggaaaaatggaaacgagaagcatttcactattttcgtatggggggaacatcatgttcgaatggcactgcaaagcctaaaagttacacaaactctgctgcatcatttctacattacattacacaaactctgctgcatcaagcgttaatccaaaaagccaaaaactatgattttgcttcttgagtaacgctccctaaatttcaaagctgaataacaagccaacttggcttgggtctttggatttggccacacgcactgctactaaatatcactccattctttcaacaaatatacttaggagaaaacaagaaatcccactaatgatttataattagttaagttaactccatgattagttgcctggggcgattgaggtccttcaagtaacttgagcaagtataatcttcttctaggtcacatgcctctaacatgagagacttttgtgcaactaaagttttctttggttccataattgtctcttcaccctttagtagctgcacaacctgattcatgtatggccgctgggaggatacatggtggacacacctgaaagctgtcaccatggca

SEQ ID NO: 127701 - DNA, 407 bp, Glycine max
  Clone ID: PAT_MRT3847_86318C.1
cttggcttggaacctttgggctgatttatgtgcttggatgtatatattcctaaccattctgctgataacggtcatatacaccgcgccggcgtagacgaactaaccggaagatagccatttacggtcccctcagagtgcgctaaagacgaacccgcggtaaaacacggcggcggaaaggtcgttatcgtcttcgcgaatagttccaataaggaacccgggttaaagccgagggaatacacgtagcatcgcgccgactacttcgaagagacaagtaagtccgtaaaggcgaaagtctaagccctcgaaaccaaaggcgctacgaaggagaacaccgaaaagggctcagataggggcgataagacagaatcctcggcggataagatcgagaattcctacaattaggtata

SEQ ID NO: 127702 - DNA, 480 bp, Glycine max
  Clone ID: PAT_MRT3847_86319C.1
agggagctctgatctacctgagaaatagtaataattgaggccatgtcaaaaatgtctagccccaatggtccagagatagaagagaagagagttacaaaggaagaaaaattcaaatctgctaaaactgaaatgggtgaggtgaaggaagaaaatgagagattgaagatgatgctggaaagagtagaaaaggactatcactcccttcaactccgtttctttgacatccttcacaaagatgtttcaaagaagggtttagctgattcatctacttcccttgatcatgaaactgcagagcctgagcttgtgtcactttgccttggaaggagtccaatggagcctaagaaagaattagcaagaattggatactccaacaaaccaaaagaagaagacgttggacccaaccttactcttggattagactccaaacaccttttgtcaatggaggttgtgtctgatttgagtcccacgaatagcttaaaa

SEQ ID NO: 127703 - DNA, 442 bp, Glycine max
  Clone ID: PAT_MRT3847_8631C.1
gggatcagccaggggccagcatgagccggagggagggaagtctggaagacccccagactgattcctcgtctgcatggtaactccgtctgagtctaccattttcttgctctccctccttccttgggcctgcctcagttccctttggcctccccctttacccagctcttggggtgtctctgttttttccatccccacttcctgccttctcgtggccctgtgtgagcacatgtgtacatctcagccttatctcaaggaggtgactccttctctccttgtccccatctggccgtctctctgtgcttccctggccaggggcgtgcctgctggtcctatggggggaaggctactccgcatctcagccaccttcctcaggctcactccacctacatccccagtctgccacaccccatccctttgggcctcagccctgtccctttgatgt

SEQ ID NO: 127704 - DNA, 409 bp, Glycine max
  Clone ID: PAT_MRT3847_86320C.1
ggccgcccttttttttttttttataatacattatttttacatggttgttatccaactcaggatcggggggaataaattgccggctatgcttgtcttctgctggcccaaaggaattcgttctacgttttacttttacattactacccccctttctttgccccatgttcctatccttaacttatatcgtcataatggtttgcataaaaatcctacttttgaaaataaccatcttgcgtgtatatattgatcacaaagttcaacaatggaaaatttaatcctctaaagtttaaatatttgctcttttctaaaaatcaaacctctcaaagcttttctaaaatgatacattcttacaccccacactggttcgccaacaatccttcattactaactgtcttataaagcttttata

SEQ ID NO: 127705 - DNA, 130 bp, Glycine max
  unsure (1)..(130): unsure at all n locations
  Clone ID: PAT_MRT3847_86321C.1
catgaggaggacgcgtaccaatccagtcttctcaagaagaccatggtgcggaccataccgagtgaggtacttgtgcccagtctatgtcgcgcccccttcctacctctcctcncanctcccagcctactac

SEQ ID NO: 127706 - DNA, 414 bp, Glycine max
  Clone ID: PAT_MRT3847_86322C.1
ggaatcaaagtcaagttaaagggcaaaacctgataaccgcaaaattaaaaattgaaaattaaaatttaaaacagatgttgaaagtaaagtcggtggtatgattcatcattctctttcagtttttggcattgaagaatctgagatcggaaaattcacctctccaacccccaatcccatcgttgcaaatgatccgattcattctgttgcagaacaggcagggcaagacccgtcttgccaaatactacgttcctctcgaggattccgagaagcacaaggtggaatacgaggttcaccgcctcgtcgtaaacagagaccctaaatacacaaatttcgtcgagtttcgtacgcacaagataatatacaggcgatatgctgggttgtttttctcaatctgtgttgatatcactgataatg

SEQ ID NO: 127707 - DNA, 373 bp, Glycine max
  Clone ID: PAT_MRT3847_86323C.1
taattcccggctcgagccgctcctaactacactcatacataccacaacgagacatacgactttcacacatcacacttccgacttaagagcacgtcaattatctactgcctgtgggagcttctttgcattaacagccactaactcaccaatcttaatccttgtttttatcattagatccatacataattacttattgacgaacactttttctacacctcataattccaccttcaaattcttttccatcaatttcaccatagtgattgtctaatctcaataatgggattgtcactatagatatgactatgagtccctgaaatgtatatgcctgttgctacctctgtcattcatcaccataagattgcctacttac

SEQ ID NO: 127708 - DNA, 1030 bp, Glycine max
  unsure (1)..(1030): unsure at all n locations
  Clone ID: PAT_MRT3847_86324C.1
ccttcgcgtccggttggtaggatcatcatctctgtgagttgccattgaagaagaagctcagatcggaaaaattcacctctccaatcccaatcccatcgttgcaaatggttccttcgttcatcattctattccctctttcgctccataattacaataataatctcttcgttccaatatttcttttttccattctaaaattcgttttcctcttttccgcattcgcagatccgattcattctgttgcagaacaggcagggcaagacccgtcttgccaaatactacgttcctctcgaggactccgagaagcacaaggtcgaatacgaggttcatcggctcgtcgtaaacagagaccctaaatacacaaatttcgtcgagtttcgtacgcacaagataatatacaggcgatatgctgggttatttttctcactctgtgttgatatcactgataatgagttggcgtatttagagtgcatccatttgtttgtggaaatattggatcacttcttcagcaatgtctgtgagctcgatttggtttttaacttccacaaggtctatcttatacttgatgaattcattctagcgggtgaactgcaagaaacaagcaagaaggctatcattgagagaatgggggaacttgaaaaactagaatgaaaaattacttttcagcagtcatatcaatttggagatttcgatgacttactcatgcccttggcttaattcttgtatttcaattgtgatacagaattttgaaaatcttttccgttgagccatgtattcaatgccctttaccttcgcttcttattcggcttatgtttatatttgtaagacatttataaaatcagggttttcagtaacctttctgttactgtctctgttttgtttcactttttataaatttatttgctcttcttggttgttagtaaaacacttaatggaaatgtaattggatgattgtagtatataagcaatgcaaaacgattaattttgatggtaaaaaaaaaaaaaaaaaaaaaagtnnnnnnannancag

SEQ ID NO: 127709 - DNA, 292 bp, Glycine max
  Clone ID: PAT_MRT3847_86325C.1
ttaagaatggcactttctcctattcgttcttctactttctcttcatcatcagctattggtacattacctgtgtaattcctcctaacagggactccttaactatcctcccaaaggacttctaatccaagacatgtccaaacgttttcaacacggtgaaatctgtattaaaatctgctgtggccaaagaacctcgcattggagcttctattgttcgcctcttcttccatgactgcgttgttcaaagttgtgatgggtcaatactacatgatgacactccaaacttccacggggg

SEQ ID NO: 127710 - DNA, 457 bp, Glycine max
  Clone ID: PAT_MRT3847_86326C.1
tcgagaaagcaacttagaaccagtgcagtttgtgatagtatagctgccatctgtgtcttataaacactgcaatatggtggttttcgtttcttgcacaaaatcaggcctgcctttgttttctaagggcaatgactggccagcaactaggtttcctattcatcaagaaactgatgatgatgacgacgacgatgacgatgacggtgggattgatatagcaccggcagcataatggattgattgggacgaagtgctgcaaagtatgaagaaacttgagcttgtgttattcatcattctcacgtttgctgcacttgtatggcttatatgacatggggtatttatctatatatatttatttatggtagaatatgtgtaagcttctatagacttgcttacactatacatagtttactgatatttacataaaacatagtatatgtagtactgtttaatgttatgc

SEQ ID NO: 127711 - DNA, 857 bp, Glycine max
  Clone ID: PAT_MRT3847_86327C.1
gctcgaggtttcacccattttgtttgcagcctctcctcacgtaatctcaagcacccaggtccacaaaatggactatttcacggtttcagactagtgggtaagttttcttatatgacaaggtccttcctttttccaattcaaaagacaacctagtctgaacaccgaagccacgccaaaccccctttgttgttgtgggctatctttcattctttcttgatctggcacaagaaaaaatgtatggaaccaaaagcaaaatagaccttgcctttgaataccaatcccaagttgcagttttgaggcccagcatccattccaggagagcaaatctgactgtgaaattccaagacctttatgggttcacagttgaagggaatgtggatgatgtgaatgtgttgaatgaggtaagggagaaagtgaggcaacagggaagggtttggtgggcattggaggccagcaaaggggcaaattggtatttgcaaacaaccatagggcaaggcagtgccctcacatcctcattgaaattctcagcaatggctaatgctataactttgaagaagttgatcaggaaggggatacccccagttcttaggcctaagatttggttttccttgtcaggggcagccaagaaaaagtccaccgtgcctgacagttattatgatgatttgaccaaagcagtggaagggaaggtcacccctgctacccggcagatagatcatgatctacccagaaccttccctggtcacccatggctggacactcctgagggacatgctgctctcaggcgtgttcttgttgcctattcttttcgtgattctgatgttgggtattgtcagggattaaattacgttgcagcattg

SEQ ID NO: 127712 - DNA, 354 bp, Glycine max
  Clone ID: PAT_MRT3847_86328C.1
agcatgcgctgacggaatggatctagatgtgcctgccgatgatgctatggttgacggagcatgatggtgccataaaggatattgacccaaagaactatgctttaagggcgagtgcgctcgatatctgtatgatactatctaagccaggagattcactgtgagcctaatctattggtttgtgtcaatacctgaactatggtttctcatgcgactcctcataacaatgctaaagttcgtggtggtaccttgcaacgtaattggcatgctcaaaagcgattgaaaaaggcccatggtggcactctcgagagagtccatgggaacataaacacgacacactaatgcatagatcattat

SEQ ID NO: 127713 - DNA, 206 bp, Glycine max
  unsure (1)..(206): unsure at all n locations
  Clone ID: PAT_MRT3847_86329C.1
gtaagtttggatgntgtagagggggcgttttttttttttttttgttttttttttttttgaggtaaatgaatgattggttgttggggcggatgggaagaatgattttatttgggaaaagccatttttttttgagcaaggtctttgtcgtttgatggaatggggttttgttggagtggaatagattggggaaattttgatatttttta

SEQ ID NO: 127714 - DNA, 210 bp, Glycine max
  Clone ID: PAT_MRT3847_8632C.1
gggggggggtgttttttttttttttttcagaaggctgtgaaaagacctaggaaacttaaaaaggtctaggaaggacagaaggaggatagaaaagaagagaagtagaggcaaacgacgaggattgagaggacagaggatagaaagacacccaaaggagaggagaggcagatgaagcaatacaccctatagagctatccaatagaagaaaga

SEQ ID NO: 127715 - DNA, 394 bp, Glycine max
  Clone ID: PAT_MRT3847_86330C.1
cccaaacgaacgctcaaagatcatctagaggagcagatcacgaataggctggtacgatgcagaactattaggaagccttattaggtagcgacaaagatctcatcatgccaaattattcacatagaatacatcttttatggggagagaatgattaaatattaaatctggagctcgcgcataatatgatagacctactaggggacggggcagcatttgcagccatacagaaagctggtcacatggtttacataggaacgaccacgtgtcttcagcagacggctcagacacgtaattagactccttcttggcccctagtggacccagatatataatagcccagaggctatattctaaacaggccccctgcttttcataagaggaatagactcgctgc

SEQ ID NO: 127716 - DNA, 427 bp, Glycine max
  Clone ID: PAT_MRT3847_86331C.1
cttattatatttattctctttttatccttaaacattacataaatatatccatgaatgtaattttatattttttaattactgtaacaactaattttatcaaacataaccttttatattcacaagtgctatgcgaattaaggatattaaatacattaaaagttgcccgagtaattaagttgtattttctatattgccctttggctgatgtttaagtggattgattctcctaaatacataaggtgaaaatgtgatattagcaacatttgagtaattaagtcaaatttaagatatttagttaagataaaataacctaatataagttgatcaacatgttttatggtatttaaaaattaccttcagttgatcatgcattcacggtacaaattacaatatacccacaaatcaaaatcatttatagaattaaata

SEQ ID NO: 127717 - DNA, 500 bp, Glycine max
  Clone ID: PAT_MRT3847_86332C.1
gttttgggagaaattcacactctcaagtgcctagaccactttgttgtttcattttctttaacatccagcacctgttatcaccttgatataggtgtgggattttcattaatacagtatacaagttctattatttctgacacctttttttttggaagacaaaattagtaatattattaataaactaaacagtaccaggggtactgaagatagcaattacaaggcactaggtgccaccttccaaaagcagagaatcagctagggttgtcattaattagcttcgttttggtctggttctatctgattctgagataaaatttcagtcctcctggagtatgtactccttccattagggaatattaacattcattttgtgtaaaatttccatcaaagttatcacctttctcctttcccatattatgtaatcctttaaatttcatctctatacattctgacaaaaccagagaatcatttataatatgctttctgatatatggcagagt

SEQ ID NO: 127718 - DNA, 403 bp, Glycine max
  Clone ID: PAT_MRT3847_86333C.1
ttaaatcttcctctgaaggaaaacggaggaaaaaagggattccaaaaattgcccccctttccttaccacccggaagggagttggagccttaacacccttggaggcttaaaacaacttattggttttaacaataaaccgccccttaataaaaagcttttttagttttttttccgaaaggaaaaaaacccgtcccttttcctttgggaatctggtccaccaggaccccaaaattcaagactttttttttttttatcgattcgggaaagggttaatcttgataccgaaaccggggaaaacatcttcggggcccgggatatggggattcttttcaacaaaatatggatccccccccttgttactaattgttgggaaaatttttcccttacgaaccccgtttttttta

SEQ ID NO: 127719 - DNA, 177 bp, Glycine max
  Clone ID: PAT_MRT3847_86334C.1
aatttggtatgcccatttccttaacctcacttcattcatcttttgaaacagggtcatggcttccgaaatgactctcttttcaaatggtggcacatatgaaaccaaaatttctcagatgtccaggagggtgttatgtagaaggacatgatctcggaaaccgatttcaatggaaagata

SEQ ID NO: 127720 - DNA, 295 bp, Glycine max
  unsure (1)..(295): unsure at all n locations
  Clone ID: PAT_MRT3847_86335C.1
gggtgtaccaaaaaagggggaactttatctctctttaagtgatcccaagggaagaagatgctttttttcctgtttttttaagggccacagaggttctttggaaaaaaaaacaaatttcgcccacgagaccaaaaattttcggggagatatggccgggggcaggcccttgcccatttctaaaagagggggggggaaaaaaagaaccccgaggcgctccccaaaaagggaccctatggggggtaagggggcctccacttttgggggtttggggaccgggattncgagggaagccacc

SEQ ID NO: 127721 - DNA, 727 bp, Glycine max
  Clone ID: PAT_MRT3847_86336C.1
tcaattgttgatgccataagatctttagtaactcctactcccgagggtgattggttttcttctggtgtatatagcaatggaaatccttatggaatagctgaaggtattgttttcagtatgccatgccgatcaaagggtgatggtgattatgaacttgtcaaggatgtcatatttgatgactacctccggcagcgaatagctaagacggaagccgagttgttggccgagaagagatgtgtggctcacctaacaggcgagggaattgctgtttgtgatctacctggtgataccatgctcccaggagaaatgtaacaagcctatatctcctgaatgccaaagcagacattgaaataggtcctgcaaacttgtgtcttaaaagatactagttagggaatcaataaataaaatatttttattccctcgaaatttttttcacttttgattccttaactagtgtcttaggatacctgttagcattttattattgaaactagtcttttgcatgtgcgacgtccgggctcatactcctatttgaatattaccaatacatgtgcaaagttcaataacgatgtttatttgtatgataataatgttgagctatgttaagaaaaaagcaacataaagtaagaatataaacaaacctaatgctattgtaaattgttggatggtgttgatgtagcaataaaagagaggctgcacaataaagagagataaatgagttcattag

SEQ ID NO: 127722 - DNA, 972 bp, Glycine max
  unsure (1)..(972): unsure at all n locations
  Clone ID: PAT_MRT3847_86337C.1
gccgaagtcccgcgcgtggccctcggttgcggtcacgacaacgagggacttttcgtgggcgccgcaggtttgttgggcctaggtcgcggcgggttgtcgtttcctacccagaccggaacccggttcaataacaaattctcttactgtttaacagaccgaaccgcttccgctaaaccgtcttccgttgtgttcggcgactcggctgtctctcgaaccgcccggttcactcctttggttaaaaaccctaagcttgatacgttttattatgttgagcttctcgggtttagtgttggcggcgcgccggttcgggggatntcggcttcactttttcggctcgactccaccgggaacgggggtgttataattgactcagggacttccgtcacgcgcctcacgcgccctggttatgtggcgttaagagacgcgtttcgggtcggggcttcacatttgaagcgcgcgtctgagttttcgctttttgacacgtgctatgatctttcggggctgtcggaggttaaggttccgaccgtggtactgcattttcggggtgctgacgtgtcactgccggcgtcgaattatctcattccggtggataatgacgggactttttgttttgcgtttgccggaacgatgagtgggttgtctattgttgggaacattcaccagcaagggtttcgggttgtgttcgatttggcgggttctcgggtcgggtttgccccgagagggtgcgcgtgatgggaaccaaacaagtctttcacctttttctttttttaatcatgcgaaattatttaagattagagaagaagattaatattttaatgttgatgtttttatcatattacctaatgaaatgctacagtaaggggtggttatagctcgttaaatgcttcaaattactactactagatgtactctaaaattactattaaaaactggaaaacattcttgtttgagtaaaaaaaaaaaaaaaacaag

SEQ ID NO: 127723 - DNA, 854 bp, Glycine max
  unsure (1)..(854): unsure at all n locations
  Clone ID: PAT_MRT3847_86338C.1
catgtccatggccttatactgggtttcaaataatcctcttgttcttgccctccatttttaccttcaattttctggttatcacccttacactttgcaatctctgaaccagacgttatctttgttcatcatcgcctcatatacacatacataccctttagaaagttctttgtaagtgttgcttttactcatacagaagcagaaaaaagtgctatttttttacttcttttcttgagactttctgtgctgtgctgccatgggtgtgacacagttgaaccccacttgctcaaaacctcgtcttcactcatctcagctctcttttctatcaaggactcttcctagacatcgccactgcacttttgcgccacttcatagaactcaacaagctaggatttcctgttctgttgcaccaaatgaagtgcaggtgccaactgtgaaaacccaggatcccaagagtaagcctgagtgctatggtgtcttctgccttacctatgatttgagggctgaagaagagacaagatcctggaagaaattaattaacattgcagtctcaggtgctgctggaatgattgcaaaccatctacttttcaagcttgcatctggtgaagtttttggtcctgatcaacctattgctctcaaattattgggatcagaaaggtcaatccaagctcttgaaggtgttgcaatggaactggaggactctttgtttcctttgttgagggaggtcagtattggtatcgatccttatgaagtgttccaagatgcagaatgggctntgctaataggtgcaaagcctcgaggacctggaatggaacgagcagacttgttagacataaatgggcagatttatgcagcgc

SEQ ID NO: 127724 - DNA, 150 bp, Glycine max
  unsure (1)..(150): unsure at all n locations
  Clone ID: PAT_MRT3847_86339C.1
aaaagtntctcaaagatttttattattattaaagggggatgttttaaagaacaccagggttaaccacaaaatttcgtaccggatcttgacggggtacaaattttcaataaagaaatttctataagagcttggaaaaataaggcgaaattt

SEQ ID NO: 127725 - DNA, 488 bp, Glycine max
  Clone ID: PAT_MRT3847_8633C.1
atccattgtacgaatttaaaaagtaagaagcaagactcgtgggcacaaaatttaaccgggaaattcatggccagcttaccagacattttttccacggatccatggtcgttgaacgactcaatatccaattattggacaagtggactgattctacacaattctacggaagctgattatgtttaaaaggccctattctattaaaaaaaaaaaacccttgctctattcagtaaggaatcaatatataatctttatgcgcataacacaataagatgttcaatttagagatttgaaaaggggccctattactgcagggaacctttaatataatggttgctttttagtacgacggctgcaactcacatagaatgatgtgtgaatatcctggaaaccgattactggggggggatgaatcatgcattgtaaaccaactgcttctgaatacacacttcctcaagaacaatcttgccaaagtatgacgccgtggctca

SEQ ID NO: 127726 - DNA, 1998 bp, Glycine max
  Clone ID: PAT_MRT3847_86340C.1
ggcagcctctgaaccactacttatctctcttgctcatcacatgttataaatccagatatttcccaaagaaggagatgaagaattgacgataggccaaagttgacgacatgtgtcatgtccatggccttatactatgttcaaatgatcctcttgttcccttgccctccatttttaccttcaacaattttctggttatctcccttacactttgcaacctctgattgaaccaaacgttatctttcttcatcatcgtctcatacacacatacataccctttagaaagttcttcatactcttccagaagcagaaaaaagtgcctttttttttttacttctttacttgaagctttctgtgttgtgctgccatggccgtgacacagttcaaccccacttgctcaaaaactcatcttcactcatctcagctcccttttctatcgaggactcttcctagacatcgccactgcactattgcgccacttcatagaactcaacaagctaggatttgttgttctgttgccccaaatgaagtgcaggtgccagctgtgaaaacctcggatcccaagagtaagcctgagtgctatggtgtcttctgccttacctatgatttgagggctgaagaagagacaagatcctggaagaaattaattaacattgcagtctcaggtgctgctggaatgattgcaaatcatctacttttcaagcttgcatctggtgaagtttttggcccagatcaacctattgctctcaaattattgggatcagaaaggtcaatccaagctcttgaaggtgttgcaatggaattggaggactctttgtttcctttgttgagggaggttagtattggtatcgatccttatgaagtgttccaagatgcagaatgggctttgctaataggtgcaaaacctcgaggacctggaatggaacgagcagacttgttagacataaatgggcagatttatgcagcgcagggaagagcattaaatgccgttgcatcccgcaatgtcaaagttatagtagtgggaaacccttgcaatacaaatgcattaatttgcttgaagaatgctcctaacattcctgccaaaaattttcatgctttaactcgtttagatgagaacagagcaaaatgtcagctagccctcaaggcaggtgtgttctatgataaagtgtcaaatgtgacgatatggggcaaccactcaactactcaggtccccgacttcttaaatgctagaattgatggtttgccagtcaaagaggtggttaaggatcagaagtggttggaggaagagttcactgaaaaggttcaaaagagaggtggtgcacttattcaaaaatggggaagatcatcagctgcatcaacttctgtgtcaattgttgatgccataagatctttagtaactcctactcccgagggtgattggttttcttctggtgtatatagcgatggaaatccttatggaatagctgaaggtattgttttcagtatgccatgccgatcaaagggtgatggcgattatgaacttgtcaaggatgtcatatttgatgactacctccagcagcgaatagctaagacggaagctgagttgttggccgagaagagatgtgtggctcacctaacaggcgagggaattgctgtttgtgatctacctggtgataccatgctccctggagaaatgtaacaagcctaaatctcctgaataccaaagcagatattgaaataggtcctgccaacttgtgtcttaaaggtactagttagggaatcaataaataaaatgtttttattcagaatcacggtagggtacgttggtaaatgttgtattttttcctaaaaacttctcacttttgattccttaactagtgtcttaaggtactgttagcattctattattgaaataagatcacacaaatttatgtagaataatggctgttaatggatatgaatgcgaaaataaaaaaaatagaaataataaaagtatgaaatcagtcatttgattttgaaaaa

SEQ ID NO: 127727 - DNA, 637 bp, Glycine max
  Clone ID: PAT_MRT3847_86341C.1
gtattgttttcagtatgccatgccgatcaaagggtgatggtgattatgaacttgtcaaggatgtcatatttgatgactacctccggcagcgaatagctaagacggaagccgagttgttggccgagaagaaatgtgtggctcacttaacaggcgagggaattgctgtttgtgatctacctggtgataccatgctcccaggagaaatgtaacaagcctatatctcctgaatgccaaaacagacattgaaataggtcctgcaaacttgtgtcttaaaagatactagttagggaatcaataaataaaatatttttattcagagtcacagtaggctacgttggtaaatgttgtatttccctcgaaatttttttcacttttgattccttaactagtgtcttaggatacctgttagcattttattattgaaactagtcttttgcccgtgcgacgtccgggttcatactcctatttgaatattaccaatacatgtgcaaagttcaataacgatgtttatttgtatgataataatgttgagctatgttaagaaaaaaacaacataaagtaagaatataaacaaacctaatgctattgtaaattgttggatggtgttgatgtagcaatgaaagagaggctgcccaat

SEQ ID NO: 127728 - DNA, 185 bp, Glycine max
  unsure (1)..(185): unsure at all n locations
  Clone ID: PAT_MRT3847_86342C.1
atttttgttgcgcttttcagaggcggaaggtacattcgggtggttacatttccacttaccatagtattccangnntnaggnntgagttcaaggtttcagattttgagtacaactttgagtggagattttgatgaaggataagatctggcaatggatatagtaacatgtagcatgtgctgctgttg

SEQ ID NO: 127729 - DNA, 495 bp, Glycine max
  Clone ID: PAT_MRT3847_86343C.1
tcgaactgtccaaggtcctgtcaccctactcggcttaatataaggtctccgtgtacgtctccggggccaagggttattccaaggaggccactggagccacagcattattaaccttactgggggtgtattaatagcattggtaatgtgcgtcattgtgtaccatgttcgtaaaacaaacgatatatgctatacgcccggcatgccgacagcatacccgaattcgataagctccttgcgtgtgtaaactgcgtaacggtactataacaagccgcaaacacagggtaccctgttaacccgccgagcacagagctcgatgaatgccacggaggtactactaggaggacttaatacaacgttggtgcaggttccaggccttcgggcacaccgcacaatggaaatgatttggtgaactgatccaagtcccaatagcattggctggcttaagcacacaactctcaatgggaccacaatcaacacagttagctctgcacaggg

SEQ ID NO: 127730 - DNA, 239 bp, Glycine max
  Clone ID: PAT_MRT3847_86344C.1
tggacacgcgcgcggacgcgagggcggaaacggcaaggacagggaggacaccacaacctccgcggccaaggcaaggagctcacaaggcacaggcacaacctggcaaagggacgtgcaaagagaccacatcgccggcagacatatcacaagacacaaccgggacaagaccaagtaagagcaagagggaaaggccaaaaacagagaggcagagacaccaaagcaccgaagaagcagcacaa

SEQ ID NO: 127731 - DNA, 878 bp, Glycine max
  Clone ID: PAT_MRT3847_86345C.1
ccacgactagatcctgccgcaattaaatacacggcaaggtctttatcttgcaagtgttcattgtcgatggagatcgagcgtaacaaatttcctttactaatctattcatttgatgtcatctgtacaataacaatagccaccacccagaattaaatacgcagcaaggtctttatctattgtcgatagagatcgagcgtaacaaatttcctttactaatctattcatttgatgtcatctgtacaataacaatagccaccagccaagtagttataccataatactacactatcagcaaagatattgtacaacctagttaatgatctgagagaaacgtcgaatactcgttttatatatttggttagtaatctaaaattggtgcccgcaaatctaagctaggctatcaaaagtaatttaatcaaaattgtctgtaatcacctgtgcactctctccattacagcaaagctcatctccaatagaactgcataagcataacctatgagcagaagagacatgctaggatggtgggggcatgcttaaactcagtatggcaccatttcatatcatggtaaactaaaacgcaatattgacaacactaacccaaaatatctagatagatagatagatatgattgctgctattaacaaaatcacgcagctccagagcccgcattaaaccccactaccatgtgttaccctctgaatgcatttctgccaatcatcttcacgcatctctacatgcccttccaccatgccttgacttcattccgctggctgagttcccattaacctccactggttcgtgccacccttctttttgcattttttcccaatcatcaacacggtaaccaacatgccctaccaccatggctaccattcatg

SEQ ID NO: 127732 - DNA, 233 bp, Glycine max
  Clone ID: PAT_MRT3847_86346C.1
gtcagcatatcggtacgagatagttcatactctcattgtggctatcgtgctggatgagcatgtgaagaaagccatgaatgagattactgctggtatgtttcctacagttttatgcacttgcttcaatttgagctattcgtatttcctttttaagcatgctaacaaaataaatgctagaatttagtgtggtgtctggagattacgctgctgaaattacggtttatgattggaga

SEQ ID NO: 127733 - DNA, 147 bp, Glycine max
  unsure (1)..(147): unsure at all n locations
  Clone ID: PAT_MRT3847_86347C.1
ctctcttgnctccgggcagcaccaaaaccagccaacactngaaatcagtatcnnntggtancacnanaganaagatcaaaacancctttanatcagtancctcagttccctcnntccctatcaaaacccttncanacaacatanggg

SEQ ID NO: 127734 - DNA, 436 bp, Glycine max
  Clone ID: PAT_MRT3847_86348C.1
ggctcgagagccaagttgccatcccgcttcttgtcatactcctacataaatcaagggcctttatatgacacgattgccaaacatggcattcttcgtacagcgtggtggcttcaattcattcaaatgttggcatatgaaaatgcttttacaggtttctataggattaaaactcttttacttgttacctggctacctttgatatagatgagatagttgtgtggatactgactctgggtctgtaatgggaaatcaacaactttaatatgctggcctaacagaggatggctgaatgtgcactatgcaaggggtcttagtcttagcattaagacacaatgggctgagaagaactaatgcaagagaagtatcgacattactgctcatgcaatcatcttgagcgtgatgcatcgcggactgctgcattggaactgaatgacat

SEQ ID NO: 127735 - DNA, 505 bp, Glycine max
  Clone ID: PAT_MRT3847_86349C.1
ctcgagccgctcgagccgattcagctcgagctctctctatattccattgccacccatgctttgaatatatctcttattcgcttcttatggttcttcacttttcttacatacacataaccatcgtcttctcagactgtatgacctcaaagttggtatgtcatgtcaaggatgtgctggagctgtgaacagggctttggcaaaactggaaggtgttcagtcatttgacattgatctgaacgaccagaccgtgacagtgaatggaaatgtggagccagatgaacttctgcaagcctgtctacaatatgataagaagactgccttctgggtgcatgaagctccacattctagatacaagcctttataaagtgcacctgttgcctcataaaacaatccttcataagctgcaactgttgccttagctgagcctgaaaacaagccttcagaagctgcaattgttgattcacctgagcctgaagacacaccttcagatactgctgttgaaact

SEQ ID NO: 127736 - DNA, 417 bp, Glycine max
  unsure (1)..(417): unsure at all n locations
  Clone ID: PAT_MRT3847_8634C.1
aagcttccttgtatgcattggagagaagcactgagaaattaagtctaatgaaagtggctactgttatagtaagttgtgctggtagtggagctacaatccttgagcttagagggaaattggtggatcagatggagtggttgcctgtgtcaattgggaaattatctgatgtcactgaaatggacctatctgaaaacagactcatggctcttcccaacaaccattgtggggtcttcggccttaacaaagcttgatctcacttcaaccaacttattaaactttcctccctcattttgngaaatgataaaacttggttatctcgaacttcccgcccacaaattgaattaccttcccgctacttttggaaaatttgcaaaactccctgatcttggttttgagtccaatggggtccccaattta

SEQ ID NO: 127737 - DNA, 257 bp, Glycine max
  Clone ID: PAT_MRT3847_86350C.1
gaagagacagaaggggtttgtagataatttacgcttttcttttatctttcattcaatctgttttgttttcttaccttgggttgaaagaattatcatgaatgatcctttgtgtcgatcggttagaatgcacaaaatataagtaagagtaaacaaccaatatagcggctgctctaaaggatctaagcttacgtatacgtgtatgccacgtcatatctcttctatattgtcacctaaattcacttcaatggtcgtcgttt

SEQ ID NO: 127738 - DNA, 256 bp, Glycine max
  Clone ID: PAT_MRT3847_86351C.1
ggatttctcagccacttcgttgtcagtgacagtgggattgatgaacttgattggtagttggtttggtgctatgccgagttgccatggtgctggtggacttgcggggcaatacaaatttggtggaaggagtggtgggtgtgtggcacttcttggtgttgccaaattggtgttgggtttggtgttgggaacttctttggcacacattttgaagcagtttcctgtggggatcttaggggtgttgcttttgtttgctgga

SEQ ID NO: 127739 - DNA, 360 bp, Glycine max
  Clone ID: PAT_MRT3847_86352C.1
ttgatgtctacgggtgctcctttctgtttatcaaaacaacgcacactttacgcttgattgcaacaattaaaagaggagtggaaatttttatatagggaaaacatactcctctagaggggcacgcctagtttcctttattgacttaaacaaacaaacaattcgttactaaacgcgagttctctcaaaagccgagggttccggattatcaaaaaaacccccaaaagactgtggcacaaaagaaactggcataagagcctcaccaccaagttgaaaatgctcagagggtccccaaagagtttcaaaaaccgcttgctggtggggaaactcccaaagggaacccaaatgccctgaagattgatt

SEQ ID NO: 127740 - DNA, 823 bp, Glycine max
  Clone ID: PAT_MRT3847_86353C.1
cccacgcgaatcagtttcacgcgtccgatcccttcctatccacaggttagtttggttgatcaatatgggtcgttcaaaatcccttccaatccacagatcaacatttttttttttttggtgggtagcagtgaggataaaaaatggctatggccacagctgtcgtgtgtcctcagaacatcaccggagccatcgtgagctcacctagcaagaccaagaagagagtggtacacgtgagaggcataaattcatttgggggactgaaggctagcaatggtgttgtctctttggggattcctatgagcactgagaagtgctttgctaaggttgtgagctcagtgaaagcagctacatcaaatgggaaaggaaaaggaggggctctttcttccacgtgcaacgctgctggtgagatattcacgattgctgctatcatcaatggacttgttcttgtcggggttgctgttggctttgtgctcttgcgagttgaagcatgggtcgaggagtccgaggcagagtgaaaattcaatcagataagcaagcaattaattaatatccagaatagttgtatgttcctatattgatgatgtggctgttcttgttttcgttatgacttgtatatttatttgtcaagtttcatcattttcctatttcattcgcaattggatctctcgtcaataatctgccaatcctaaacttctgcattgaacctgtaagtcacagcctctgactgttctaatatctctccaacgagaaatcatttgtaattcttgcaaaaccagcaagtcagtaactatgagaaagagggtatatatcaaatttacttttg

SEQ ID NO: 127741 - DNA, 302 bp, Glycine max
  Clone ID: PAT_MRT3847_86354C.1
caaaaagacgggggcacgggaaagtttgttaatttgtagtgcgctatacactatgttaacgttgagagacctatgatttcgtctgtgctcattgttggtgacatagtattgccatgattgccatatgttcgctcacggtatgaacagtggccacggtgcacgtactctggatgtgatatgcgcacgttggaggcatgctgtgcaagtatacagcatccttggctttgagaccatacctgaacagtgcgttgcattcataaaggattacatccatggcgaacagtatacatcagactccaaaa

SEQ ID NO: 127742 - DNA, 406 bp, Glycine max
  Clone ID: PAT_MRT3847_86355C.1
gccaaaggagggcggcaattacgcatatgagcaggtaggagagcattaaaacgaagacctagttggctatccgatgaaaacaggtgcttgaagcctcgtagagaggtgaactcaagtgtatcgtttgatcttaacgaacctgctgctgatgcaacagaggacgacagtggagatggtttcctcaattcaagtgactttacagaggaacatgaagacaactatcatgatgtaagagggtcactctgaccaataccacatgagctgttggattctgcggaccatgccattgtcttcaagcccttgaattgcgatctgcttcgccggaatttctcgacatgcatcgtacataggttctactgggtggacgtgaatcgggtgtcaattgatgcgcaacgacaggctcttg

SEQ ID NO: 127743 - DNA, 272 bp, Glycine max
  Clone ID: PAT_MRT3847_86356C.1
atcaacaataccccttttatctaagtaactcaacccgtaaacatgcaggtctttctacacatgtaccttatttaatcgtcatcttttccaatattataaacataactagctttttttacgcgcaaacttattaaacatttaacaaagttagtacttcattttccataactttagaacttatcctagtttctttccactcaatatcatctatcaatacttagtgtactctattaaaacatatccatttccatacacccgtttgaccattctta

SEQ ID NO: 127744 - DNA, 307 bp, Glycine max
  Clone ID: PAT_MRT3847_86357C.1
aatggaataaaaaaataaagaataaacaaaatacaaaagaaagccaagaagaagtggaaaaggaaacagccagaaagacacaccgcggggaaaccccgatagggaaccggactggaggggaagcactgtcgacgaccgtactggatgggcagaaatccagggggtagccccggccggccctgcagccgaatccggggctgaaacgcgggtgcaggcgaaggcatacaccatacaacaggtatccgaaagcgaattcaccggccgatgcgtgaaaaagccgggtctggaaaaaccgcgggggaaacga

SEQ ID NO: 127745 - DNA, 378 bp, Glycine max
  Clone ID: PAT_MRT3847_86358C.1
cgttcttttttttttttttttttttttttttttttttttttttttttttttttgggggtggggttttttttttttttttttttttttttttttttaagaaggggggtttgtgattatagcaaaaaaaatatgtcccccctttttgtagaagggggaattatccgaggcctccccggcttttgacaaaagagaaccgggggggagaaatttattgcgggggccgccccccttaggaggaccgccctttggagcgcattccccgttctgatgggaaaaaaaaagggggggtggaatggagagacacctgctcgcgggcctgttgggcaaggaacatccacggggggggccttagtcttttaccctccccggccaaaaagg

SEQ ID NO: 127746 - DNA, 142 bp, Glycine max
  Clone ID: PAT_MRT3847_86359C.1
gacttcgaatctcgtgcatgtgccgttgccgtacttcatctgccataaacttagtcgggtgtggttagtgtgagatcacattgaactcatagtggcaaggtcttgctgccgtgagtggtgtagttgctggaatccctgcata

SEQ ID NO: 127747 - DNA, 353 bp, Glycine max
  unsure (1)..(353): unsure at all n locations
  Clone ID: PAT_MRT3847_8635C.1
ntacnnggagacnnggcnngcnagancacngtgancgaatncnactatcntcanncntacatgagcnagnacttcantntcncngntnctancnatttnctttcagcnaaattnntntctcanttntcgnnncntgcccacgaaactcnannngtcccgnnncnaccgngtcatatnnggnangancanggnntcttctnccccnnntnngcantgnccgggtcancctncccnttnntaggtgatcccgattntgatttaatttcncctntganngcgagantnttncctngnnngnttgnttgtntcagtgacacctgaanngnctngtggnnatggntgtngatngcnac

SEQ ID NO: 127748 - DNA, 2159 bp, Glycine max
  Clone ID: PAT_MRT3847_86360C.1
gcgccggtgctgagctcttcgccgccggtggtcggcgcggcattcgcatcaatggctgggtgatcgagactcggaggcactccatactcaactcttccacactccaagagtcaaactctcttcctactcactgctaagctttctcaggaactagttctcaaacacaaacccaattattttttttatcagcttcaccgttcatttcactgtaaactgcatcaatgttcttcaactttaaggaatctgcagtcaaaacaattaaactctcctttaaatatcattttttgcacatccagagatacagttatgtgaatgtgtatatgaagtggaaaaaggattcatactatgactcaattgagcacatccactactccgttcagctcaagcctatcattgccctcaaaaactgcattgtccgggatcccaatggctgcattcctatctctgcagtgtcaaagaggggattagagttagatgttcccatgaaggttgcaaggtttatgaggcagtatccatccatctttgaggagtttacgggtcctgaatacaatcttccttggttcaggttgacaccggaagttgccgagattgacagggatgagaagagagtatatgaagaatgtagggaggacttaaggtccaggttgaggaagatgatattgatgaccagagagcatgttctacctttaaagataattcaagggatgcagtggtatttggggttgcctagtgatttgctgcagcacccggaacaaattcttgatgaatctttcaggtttgtagagatggaagatggattgaaggggttggctcttgaaagtggagaaaagatttattctgtaatggagagaaatgcaatgaaaagtggtttttactctgggggtccaatggaagccattgaatttccattttttccatcaaagggtttaaggttgaggaggaagattgagaactggctaaatgaatttcagaagcttccatatatttcaccttacgatgatttttcaaacttggatccaaactctgacatagcagataaaagacttgtgggagttcttcacgaactgctttccctttttgtcgagcattcagccgagaggaagaagttgttttgcctcaagaagtattttgggttgccacagaaagttcatagagcgttcgagcggcatccccatatgttttatctatctttcaggaacaaaacttgtacagtcattctaaaggaagcttacagcaataaatctgctattgagaagcatcctctgttgagggtcaggaagaaatacatcaagttgatgaagaaatcagaagtgattttaaggaacaggagggtgaataatcgattttctaatagtaatgcaaaattggatatcgattcaaatgatatagatgaaaagggacatgagatggcaagttgctctttggaacaggttgcgtgaaaatttataccagaccacttaaggtaaacatgaaatttttaccaacagagaaagaaacaagtagctgataataagcataagttgaaaatggtagcaccagcacatctagtgatatcgtagccttgaggtgaagctatgatcagtcatggatagttcgcaaacaaaaatgtattactgagctatttaggttattgtttttctcctgtcattgctggctttgtatgattgatgaacatcttagggagagcttggacagtgggatagtggaattgtttggaaaatattatgagaaaatggccaaagtttactttgtggtatggtgtcttcctcgtatttcaagaaatgtgcaaatagtttttgcagttttcatgattccccttgtagcagacaaggagtacctgttgcatgtacagtgaattttggattttggtcattaatgaatactaagagcacacactacagatttatagggaaggttcaaatgttggtaaaaaaataacatttttttatcattctctcttgcagcaaatcagtctttttctttttcttttttgcattcccttagataaatatagtgtagaagtaactcctttatatttccttgatatcttgcttagctaccaagaataatatatatccaaaagacacataaactctgttgtgtagaaatatcatttggaaaaacctggtgacacttgatttgtatcagtatttcatgag

SEQ ID NO: 127749 - DNA, 1170 bp, Glycine max
  Clone ID: PAT_MRT3847_86361C.1
tagtactattaacccatcctcgactctcatcttattttctagtttcccaccgtcacttttccttaacggcgaagccatcgccgaaaagggcacaaccgtcattcccaccccccaaaccgtttcttcaattctcctctctcccatcccagtaaaaaggagaggaatcgggctcgagtcgaagtctgttccgttctgataagaaagggaataacggtaacggagatatggggcttctgtctaacagagtaactagagagagcctgaaaccaggggatcacatctactcttggaggactgcttacatatacgctcatcacggttctctctctctctctctcttcacttttctattttaatttcctttatatatatatatatatatatatatatatatatatattgttttttcgggttctcttgtggaatttgtttgtggttcaaaggaaaatgaagtaggagttgcgaaaacagttaatgatttagaattatagattctgtacttgtcttaacaccaggagattcatagagtaaaatatgttataattttatttggaaaaatatgtttttagcctacgtactttcgataaaaaatgttattagtcattgtacttgagctttgatcaatttggttcctgaactttagaaaaaacaatggttttcgtccctcacatagcgtgaagagggaccgaaaccactaattgcaaaaccgggctcctagaaattggacaaagtggccaagcagtttccatcatagggggacctcttgctgctgctctatcctcgcccctccgtatggttactactaacgtctacggaatggcagcgacggctgttggagtctactgtgctagtaggtatatggcagacattggaatgaggcctaatgcggtgaaggtaccggttgaaaagttaacctcaaggttggccactggcttgctgcaagtggttgaaccccaaattccaaccaatattgctcgtcaatctcctcagcttgttactcaatgaataaaaattgtctttgttcaaacatatgtgagtcccatgctctttttttttttttttaatctgggtgtgtaagagatataaaatctatatgaatggtacaatggatttgcataatttattttgttgtttgaacttgtcttttgtgattcaaagtcctggttggat

SEQ ID NO: 127750 - DNA, 286 bp, Glycine max
  Clone ID: PAT_MRT3847_86362C.1
accttcaaaagaaaccctggcttatgtggatgagacaaagaaattttgttaccgatctacttaagcacattgccatattttttgtaacataccacatactggattacacaccagtaacaacgcctttagacgaagacttagtttttcagcaatacaagctttaaccccacatttgtttttttttaagaacttaggggcgggcttcatgaaattaaccaaatgtgaactttctgtgtagtggtaataaaaagtggagatggaacctccaatcaaaagctttttcttg

SEQ ID NO: 127751 - DNA, 449 bp, Glycine max
  Clone ID: PAT_MRT3847_86363C.1
ttttttttttcttttttttttatttttttttttttttttttatatttttttttttttttttttttttgtatatgttttatttttttttatatattgtttgtatggtttttttatttgttgtgtttaaagtgattttattttttatcacggggggataaaaaaaacatatttttagaaagacatattccaaaaaaaaaaaggactccaaaaaaaatggaaagttaaaaagcaggcaatcactgcttgtttgaacaagaccgaaccaccggaggaaaagataaaaaaggatttatcatattaaaaacgggacaaaaaaaaacacgggggggaaaaaaaaaaaaagatagatagggttgtaagaataaaatcgataacaccgattctttgtaaatgggaaggaaccgcgacaacaaaatgaatggtatacttgtgagaaacaccacgggagt

SEQ ID NO: 127752 - DNA, 1108 bp, Glycine max
  Clone ID: PAT_MRT3847_86364C.1
gaagacctcttggtgcaaggtgatcgtctgagggatgttctccaacaactacaggatgctgtttatttgacaaagacaggctcgaggcgctacaatgaagaagctatcaagaaaatgaatggttctactcacatacttgctgaatcatcaagatctcagttgttagatagctctccaggtgatgtctctgcaaataaaatgaaaaaatctagtgagtcactatctctaagtgctgctgtccaagatatagagatgccactaccacctttggcccttgctccattgcaacatggaatcagatcatgcaatgtttctgaagtattggcagacttggttgattcagtgagaccacttgcccagggtcaaaaacgtgtagtagaactaagtgaactctcatcatcacctttgctagctgctgtagaagaacctgcattgcgccaggctttcagcaatcttattgaaggtgctttactacgcacacatgttggagggaaggttgaaattgtatctacggcagcaccagctggtggtacccttgtacttattgatgatgatggacctgatatgcactatatgactcagatgcactcactcacaccttatggacaagaactgttgtctgataatatgattgaagacaatatgacttggaactttgttgctgggttgactgttgcccgtgagatactcgagagttatggctgtgtcgtccgcattgtttcgcctcggattaaagatgctcctcttggagctgggggaactcgtgtggaactctggcttccttcatcaattgtacaatctgatttgagtagccacgcccaagaggtatagcatgagtttgaagttccattgaagataaatagattccttctcatacaattctacattgtagcacttggccagtatataagattgtgaaattaaggagtggtaaatattactagttctttcttcgttgttgctaaagataagtatccggttctgtatatagctcgtaaaaatttctttggttgagttaatatattactttgctgtgtgtcaccatgtaaacaataacataataaacagtgtatgcatattagatgacaggaaaacttgttgggttttt

SEQ ID NO: 127753 - DNA, 220 bp, Glycine max
  Clone ID: PAT_MRT3847_86365C.1
tctacctttggatacttacaaatgactcgcgagacaaaaggtcacgcacctacatctttgggaagcagatttaaaacggagagagaaggatataaaaagaagagaagaggctgtttctagagctggtgttcctgatgatgataagaattggcctccatttatcccaatcattcaccatgatatggcctatgagataccagatgatgctcataggctacaa

SEQ ID NO: 127754 - DNA, 301 bp, Glycine max
  Clone ID: PAT_MRT3847_86366C.1
ggaagcactggatcacatcatgtcagagagaaataagagacaggagctcaccagcaagttcattgcacttgctgccgctatccctggcttgaagaagatggacaaggcgcatgtactgagagaagctatcaattacgtgaaacaactacaagaacgtatagaagatctagaataagatatccgaaagaacggtgtagaatcagcgataaccatagtaagatctcgtctctgcatagatgatgactcaaacactgacgaagaatgctatgggcgcaatgaagcacttgctgaaggtgaagca

SEQ ID NO: 127755 - DNA, 365 bp, Glycine max
  Clone ID: PAT_MRT3847_86367C.1
ctctctctctctctctctctctgcttcactttctgacttttgcattgtcttgtcaggcagggaatcctcagaaccaggatcggtgcccttctggctctgatctctcaaagctgcaaattctgcttgattggcttgcttgccagtttggagtatgatatcacctccgactgtagttacgcgagatgatgggctcaacaacctgtcgtctaccgggtcgtgcgactctaagcagtccttgaaccatttctctcagaatggcgctgcattgacagaacgaaattacttagggttatctgatcgatcatcagttgatagcactggcctctactgccccatagcttgtgtgatgacaaaaaggagaacat

SEQ ID NO: 127756 - DNA, 296 bp, Glycine max
  Clone ID: PAT_MRT3847_86368C.1
gtgcacatgcccgcctcccgaagcctagactcgggttggggctcgaggccggtcgaaccgagcttaatgaatccctagagggagatcttgactagcatgtctaactcataagtatatcttaatctatgtggttcaatagctctaatactagatctaggcatttagtcgtagtcgtaggcttaaaatatgaagaaacagaacgatggatctctagagaacagctgatactatggaggaagagcttcctgtatctgggtatacctatatcccgaatagcagttattgtcaggaaaaca

SEQ ID NO: 127757 - DNA, 1014 bp, Glycine max
  unsure (1)..(1014): unsure at all n locations
  Clone ID: PAT_MRT3847_86369C.1
cctaatagatggtacagtagttcatcaagaaaatttaaaaaaagatattcgccaagaagttccaactggtcaatttaaaatctatgcacgaggtatggttggagcggaattgcagggaggcttaaaacataaaaagctaaaaagacaaactgtatcgagtggtttatttaattttggaaataagcaaaaattcaactcttttatttctatatataataaaagtgattataataaaaacaataaaaaaataaaattagatgatgatgaaattgcaataagtacaagtgtgtcattatttaaaaaaatgaaaacgctcaatatattcgggaaaacatacagagttaaatatattgagtcgacaaatataaataacctactttatgcaaatgggataaccttaattgggaattaaccaccaactggtgggaccgaattgttaatgaatatcgtaatcacaatgatgaaaatttaatcatcactcctaatcaagtccaaactgcggttgaatntaatgtattaaaagaaaaggataagttgaatcatcgtattaagaaaataggtgttcaacacgatattgaatttcaagtgaaaaaacaaaacctattgatgtggaaacaagtcaactcaagtttaatttttgtaggaagtgttgtatctctagttttattaataggtatatttcttatgatgtattataaacaagtttcagaaggacatgaagatagagatgcatatataacgatgaaacaactaggattagatgaaattttaatcaaaaaaacaattaataaacaagtaatatgggtatttcttattcctgtaattgttgcaattatacatacgctagctgcttttcgtatcatatactctgtattaggaatcgttggtcaatatgatttgggactgtatgctactagttacgtaggtgtgatagttgtatttattattttttattcaatgatgtactggattacttctagaatttattatacgatgataaatgataagcattaa

SEQ ID NO: 127758 - DNA, 225 bp, Glycine max
  Clone ID: PAT_MRT3847_8636C.1
tctttctcgctcgccgatactgtgaacactaaacgacggtactggcagcaaacaaaggctcaaaaccataacaccctattactcgcatgttctccaacaacattactctcgcaccctaccagaggatctagaacggggaatattaccctcccgaattgcaaaacgaccctctccgcttcaatagccccaccccgctccagcgtcgagacggggacccttctacaa

SEQ ID NO: 127759 - DNA, 403 bp, Glycine max
  Clone ID: PAT_MRT3847_86370C.1
gcttctcgatcgaactgtccaaggtcctgtcactcattaggcaaagtagtgctgttgctgtggggtgcagtgctatgccaataggtgggacaaaaacccgcaagggctcgggtgcggagatttgaggaacgcaccaagtaggggggccatgggggcgttttgaaaaaacagccgcgtaacggacgcgtaggcacatatgtagcctaattgcgccgaaagacataccggagcgccgagattgcattagtggccagccatatttgggcacttagataacagagtttaaaggattgtggttaaccatccatatgaccggcccaataaggtgcgcatacaatggcggtggaataccgtataactaggggaccctggaagtcgtagccagcgggatacccccacaata

SEQ ID NO: 127760 - DNA, 275 bp, Glycine max
  Clone ID: PAT_MRT3847_86371C.1
ttttcgcgtgggcggtcgcgtggacttttccaagcaagagtgtttttgatgataagctggtgtcggctaacacacatcaatgctttgatggacatgttgcagcggattgttggttaccaatattggggaattgactttatgctgcaagtcaattaccttcacaagctgtctttgaaaatgtcacatgtggcagcggacgttgaggaccacccaccactgcttggattagctcttcagctacaaagggttcctcctatataagcagaaggatgcta

SEQ ID NO: 127761 - DNA, 285 bp, Glycine max
  unsure (1)..(285): unsure at all n locations
  Clone ID: PAT_MRT3847_86372C.1
tttgcgnccgaatcttatcataccaatcctgaaaaggcacggcgcagcatttttggtgcgcctatcagaggtggaaggcccattcgggcggctacatttgcaaataccagtgtccagagtgaaccagacatgaattcaaggatgtagctcatgagcaccactaccaatggtgaccttgatcacggaaaagatctcgcagtggtgaaagaaacatgagcacgcgctggtgctggctggacatcaagatacactccaactccattagggggaggatgcgttggcaaa

SEQ ID NO: 127762 - DNA, 1508 bp, Glycine max
  Clone ID: PAT_MRT3847_86373C.1
ggactcaccactcaactcgccacgcgtccgctaaaactccgaactcattgctttccaactctaaagtctcagagtggcatattataaagttttgatgcagaatggctgcaaccagggctcgagttagtagcttctctcgcaatgtatcaactgtaacatctcagaatcctggacttaagcatggccctaatgggacaatgttcatttcatctgggattccagatctggacaagattttaggtggtggtttttctctgggtagccttgtcatggtaatggaagatcctgaagcacctcatcatatgcttctattgagaaattttatgtcccaaggacttgtgcaaaaacagccactcttgtatgccagtgcatctagagatcctaaaagttttctcggtactttgcctagtccggcgtcacccaaaggggataatatcttcagatcttggccatgaaaaggatctaagaatcgcttggcaatacaaaaagtattttggtgagcctcagctaaatctgaacactaataatggtggtcagcatgattactgtaatgattttgacttgagaaagcccctggaccggcacttttttagtggcaataatgtagattgtgttagcatcaaagattctcctaaccttactgctcttcaagattgttgtgctggatttctagctaaattctcaagaaatgaaggcagcatttcctctgctggtcgtattgcaattcaatcattctgttctccccaatgcaagtattcaaatgaggagtggcatatgctttcttttattaggtccctaaagggcatggcccggtcttcaaacgctgttattgttgtaacctttccaccttcacttcttcctccatcttgttcaaaaagattgcagcatatggcagacaccttgctttctgtcaaagccattccagatgaggataaggaacttgcaaaactcctcactggttaccaggatatgattgggcttctaaatgtacacaaagttgcacggttaaatacacaggttccagtgattctggacgccacaacattctccataaaattacaaagacggaggtttttggttttagaatgtctaaatcaagccccagttgatggttcaagtggcagttcgtatggcacatctggtggttgttctgggtcaactaaagctgggtcacttgatttttagactataccttttttataacagaagacttgtttcaaccaaaaatacaatagcaatggtgagtcaggctcagtttttcttagtgcttgaaattttgttagtgagtcagccttctaaattgttactccttttctttttgttcttttgatgatcaactggtttcaccattggttcgtctgcaatgtacagacattttctttaaaagttagtgtaacagtgagaatggcgagtgtcaggggaaaaaacataatgaaaatagtgaatataaaaaacactgttaacgattattgcctaattatgttgtcacttgaccttggtcatggcac

SEQ ID NO: 127763 - DNA, 271 bp, Glycine max
  unsure (1)..(271): unsure at all n locations
  Clone ID: PAT_MRT3847_86374C.1
ccataaagtcatactccacgacatacaactaggaattattaacaaattcaacatgcctgacgaccactatatattacatactgctgacgcccagaatattacccttccattcgactgcatgcatgggtgctgtactagctgtgctgtacgtatgaagaatggaaagattatgcaaccagaggcactacggatatcngccgaactaagagacaacggttattctctcatttagaatctcttcccaacctctaatattgaaatctaaactcaa

SEQ ID NO: 127764 - DNA, 757 bp, Glycine max
  Clone ID: PAT_MRT3847_86375C.1
cttagaactgcggtccaggcagaagtagctaatccaaaaagtcctcaaagggggacagcaaacaaaaccacacaattggataactctgccaccactgatcatctgagcaaagacacaagcaacaataaaggtcatggcaatgccaatcatgccacagaatccacacaaaagtcggcgtcacagactagaatagatcataacacagaagaagctcatccaagttcagatgtcaaggtccaagaaacacgtccaagttcagatgtcatgactccacacaatgactcacaagaaactaccgaggcaagttcatccacgattggttcaaatctaaatgagataatggcagatagggcagagacgagcaaccaacagaatgctatggctaaaagcagtaatgatgagacattggatgaggaagtggaaagttaccagaagtatgccgaaaccagttatgaggagacagtagaagaggcaagtaatcacaactgtggtgatgggatggaggaagaggtagaggaaattgaacagaattgttatgaaactaattatgactggatcagtgaaatttctaggcctaggagctattgggaagagcgcaggcaagcatggtatagagagatgcttgaaactggttctcaaaatgaagatatacgaaggcttcttgaaagaagaacagtgtcaagtttcctttctagtgacttcagggatagaatggatagattgatggaatctcatagaggaacacaaacacatctag

SEQ ID NO: 127765 - DNA, 442 bp, Glycine max
  Clone ID: PAT_MRT3847_86376C.1
taaaggtttttatttatttacttattttcattaagtgtgctttgttgtgttgttttccctatatagatacaactgctaagtctgtgttgctgattctgaatcctgactgagtgtttttttttttttttgctcagcaaaagtataagtagtattaaaagagtaccagaggtactaagcttacaaatattgatatcaagcactaggttccagatcagacttgctgcagtcttgataggaacccaagcctgaaatcagaattacataatttgaacacaactgtaacatgatatgtaatgtagcttaggtaaactgtataattcatatgctgttatctatgcccctctcccctgcagttcacttttctatatttgtgctaaaatataatcttatttttctcagctttattatttaattttttttctagggcaaatagttttggtgc

SEQ ID NO: 127766 - DNA, 784 bp, Glycine max
  unsure (1)..(784): unsure at all n locations
  Clone ID: PAT_MRT3847_86377C.1
tggtttgacagttatatctctcttacaaatattgtcaatgctggtttgaattgtatccttcatcagtaaaaggtgttattcgttgtcaattgatggacttggactgttattgttctggttggcttgtttttaaattgtgtttttgttgttaattcttataattgattattgggatgtccatcaaattatgcccatgttcacatttcgtggtaaaacattgaatttcaaattttccaaatagaagattattatgtttacccaactcaaacttgcatttcctgcagatgtttgattattgtgtaatattcaaatgtagcagtctagaggtttaaggttgttgtgcagcagtatgcatttgcatctgaaggtgtgagtttggatgtgcaggtatgtgacaagggcaagtggttcgtctcttgcaaagatgttcccatgtctcttagaaatgtagtttttcccagcatgtttccaaatggtggaaactatcaggatgttgttgatagtaattgtaatatcagcaatggagatgatattattatagatgatgttaatggaaattctgaagatgatgtttaagcagcagagaatcctgtgatgcatgaatttactgaggaagtttctgatttccctcatgaaccgcgctaggggntactgcctcatgatcagaataccggagctttctttattgcaatattgcagaaagtttctcctctgccagcaattcaggtaaaacctagaaaagaagttgctaaacatgttgacaaagcatactaagacaatgaat

SEQ ID NO: 127767 - DNA, 274 bp, Glycine max
  unsure (1)..(274): unsure at all n locations
  Clone ID: PAT_MRT3847_86378C.1
acgtaatcttgtatcctctatagcaagccgccnnttttttttttttttttttttttttttnggacacaacaacaacataccaccctctacttaaagaatatatttcacaatttcaataatccacaagcaaacccaaatattaaaacatctaaaatatattataaatcccctcttcctataatataccttaccccctactaactacttataaacaccttttttatttttaccatattcacacacattaacagttccttttaaaaaacctattata

SEQ ID NO: 127768 - DNA, 782 bp, Glycine max
  unsure (1)..(782): unsure at all n locations
  Clone ID: PAT_MRT3847_86379C.1
ggaatttggcccgaagctccaatgtgtttttcttgctatggcacataacttcccaagaactttagaggctcttgtactgcatgtgctttcaccagtgggggccgaagtcctcactcggaaattcgatgaaatggatcaacaaactcttgaggaagatcggaatagattctacgaggttttctacagtgcatttgatgaccaatctgcagtttttaattcaattctaaaagggaaagaggtgttcacagaacaggcatttaaaaatgtattggataaatttgtgggagtgaatctggaaagctgaaagctgggtgttagaagaaatgctaaaagcagtaaacttcatggatgaattggcctcaccggtacctccaaagagtgaattgatgcatatttgaaactggagcttttctttgtctgggtctgtagatgccaaatgaagtgaaaccttatggatgaattggccccacaggtacctccaaagattaaactgatgcatattggagactgaagctgttcttcgtctgtgcctgtacttctatttgtcagtttacagttcagaagacgattatcactgatttgaactgtattcagggctgtatatacaagtaacatcagttgtatactgctatgtgattaatacgttgaattagcataccgaaaatctattgggttgattctttgaccccaccattcatgtttttccatanattaaagacttctacttgccaaaccagtgtacacaaccaaaatgatgttccttatttgtgttgtttctacct

SEQ ID NO: 127769 - DNA, 210 bp, Glycine max
  Clone ID: PAT_MRT3847_8637C.1
gggccaaagtcaaacgcttataacaacgggggtggtaataataatattgcaacatttcacagatgtgctctactttcagctccaacaaaatagctccacacctgctgcgctaataatgccaaaacaaactacacccgctcttattcgcgagcaacctattcaaacctctgggctcacactcttacaatcaagcattttgttccctatatg

SEQ ID NO: 127770 - DNA, 599 bp, Glycine max
  Clone ID: PAT_MRT3847_86380C.1
ctatgacgtcgtatgcacgctcggaattcggctcgagcagcatttgatcaaggcaatacaaggccacttagggaacaagaatataaaagaaggaaaaagaagaagacgacatagcaaagcctagaaacatgggtcaccattcttgctgcaaccaacagaaggttaaaagaggactttggtctcctgaggaagatgaaaagctcatcagatacattactactcatggatatggctgttggagtgaagttccagaaaaagctgggcttcaaaggtgtggcaagagttgtcgcttgagatggattaattatttaagacccgatattagaagagggaggtttacacctgaggaggagaagttaattataagccttcacggggtcgtaggaaacagatgggctcacattgcaagccacttgccaggtcgaactgacaatgaaataaagaactattggaactcatggataaaaaagaaaataagaaagacttcttcggtgtcttcaacaaccattgcacaaagtatcgatcacaattcttctgaccagttcaattacaattctaatctaatactataccactttcccaaccatgataacaatcta

SEQ ID NO: 127771 - DNA, 210 bp, Glycine max
  Clone ID: PAT_MRT3847_86381C.1
gtgaagaaccccattgttaaattttgataatggcaaatggtaacgcgccgcagtcaagtggctattgaaaagtgtttgcctgctgtgtttgttcgaagctcggtttgcagattcgaccactcaaacccttacgctttcaacttggaaaggcttcggtccacaaaggaatttggtattagaattattattttacgataattcacttattta

SEQ ID NO: 127772 - DNA, 694 bp, Glycine max
  unsure (1)..(694): unsure at all n locations
  Clone ID: PAT_MRT3847_86382C.1
gctgctgatgatatagaattcatganctcagtnncatgggaaactattgaggcagaagcaattctatcattatctcgtcgatcaacaccttcaaggatcccttcaaggatccgttggcgacaaattatgtttcagaagcgcattttctctgatgattcatttgaaatagacaagtccaaggaaaattcccttactatggatgagcagaataatctctttgaggagaacaaaatgagatttgctcaactccaagacgagtatgtcaagaccgaagcttcacttgaagcatcaaaccagcataagcaattgctttgtgaacaggtctctgatctcaagaccatgcttgatgaaaaacaaaatcaattaaaatgttgtgagttggagaccttgaagatagagactcgtcttggtgatctgaaaagaagaatgttggagacccattttacattgaaggaaagagttgaacaaacagaagaggcaaggaaacaaagtgaagaaagacaagcaaagctgcagtgaagacaacgttagagaaggttaaacttgaattagaaaattatctgttagatgaaaatcataaaattttatcaattttatcttttgattttgtagtttttaataaattttaaccaataaaaaatgtgttaagagttgttaaaaaatgtgacgttaatgctccttaaacataaatgta

SEQ ID NO: 127773 - DNA, 696 bp, Glycine max
  unsure (1)..(696): unsure at all n locations
  Clone ID: PAT_MRT3847_86383C.1
ccacgcgtccggcacttagcctgaggactcacgagccaccaaacgaacaactgagcaagggttctcttcaacgtttcaccctaaaacctcgcccgtttcttttcggtgtttgttgctggcgcattctactgtgaatcttgccggagtgaaggtccgaggagcgtcgcagcagtgtgggtgtttggttgtcgtggaggttgtgttgtcacggaggccggaggagcgcagcgcgtcgcagctgaagatctccaaatctccattctccaatattctgtttccgtttcagtctttcagactttaatttgttcccacttttgcatctaggcgataaagaatttattcatttgagttgcacagctctaccagtaccaacagttcaacaccatcaggctctactaacctggctgttttgtcaaggttttaaattgcggtctgcaaacgcagtataatggttttggggatctctgctgctgcatcacaactgcaattgtggctgcatcaatcgcaatttaggtttttatcaaagttggaattctagttgattacttttcctgactctaatcagaaagatgggaagcacatttaatccacagattttggtggaaaaactagccaagctggaatgtttcacanacaagcatagagaccctgtacactggtgtatttttcatatgaacaaagccaaacaagttgttg

SEQ ID NO: 127774 - DNA, 541 bp, Glycine max
  Clone ID: PAT_MRT3847_86384C.1
gtttccgtcatcactgtatggacgtcctccttctttgggaggggggggggggagtcaaatatggtggaagaaggaggggaagaatagactaataagagataggaggaatggacggcaaaataagaattgcgtaataatgtagtgggcatgggtaaagatctgggtaggtgtggcgcggaaatgatgggcaccgagggtatgatacggtccaggcggttaataagtggagaagtttgcgagtgaggaaaccttgcgagggtaacattggcagtaagagcaacagggagtagcagcgcaacgcatagggggaggtgtagatggtaaggcaaatcaaatccttgataaatctgctaaaagtggtagtcctgagactaatgttgggttgactaaagttcacattcgttcgaaacagcgaaatgcaaacctgtgtgctgaaaaagcttagggtagaacttgtggggccgcgaaaagttgtcgtagtagtatgttagagtaagcgtagttcatttagctagaaccgccgaacagattgagtgttgga

SEQ ID NO: 127775 - DNA, 1716 bp, Glycine max
  unsure (1)..(1716): unsure at all n locations
  Clone ID: PAT_MRT3847_86385C.1
attgtcttctgaactcctattttctattggcacggcgtaagtgtggacatctgtataggccatttctattcccaagaagtagatgtcattcaactatgacggcaacggttccatcaccaaatgtaacatttcttattctagctactgccaagaaaacgctttggataaagctttggtgaagggaaaattccttttgtgtgataacattccttatccatcaattgtgggatttgctcaaggggctgttggtgttataattagaagtaatgtttctttagctgtgtccgatgtatttcccctgccagcggctcacattactcacaatgacggggcacaaatatattcttatttaaagtcaacaagtaatccaacagcgactatatttaagagttatgaaggcaaagatccattagccccatatattgattcattctcaggtagaggtccaaacaaaatcactccaaatattctaaagcctgatttagctgctccaggggttaacattctagctgcatggtctccaattgctcctatttccggagttaaaggagataagagaatttcaaaatacaatatactatatggaacttcaatggcatgtcctcatgttactgcagcagctgtttacatcaaatcatttcatcccaactggtctcctgcagtgattaaatccgcattaatgacaactgctactccaatgcgtgatatacttaatcatggaaatgctgaatttggttatggtgctgggcaaatcaatcctatgaaggcagtaaaacctggattagtttacgatgctactgaaattgattatgtcaagtttctgtgtggagatggttatagtggatttatggacaaaattacaggagataataaaaccacttgtacaccagcaaatacaggaagtgttttggaccttaatctcccatcttttgctctatccacaactcgctcaaagtatattagtgccacttttagtagaactgttactaatgttggatcagctaaatccatatataaagccacagtaactacacctccatcatcttcttccttaaacatcaaagtagtgccagatgttttggtcttctcgtctttggaggagaagatgtcgttcacccttaagattgaaggaagcattaacaatgcaaatatagtttcttcgtctttggtttgggatgatggcacttttcaagtaaggagccccgtcgttgtttatgttcctccgtaagttctctgctgcgaacacttgtcaatgaagaagcaagcaacatgcatgaatggaaatgattaatgtgttatttataatcggtttgctttttcttcttccctttgaagtgttagtgaataaatattctaggtgtgttctaagccagaattgatggcaagtgcttttgtaagccaggaataaaatcaagataacgatttactattatctaaaaaaaaatctattcatccttttgagtaatttaaatgtcattattatatactccataatcattggtcatgagttttaaaacaaaaaaaaaaannaaaacatatattttcttttntttttctgcccctttattttttttcatttttttttttaccacacctcctcttccccggnctttctcttttcctcaactttttttttttttcattttcttctctaatcctcgccgggcgtttcttattgataaacaaataggattaggatgggtaattacctatgtt

SEQ ID NO: 127776 - DNA, 239 bp, Glycine max
  unsure (1)..(239): unsure at all n locations
  Clone ID: PAT_MRT3847_86386C.1
caaattctgatgcatcanagggtagccggttttcaaaagtcgtngagtattaccggctgctangtcntgttatggctaaagctcttgcaagacggncgacttttggacctgccatttcagtggcatnntataagcttgttctaggccaagatctngatttgcatgncattctgnccattgatgctgagattgggnagactttgcaagagttcatgcccncgtttgtcggaaacatatat

SEQ ID NO: 127777 - DNA, 544 bp, Glycine max
  Clone ID: PAT_MRT3847_86387C.1
aaaccagggcaagctcttggtttatttaacaagggttcaacaaaggaacatgaaatttacacaagggtcaaatcaaacaaagaggggatttttttcccacccccacatacaaaaaaaccgattttggcttattccttaaaacaaaaaaaacacattttttttttcttggtcccaattattattcaaaaaaacaaattctaaatttcaaaaccttaaagcccgctagggagggtaaaggttctcactttaggcgtttgggggggtgcatctttaggcccaactatagggaggaccccattctccacctgggccttaatctgaaccaccttcacattctttggcaattaaatttcccttgaaaaccctcccttcccagggccttttttaaccacatgccaaaaaggatccttttcctttggttgagggtcctttttccaaacttcccctttgaggggaaaaaaattcccatccccaatctgcacctttatggcttccttgcggaaacccggaacgttaatttttaaaaagggggcagggggggatt

SEQ ID NO: 127778 - DNA, 315 bp, Glycine max
  Clone ID: PAT_MRT3847_86388C.1
aagctacgaagcccatccttctggatctggcttggaaccaatttacacaccatacacttgtgacggatactttctcaagtacggatacatatttctaaaaacgagaacgagtttctttgaaaaacaactttatttatttatactgccatgaactaacaatctacagcatatacgttactatcagacagctaacaccatggattaacaggaatcaatacatagttggaacaaacaggacggtgtactcagttcaatgcctgtattgcgagctcctacacctcacttgtacctcacgtggtctaggttttgatgcat

SEQ ID NO: 127779 - DNA, 427 bp, Glycine max
  unsure (1)..(427): unsure at all n locations
  Clone ID: PAT_MRT3847_86389C.1
ccgggacgacccacgcatccnaaaaaccctaanccctatttcaccttctgaccaccaccctacaaaccctgccaaatttgcaacatcatatgacaccaacccacaactccctatcctatgacgctcaatcctcccaactaaaaatcacaatcaaactaactacccaatcccatctaaatcaacccaatctcaacacagcccatccaagctatcgattaaactcctactaactacaccactctaacaccatattaacctcaacgaccacattacaacactgacccactatgaacaccactatttgacctaccatctttaccatccaaaaaatcaactttcaacattttactaaatacatgatatagcccatattgatcgaacttcccaacaattgcaaagcctgaataacaacttcgacccacacatt

SEQ ID NO: 127780 - DNA, 166 bp, Glycine max
  Clone ID: PAT_MRT3847_8638C.1
cttcacgaacgcttaacacgatacatctgaagagggcctactcgaaggcctgcgcgcggatcccctatacgaggactgtgataactacattgatatatagctgcggtcatgagacgatgaccctggtgaccgctacaagcgtgtggtatatggtcgagtttgagta

SEQ ID NO: 127781 - DNA, 403 bp, Glycine max
  Clone ID: PAT_MRT3847_86390C.1
caatgctgggcctgcgtttccacttgcccatgcatgtcatgatggaaatctgaatcccgtgcacacttctcacactctttacactggtcattgccgctcaaacggagagctctgtgtggatactctgcctgcttgctgatcagctattgaggatggtgcgaacgtcatagctactgatctattatcatccaactatggtgatcttgtgtgaatccatgatgttacccttgattatactgctgacattgcatatcgcacagagtttgctgatcggacataacatatgaagctccaaggggaaaacatgactggcttatttactgttgatctcacattcaaggaattaaagtcattgatggtgaaacagaggtgtagcctcagggaccaacgatttaatggaaat

SEQ ID NO: 127782 - DNA, 374 bp, Glycine max
  Clone ID: PAT_MRT3847_86391C.1
cccacgcgtccgatttatttatttttattcctagatgttttgaaaagccggttttggagttttccccttccgatgtttcttcaggtatgggagcggtgtatggcatcactaagagcagcgtcggggttgcgtcgatgggtcacgccggagctggattgattttgtgcttggtatcctgcaccttccttgcagttaggcttttacagttttcccctttcccattcatcaattcttttattgaatatgtttgcacaatagttaacaataccaaatagtggcattgagtgacttatcccaaaattgatacagtgggtaatggacacatgaatgagaactgaatgagaatttagttgtttcgaatatgtttgcacaat

SEQ ID NO: 127783 - DNA, 105 bp, Glycine max
  Clone ID: PAT_MRT3847_86392C.1
tcggtattcggctcgacctcgagccggatcggctcgaggtggatattcgtctgaattagtacctgcaagtgcaagtgggcgtcgcccattgcacatataagcatg

SEQ ID NO: 127784 - DNA, 144 bp, Glycine max
  Clone ID: PAT_MRT3847_86393C.1
ggctcgagctataaaggcaggcttctctgatctagtgaccaactctctatcatgatttgcttccaggaacaggggcaggtgtgaaggcagtgttcagcttttctatccaatacaacgaagaggtcacattccacacaaccctct

SEQ ID NO: 127785 - DNA, 563 bp, Glycine max
  Clone ID: PAT_MRT3847_86394C.1
aaaacttcacgtccaagttcctgatcatctgttgcttttttctgatttatacaaaccttaaacatgcgtatcattgcagcatatttgttgtcagtgttgggcgggaatgataaaccagatgccgcagcagttaagaaaattctcgactctgttggtgtaacagctgatgatgcagaattaaccaaattactctctgaattagatggaaaggatatcaatgaagtcattgcagaaggtaacaagaagctcgctacagtcccaactggtggttcaggtggtggtgctgctccagctgctggtggtgctgccccagctggtggtgctgctgctgccaagaaagaagaagaaccagccaagaaggaaaaatcagaagaatcagaagccgatatgggtttctctttgttcgactaaacatttttctctcttcccctgtttttctgcatcttctccttcatcttacatatcagatgcgttcatgttttttcatcatggttatgtcatgatgatcatgttcagtgtaggatgatcaaaccaactaaatgatcagagcttctgcaataagt

SEQ ID NO: 127786 - DNA, 297 bp, Glycine max
  Clone ID: PAT_MRT3847_86395C.1
ttcttatttaagatggtaagatgattgggtgaacactttcttagttggtatcggactgcgtgacagattgaaactgcgtgtgaatatttgtcaggacaatctgtagatttcaagtgcatgctggtgaaagttgggatatgggctgacactctgctatctggtatgggacttaccatttagacttcattattgctctcctttgtttcacctctctattctcactgacatcgcattgagcgacaaagaggtgttatttgaaaaacacttgggcggtggtgcatatgcttgctgcgataa

SEQ ID NO: 127787 - DNA, 861 bp, Glycine max
  Clone ID: PAT_MRT3847_86396C.1
cttttatctcagccacctaaagctagcccccagatctaacgtctaatggtttttgttaactgtgtatggtataataccctataatcacagtcgtgaacaaaggtgaaaaaacaatgtctcactgtgccgcaaggtgtgccacaaggagtgccacgaggcttcttaacctaacgcgcgctctctccacggaggcgcgtgggcaaaagatcgagcgcatcgccacggagcttctcgacctcaacaggttcgagaggcacgatttcacggtcctctggcggctcaagatgggtctgcaccgctacggcgctcctgtggctggcatgacgatgccgtccgtcggggcggctgcccgggctgaggccggtgctgccgcagtcgcggagaagatggcatttgacttgaagttggagaagtatgatgctgctgccaagatcaagatcatcaaggaagtgaggtctttcaccgatttggggttgaaggaagccaaggacttggtggagaaggttccctgtgttttgaagaagggtctcaccaaggaggaggctaatcccatcatggagaagctcaaggagttgggtgctgctgttgtcttagagtgattatgaatttctgtctttttttttgtactccagagttttgtgttagttgtagaataattgacactttttgtgggtattgaatgataaaaatgataagttatatatattattaccccacttcactattttttttatgttttgttggtaggttgatggtttttgttatatgacattcttgattttaattgaagtttgatattggtaaccacttttaatgagttaaagttgtgtttgagcttgtgtgtgggtagttgaaagaagt

SEQ ID NO: 127788 - DNA, 322 bp, Glycine max
  Clone ID: PAT_MRT3847_86397C.1
gttgggaggggacaaaaaacagggcaaattctgtttttcaccaatattcctatttttgtccaaatgttttttttttttaaaatcaaatccctaaaaaaagagtggttgttttaacaacgacttaacgttagggggcaaattttgacgaacatttttcttttgaaagccttttgtgaaaagctttttttacatcccactgagacacatgtaaacttttgagaccacaaatacttgttttttttttaagtcgagcagcaaccagccttttggttcactggtttgcctaaaatttaaactgtgggaggcctggcattgttcactg

SEQ ID NO: 127789 - DNA, 476 bp, Glycine max
  Clone ID: PAT_MRT3847_86398C.1
agacgacagaagggttgtgcataattttatatcaaacaactacattaacatatgcagtgtgagccggaaaggtcaataggcattgggagctccgaaaactatgatttattaaaattaagggtataaaaaaaattagaggaaattaagggtatcaattaaaaagtgaatatatatttaataaaagttacatttttaaaaattcacgggaacaagattgaacttagcattttccttaactaatctttgattttgtataaaaaaatgtgttcatattaccttacaaaagaatatgataattacagctgttccttccctcatctagtcacaagataaccacaagtgagaaactaatggtttcttgctgcaagcagctttatatttcaaaacgaagtccatgttattgtccccagagcgttgagtctcttctgaagacacatagttctcacagtcactggtgattggcagcaataaaatat

SEQ ID NO: 127790 - DNA, 259 bp, Glycine max
  Clone ID: PAT_MRT3847_86399C.1
aaaaaaaaggggctggatttaaattttcaaacccaagggcggccccaataacaaaccccggccccgggggggaccccggcccccccccgggttcgcagggggaggggaacccccaaccggggtttccgggggtttttccaaccccgaatgggctgacttggggcccgcccggaacatttatgccggacacccccgcgccgggccccttttaccccacctaaggggccccctcccccccaaaaaagaatttaacgggccc

SEQ ID NO: 127791 - DNA, 265 bp, Glycine max
  Clone ID: PAT_MRT3847_8639C.1
gaaaattcataaagttaagcaaaagaaaggaacacgactgcggaatggtgaaacccctgaagttgtaccgtcacatgtaaaactgcatcagttacttcttcaggagcgcattgagaatgcttgtggggatcgtgctcgccttgtgaagttgaaaaagaaacaattgaatggatctgcagttgaagcaaaaacatggaaaagttacatggagaaaattctggaatcccctcccctgatcataaaatggtttgtgaaattcaattcc

SEQ ID NO: 127792 - DNA, 436 bp, Glycine max
  Clone ID: PAT_MRT3847_863C.1
atgcgaggggcttaaaatattaaaaatatatggacataattcaactataccttttgcgtccctaaaataaattacactttatcaagcttatgcaattttgggtgagggggaattgatcacacaacattccaaaatcaaaatcctgttacataaaaggccggccatcaaccctttttttaggggggctttcttcttggatttctttaaaaacttaatcctctcctttccttgctgggtggtccttccaaaaaccaatcaattttttaaggcgagctatttttttggaaaaaacatttttggtcggatcattcacaattgatctcactcgggaggcatacattagagaggtatgggtctaatccaagcttgactttaccggagaacattcacaaacatgagaggtttggcattaccccctagggaatcactcatcaac

SEQ ID NO: 127793 - DNA, 522 bp, Glycine max
  Clone ID: PAT_MRT3847_86400C.1
caaaagacaaaaaaataaacagcaaataaaacagcttctttctccacaaacctagcgggtctctccacttatatatccaaaaaaaaaaattcactatccatcatggacatgaagaaggttacctgtgccgttctcatcgctgccgcctccatgagtgcagcactggctgccacagaggtccctgcgcccgcccctggccctagcagcggtgcctcagccgcggccgctgtcggctccttggttggtgcctcagtcttgtccttctttgccttgttccactaaaatgtgacatggttagttaatggggaaagaatgttgaaggaacaatgcagttgaaggaataaattaagctgcatatatttatttacttatataatacacttatgtatggaataaagtgtgaacacaacagttatgtacgtgcattgatatgtactatcatcaacatttttattgacaatgtaattgatttgtgttcataatgaaaaatttattgtattaaaaaaaaaaaaaaaaaactcg

SEQ ID NO: 127794 - DNA, 360 bp, Glycine max
  Clone ID: PAT_MRT3847_86401C.1
ccgctagacaggatctgttaatactgactagttgtccagttgagcgtccttgacggactgactgcctacgatcttgcccctaatgacccccacctcatagacattctcaccatgaacggcgtcaacatatgcgtcgtcgagggcgaattcctcaacagcttgttcaacatcataagcgactggctgtttcctttactcgtattacacggcctgtatttgctcttccgcagagcccaaggcgggcccggcgggcctcgccgactgggaaggcccatggacttcgggcggaacaagtacaagttccaggaagcttcccagacctgcgtgagcttcgctgacttgacatgcgcggaccaagcg

SEQ ID NO: 127795 - DNA, 497 bp, Glycine max
  Clone ID: PAT_MRT3847_86402C.1
tcgcgatctagaacgacattgaaggaaataatagacttaaatgtattcagtttgaagttacactggcattcagtttagccttcctgaaatggctctctagccactcaggttgcaaaacacaaaaatcattcacagtgacttcaagtcctttaacaaaaaggtccagtatcaaaggggcaccatggtgcaggatatattcaccaaaaagaaacaagcaaagccacatcacttgagagttgagaggtcaactcggtatcaacttgactccattttcttaatggctttttctatggcaggcacatttttcttaaaggttgaccactgctcttctgtcaaacttattcctttggaagtaggaagctccttgccatcctttttataatactcccgaatggagaccaatgttttccctctgaaatcctgaatcgtcacccttctcttatctgaaagcctgcagatgatgagatcgccttcatcatcgtactccttgcccttgg

SEQ ID NO: 127796 - DNA, 237 bp, Glycine max
  Clone ID: PAT_MRT3847_86403C.1
gaacaattgaacaaacaacaaagatgtcgcagttctggaagccagggacggagaggcctcagggccgcgtggtggacgttgaagaaggcggtgttctcttcttgtctggctctcaccattcctcttcttcttctcgatacggtcacgtcagcatcgagaagcaacggcggcagcgtttgcctgtgttcaagtaccgcaccgccattctctaccttgtcgagactcacgccaccacat

SEQ ID NO: 127797 - DNA, 411 bp, Glycine max
  Clone ID: PAT_MRT3847_86404C.1
caaaagaacaacaaaagggagacctgaataataaaaaacccataataattgcctccttttggaaaatttttcccaaaaagcctttggcaatttgcttaaccatattcaggaaagcaattcgtccaagtcagccattcacatctaaaaggtaattaaggaacaaaggacaaaattgcaagcaaattgcacttaaaattctttaaaaataacttgagaagggcttttatagataagtaatcaagcaattagtacacttcagactattgtcaactaactcgtcgtagtcagcatcttgtagatgaattaagaaccaagaacaagagtgcaagcaagttgcacttataaaatgttgtgaaatagctaaaagggacttctactcaaggagaagtaatactaattaattaacattgt

SEQ ID NO: 127798 - DNA, 399 bp, Glycine max
  Clone ID: PAT_MRT3847_86405C.1
acaaaataatcaattattggataataaatttaaaaatattttacattacatttaaattagtctacaattaaatgtaacaaaaaattacattaacatataaaacacctatgaacatattgaaactgaactaattttatagaaattttttaattttaaaacctgagaaataaatgtaacttattggggaaataatttaacacaaaacgtgaccaagcattgcccatttctatcattcacgtttcttaactagaaagtttgccatgccttttgctaactgagggtagtcttcaagtagtcttcgttttgaaagagtgtcatcctcattttgtggggtccataacaccttgccagcctgtaagaaatttgaggtagtgatgaagaaattaatgacactaattc

SEQ ID NO: 127799 - DNA, 520 bp, Glycine max
  Clone ID: PAT_MRT3847_86406C.1
ggaaggaataaaaagtttaattttgaaccatttttataaccgcatttggggaagctttgtttcacaacagggggggggggctttgggaaaaaaggcaacgggttttctggccaaaaaaggggtaaaaaaacaccttttactggtttaccctaccgcacgtttccccgaaaaagtttttgttcaaaaacatgaaaaaaacccacctgctttttttaagctttttaaaaaggaaactaatgggaccatttttatttgtttttttatacaaaagggtacacaagggtacacgtttccaaattacaattggggggattataaattaggggtctacaccattactgggtttttaaaaataaaaaattgggggagcgggttcacttaaacataacccttcttaaaaactaacagttcctggaaaaaataaaagcaggcaaagtcggccccccttccgattttaaaacaaaaaacaagcaaggctggggtttgaaaaccccatcttgggacccattcgggggcattt

SEQ ID NO: 127800 - DNA, 412 bp, Glycine max
  Clone ID: PAT_MRT3847_86407C.1
ctctcgcatatggatcaaatttcggctcgctttacgcaacggcttattagaatgtcaaggtgctattcatatggcatgtctattacatcaaacattttgcaattccttattgtggaaacaaaataagaacgcttaacctaccagttatgctaaatttacagtgctgtcgattaattctgacaatagcatcatatacttactcaagggtcttcttactttgtatatcactccattcactgacatgataattactgagtacattatgattggctgtacaggaattgatatgcgcatgtaatcaataacaatatgaatgcctgttaaacattcttttgagctccctaattggaactatgatggatctagcactcgacattcaccttgacatgatcgctaacttatcctatttcct

SEQ ID NO: 127801 - DNA, 395 bp, Glycine max
  Clone ID: PAT_MRT3847_86408C.1
gatggatatctgcagaattcggcttaagcagtggtaacaacgcattttacgcggggaccttcataccggaaataaggattcttcggcagtcactaactatgttctatatttctttacctggatctcaattacattgttggacgtatgatgttttaagcatcgatggtgtacccactaagtctctaatgcctcagtggtaccctaactattatagaataatgtaatccccacccccattctctgaatctttcctcgctttttgctcgactcatattgcgttaagaacatgaactactttatgttttgatatcagttccatattccactgtaattacatgacacgacttatttctcccatcaaagcaaccccttcttattcattaacatactttacc

SEQ ID NO: 127802 - DNA, 390 bp, Glycine max
  Clone ID: PAT_MRT3847_86409C.1
gggaggggggagattcaaccctgttatttggggacaataaatcaaggccacaactcaaagaaaaagggtttaataagggggggggggacatggaaccaaaaaaaaaaaaaggccccaagactataaaaacattactttttaaaaaaaaaaggttttttcaaattaaacctcggaaaaaaacaaaaaaaaagggggggggggggggggccaaaaagggataaaattcactaaaaaaattttaaagggaggagcctttgaaaaaaaactcctttttgggttcctaaaattcaccccaaccgggggacttcccaaggggggcaagcgagttggacttggcacggaaaaaaagggcattttgggccgccttaacaatttttgggggggcccccc

SEQ ID NO: 127803 - DNA, 506 bp, Glycine max
  Clone ID: PAT_MRT3847_8640C.1
tcctctagagcggccgcttttttttttttttttttttttttttttttgctatgcagccactcaaatatgtcagttagattcagataagatatactaagcaaaagtgtctaggagcatgcaaaatatttggagtcactggccatgaataagtttgcataagatgggagtgggaaaataccaataagagaagagaaggacattgagtatattacctggtcaattgcaaaaggatgtttaccatggtgaaaggtagatacaaggatagccagagcatgaacatggttcatgctcacattaaactgatcttgcagcatacgggctctctcatcacacacatttgctagagtttcttctcttctccgcataattcccgtattcaggtgccaaaataaccaaaaggacccgattattccaagtgacacaaatataactaataactttttcctccaccttccagcaccccttgaaggaccccttggaaaatgtttcaaacacttttgttgtgc

SEQ ID NO: 127804 - DNA, 421 bp, Glycine max
  Clone ID: PAT_MRT3847_86410C.1
cgcgctgccggtaccggtccggaataccaggcttgacgcacacgtgcggtggaatatagagctgagtaaatcgttagtacttcgagtcatggtgatagtaggaacacagcacagcagcatgctgtaaatctaattacgaagtcagtacctgttgccattagtgcatcagctgctgatgcatccagttctgacttagggtcgagtgcaaatgcatctgaaaatcatctatccagagctttgtctgaagatacacttgattatgaagccatgattttggatatggctggacaaaatctagtgaggccaatgggcccatcttcaaatgatctttcaagggctttggttgacaggttttctactgttgatttaaagcttaaattgcaactttacaaggttaggtttcatgcttcttactaggaac

SEQ ID NO: 127805 - DNA, 456 bp, Glycine max
  Clone ID: PAT_MRT3847_86411C.1
atgattcgtaggtttgcgatcgctcctaatagcgagccacagccctgagtgttggtcgtgcgagtcgaacagtgatagaacagacggatgtgggggggtggggaacttatccgccgtcagcaccgtatgtcttgccgaagacgaggacctggagcttgtcgtaaccggcgagcacaccagcgccagcaacggtgcggaggatgttggcaccagcgcccttgaagagcgacttgacgccctccttcttgacgatctcggagaaagcgtgggcagagcttctgtacttgacggcctcaccagaggtcatcattatgcgacgacggacggtgtcgagggggtacgaggccagaccggcaccgatggtgataccccaaccgaggaggaacgaggcgaagaacgaaatcgtgagcgagccggtgaggagcacgggcttgagcgaattgtatagaccgatgt

SEQ ID NO: 127806 - DNA, 491 bp, Glycine max
  Clone ID: PAT_MRT3847_86412C.1
agcctcttgttgaggcttactcttaatcacacacaacacgtgcctcaatcacattcttataagaagctattcttttttctacaatacttacacagttacattattttctcaatattagagcagaatgagtctaagcttatgcctctcccatttcccatccccctccttgttacctttttgcctctcctcgttcctgacttatatcctaacatataattatcctaaaattaaactaatattatgcattttaacttgatctaaaccttctagttaaagtgaaattaaagatgctttggtaaaatgagatgagactagtacttgcctagtgttgttatgtaagcttttagtttataacaacaatgttcttaataatggtttgatgcagtgtatcttggctttcttgcatttcaggttaagtgcatgggattgagctgattgacgttagtgaatgcatgaacaagatatactttagtaatgtatttcccttattg

SEQ ID NO: 127807 - DNA, 719 bp, Glycine max
  Clone ID: PAT_MRT3847_86413C.1
gcttgactcctctagagcggccgcccttttttttttttttaaaaatatatgaaatataatgtttcctctcacatgaaacttcacattcttcccaaatttcattcaatatttcagtcttctcttgggcagagggatctcacaaatgagttgggtcttaggaactcactagggtcaggactggcgtcaagactcaaagagcacatacagagattacccacaaacaaggtcttcacatcggcaacgagaatcaaactcatgcccttttgggatatgaatttgttctttaccaattgaaccaacctttgttggtaatgcagtgtgacatttgatattgattaaagagattctattaaatggaatcataatggcaccggaaaaaaaataggagtgttaacaacacagtctttaacacactactgttaccaaacctctattattgagtaaaatgtattagaaactacaaattatgagtgaaactcgttatataagaagtgaaacccaccaaattttgtgattttccatcaatttcaaccaataataatgtgttctgaagagtgttttggaaaatatgttactagcatttcttaaagaaaaatatataatatatggaaagaaaagttccaagaaaattggccaccacaagcatgactaatcagcaccaaaagtggaaaaattcatagagaaaggaagttaagactttacatatgggtatggtgaaa

SEQ ID NO: 127808 - DNA, 375 bp, Glycine max
  Clone ID: PAT_MRT3847_86414C.1
gggggaaaacaaaaaatcataatttgtgcggggataaatgacggatgattggcatacaatttgccaaaatttacccctaacaatgaagattttccgacctgcttttaacctactgaatgacttggctgaactgatgaataactattatgacgtattattaactgcaacaaatttctctacaaattatacaaccatgctttcacattagacaacattatatgataaccttacagattaatgctcttgcttaactcttgcctttaatatgccacggagaggaagtgatttttaaggcctgttccacacatttataatccctagagcctgggtgtgacacaagcctgacatgctaaaaccttctccttcattaataag

SEQ ID NO: 127809 - DNA, 854 bp, Glycine max
  Clone ID: PAT_MRT3847_86415C.1
tacggcggcgaaaggccgcaagaagtcgatagaatgcgatggacaaaaacaatagcaataattcaagctcttctagtgtgtgcacgaaaatccgtcaagcacttacaagcaatcctgcttttcgagccgttcaacgcatcactagctttaaccaacaagaacctactaataaacccttcaccaaaggtccaaattctcaatcatccatcactaatattattatccaaaacaaaccacatcatccacatcataaggctcacacagaaggatcaggatcaggatcaatccccataaagtttgataatggaaactactcagcagtctcaagtactgtagcaaatggtaaacaacatgttcccatgcagcaagggaaacaacaagaaggtaataataagaaacaaatggatatcaatgaccatttcaaagatttcattcaaaatacaagggagaagatgatgagaagcgtcacaaacattggttggactcatcagagcaaccatgcggctgcacctgaacatggtgaggctcagaacaagaacgaaagccatttttctgagtttattcagcgtgctaggaagaagctcagaactacaacaactgttagaaagaataataattagtccaagaaagagtaagactcaccacaaattaagaaaggttaattattagtattgatgtttgttggtttggtgttggaaaagtgttgtgcatctaatctaggttattgttcagtggggataaaaataaaggccatatcccttaccagggtatgcagccataatatttcttatatttctacctaatattatatgttgatgtcttaatattgatctatatttcggttttcaaaaaaa

SEQ ID NO: 127810 - DNA, 505 bp, Glycine max
  Clone ID: PAT_MRT3847_86416C.1
atatataaagtgacaatgtttttgtggggggggtgaaaaacaaaacccaaacccattatttttatgaattttggggggctaaaaaaaaaaaaaaaaaaattttattgagctcccgtaaaaaacacccaaaaaagttttttttcactttaaggccccaaaaaaaaaaaaaaatgtgaggccttacaagacaaggggaaggaccctttttggggaaaatccgcggcccaaactttggggaaaagggaagattgtgggggaaaaaaaaaatgggggggggacaaaaaatttttttatttatggcccaaaaaaagagggcaaagaaaacccccttgttcccgagagaaaggttagaaattggggtaatggggggccgaaatcccatcttaaatattttcaaaagattaagcggaggggaccacaaagcgtataaaagggggataaggggcacacccccgatttttgttcataaaaaaaaaaaacgctgggggcatgggggggggaaggg

SEQ ID NO: 127811 - DNA, 121 bp, Glycine max
  Clone ID: PAT_MRT3847_86417C.1
ctatagccacaacataggcaccaccactttggccaacagttacaagttatgctcggtggcttcttcttggcaggcgcataatactccataacagtgcagtacctttctgcaaaacatcata

SEQ ID NO: 127812 - DNA, 521 bp, Glycine max
  Clone ID: PAT_MRT3847_86418C.1
gcatctcaaaatacaccaataacatatcaccaaaaaaaataattcaagcacaatgctaaacaacaacattgaaacaatgacaccaataagttgctttgtaaaaccagacatgctggtgtagtttactaccacaaggccaaaattcattgacaatttcgtttccacgataaagaaatgagggtatcaatagcctggttgtgcaggttatttcttatgctgcgttacctctttaataacaccatcagcaagtgagtcaacatcattgttcttgccaaaaaactttacgaattccatctcaggactcatcaagtatctccactatttctactctcatccttgccattgaaatatttcaaagattagatcatataacaatggagtgatcaacaagataatctgagtcttcctctgctgtcttcatgtaataaacgcgatatgcacgagcaacattcttgacctcatcggggctaccagttaattcaattaactttggatgaaattctgtgacatattcaccgact

SEQ ID NO: 127813 - DNA, 1982 bp, Glycine max
  Clone ID: PAT_MRT3847_86419C.1
cccaattagttcaacttctccaacctttatcaaagtcaaggatgaaccttgggatattggtgaaaactacaatgttaccaaggatgctatgggtagtatttctttcaaactctcaaatgtaaaaagtgaaagggaagtccataatgaatatcatgatgaccaagcagaacatatgaacttaattgatcgactaaattttctcagggctggagcggattctagtttaaatatttctacaagttactctttgaagactcagccttcttcctctatgtcaagccctatttttttcaaaatctgctgaaccttcaagcatcaaatctaggcgcaaaagaaaaaaaacagccactgattcagttcaagaagcacttgaggaggatgctcctgggctcctgcaggtattgctagacaaaggtgtattagttgatgaaattaaactttatggagagaaagaagatgatgaagctctggatgaatcattttgtgaagatagcttttcgaagcttgaggctttgataaccaagattttccctcaacggtactcttttttaaaattacctaatactcgtgcctcaaaggcttcaagagcgagttattggttagcttgtctaatctcacttgttgagcagacacgatatttaaaatttcgaaagtggcctgttgagtggggttggtgccgagaccttcaatcatttatttttgtttttgagagacataacaggatagtgctggagcgccctgaatatggttatgcaacctacttctaaacctcgagccgaatcggatcgagcaatgaccaatcacaattctctgtgaactttctagaatctcgttcttcctttgccttctccttcttcttcaaccctttttctttctctttctttcgcactttcattctctaaaaaaaatctaagtccctttggtcttcatcttctgttctgatccaggtatggcttctaaacgcatcttgaaggagctcaaggatttgcagaaggatcctcctacctcatgcagtgcaggccctgtggctgaggacatgtttcactggcaagccacaatcatgggacctgctgatagcccatatgcaggtggtgttttcctagtttcaattcattttcctcctgactatcccttcaagccaccaaaggttgcttttcggactaaggtgttccacccaaacatcaacagcaatggcagtatatgtcttgacattctcaaggagcaatggagcccagccctaaccatttccaaggtccttttgtcaatttgctcattgttgacggatcccaaccctgatgatccactcgtaccagagattgcacacatgtacaagactgacagggccaagtatgaggctacggcccgcagctggacccagaagtatgccatgggatgaccatatagagctgtttttcaatgaagcagcaaaatcataatttatgtaaaagaacaaaagatattttgaatgaatttgaatgctttattttatattagtggaactccacagtggtaagaagagacctggtttgccaatttgtgaatattttctttgctatacactggtgatggatgtatctttgttgtgtaataatgtttgtgcaaacctttttctgcatagtaatatagatatataataaaaaaaaaaaataaaagaaaaaaaatgtaaaaaaaaaaaatagaagcttgaggctttgataaccaagattttccctcaacggtactcttttttaaaattacctaatactcgtgcctcaaaggcttcaagagcgagttattggttagcttgtctaatctcacttgttgagcagacacgatatttaaaatttcgaaagtggcctgttgagtggggttggtgccgagaccttcaatcatttatttttgtttttgagagacataacaggtgcttgatttgccttaaatttcatctttttggtcccttcttttcttctcattatattacatgatgtttgctttgagctgag

SEQ ID NO: 127814 - DNA, 755 bp, Glycine max
  Clone ID: PAT_MRT3847_8641C.1
gataatgctcgtagatatgtaaaacagcttccccaatatccaaagcaaaacttttctgctagatttcccgacatgtctcctggtgcggttgatttgttagagaagatgctcatctttgatccaaacaggcgaattacagttgatgaggcgttgagccacccatacatggcacctctccatgacatcaatgaggaacctgtttgcaccagacctttcagttttgactttgagcaaccatcattcactgaagaagacatcaaggaactcatctggagagaatctgtgaagttcaatcctgttccaccagtctactgagattttgtatttatgttgtatatgcttagtggattatctgatgactaatatacattttatgatcactacttggcaagttgcagcggacacaagatatgaaaacatattggagatactgagattcactgagtttgttgtaggtttctttcattttagtctcatctcagattcttggataatcatatgttgagatgtactgaggaaagaaggatcagaatatgtttcagcagaatatcctaaagctccaactccttgttgtacttctatcctttttagattcaaggtccatggtttagtgcactgaactgtcttgccagtttttctatcctttacaccaagaaaaatacacaagaaaacttttcatttgtggggacagacattatcccatattcccattgtatgacatttaaattaaatgtaatggtttgttagagtattcc

SEQ ID NO: 127815 - DNA, 202 bp, Glycine max
  Clone ID: PAT_MRT3847_86420C.1
accaaaacccttatggcagagcgcggatgtggttaccgtggcaacgaccgtggcggtttcagaccccgatttggtgggcgaaggcgccgatgttacaagggcccaagccggcgcctaagtccccggcgcgaggaaaaagaaaaatgggtcccaatgaccaaactgggcccgctggtgaaaggaggaaaaatcccaaaccttg

SEQ ID NO: 127816 - DNA, 377 bp, Glycine max
  Clone ID: PAT_MRT3847_86421C.1
aggcgtgcgaacacctcagacaggacagcagtagaagaatgggagcatgctgctagcgccagtaagctgtcaaccatcaaatggtaagtgcctcaaccacaggctacctactccactagttcatctgagtggagccatgtatccacacactatctacctctatatcatgatctggatctgatacactggcattacacacaggtgacggacatacgtccaaggacatattcgaatcatcgtattacagcgttctgagaattacttgactaatcactcgcattcactaaacacagtttatgtcagcgtaaatgtatcgtcgctagatactagaggattagttcgaaccttatgtattgagtggatagatcatacctgca

SEQ ID NO: 127817 - DNA, 2030 bp, Glycine max
  Clone ID: PAT_MRT3847_86422C.1
tcttcctacccactacttcaaataggagcagcgttcgatgcttaggtcgctttaaaccctgtcagccttgaatctgctcaacaatccccatcaacccctcactgtagttcgctttgagggtcttccgaaactctcgggtctggagttcgggaaccatagcagctgaatggcactatccctttgaaaattatttgtgacttttaattccatcgccttccccaatggatatgagcctcactcgcttccatggatcgaatcctgaaatcggcgagagcctctggctctctcaacctctccaatcgctcccctccatcacttcacgatgatggttgctccattctatccaggaactcccgcgacgaaggagattggatcggctatgtcgcttgtgaagcttgattgttcaaataatcagctcacggaacttcctagctcgcttggaagatgcttagaattgtcagacttaaagggatcaaacaatcttattacaagtttgccagaagatttagcaaattgttccaaattgtctaaactagatatggaggggaacaagctaacagtgatatctgaaaatctcatttcatcatggaccatgcttactgaattcaatgcatcaaaaaatttgctgaatgggatatcaagcaacgttgatgccgtttcttgtctaattcgttttgatgttcatctatacagaatatcttcaatccctttatcactcattggttgtcattcacttacagagctttatttggggaataacaatatttctacattaccagtggagataggggccctttctcgccttgggactttagatcttcactctaaccagctgaaggactatccagtagaggcatgcaaattgagtcttttagtcttggatctttctaataattctttgagtgggttaccccctgaaatgggcaagatgactacattgaggaaacttctgcttagtggaaatcctatgagaactcttcgaagctcgttagtatctggacctacaccagcattactgaaatttctccgaagcagactttctgaagatgaagattctgaagcagtaaccacaacaaaagaggtgatcgcaatggctacccgattgtctatctcttcaaaggaactttcgatggaagagctggggttgagtgctgtcccatcagaagtatgggaatcaggggaggtcataaaacttaatctatccagaaactccatccaggagttgcctgttgagctttcttcttgtgtttccctccagacattgattttatctaagaatcaaattaaagattggccaggttcaattcttaaatcactttcgagcctttcatgtttgaagctggataacaatcccctcagacagataccttcagatggctttgaaatggtgcctaagcttcagatcctggatctaagtggtaatgcagcttcattactagatggtcctgcattttctagtttgccatacctgcaagagctttacctaaggagaatgaggctcagtgaagtcccatcagatatagtggggctgcatcagctacggatccttgacttgagtcagaattcccttcaatcaattccagtggggctaaaagctctcacttctctccaggaacttgacctatctaataacaacattgcagtccttccgcccgagctgggtttgctggaaccaagcctacaggcactgagacttgatgggaatcctctcagaagcattcgaagaactgtgttggataaaggaactaaagctgttctgcaatatttgaaggacaaattgccagagcaatagtgtttttagttttttccctcctttgaaagtgttgtgcttgacatgaacagcaatatttaaagtgtccaatttttttttcaggtgtcacattctgtgtttgctctttattttgttcaattattttcccgtggtacctctgcttttgtgtgctatttcatgtaacaattttgacggtttgaatatttaacattacaaactaatttgcatggcttaaaaaaaaaaaaaaaaaggcgggccc

SEQ ID NO: 127818 - DNA, 445 bp, Glycine max
  Clone ID: PAT_MRT3847_86423C.1
ttgtatactacataaatcctggggaaatcaaatcaagccatgcaaattagtttgtaatgttaaacattcaaaccgtaaaaaatgagttacatgaaatagcacacaaaagcagaggtaaccacagggaagaagaattgaacaaaataaagcgcaaacacagacagctgagggaaaaaaaaaaaaaactgtatcaacatgtcagtatgtcacggaaagaatgtgacacctagaaaaaaaaattggacactttaaatattgctgttcatgtcaagcacaaccctttcaaaggagggaaaaaactaaaaatactattgctcttgctctggcaatttgtccttcaaatattgcagaacagctttagttcctctatccaagacagttcttcgaatgcttctgagaggattcccatcaagtctcagtgcctgtaggcttggctccagcaaac

SEQ ID NO: 127819 - DNA, 182 bp, Glycine max
  unsure (1)..(182): unsure at all n locations
  Clone ID: PAT_MRT3847_86424C.1
cctgccttcctagcccagncngggacccacccacacaccgtttccagtaacaacaccacaccacgccnccccgccccngacaggaaagggaggggccccgagacccgcgccnancgcccacanacagaagggccagacaccgcagcccggaaccagacgacaggagaacgcgccgggggaga

SEQ ID NO: 127820 - DNA, 241 bp, Glycine max
  unsure (1)..(241): unsure at all n locations
  Clone ID: PAT_MRT3847_86425C.1
gtctngttagtanccngncntacatctgtcgcaaatcgganntgtaaacctttgnttccactatnttcaacncctcnnttangtttcantgncagcaatctctccggttctttaccttcacggaattccaaccantaatttcgatgactgaatcgtaaagancaccgaacagtttcaaaaccatgggngaggacgccaattgaagagatggngggaaacaacganatccatgttcgatgcc

SEQ ID NO: 127821 - DNA, 235 bp, Glycine max
  Clone ID: PAT_MRT3847_86426C.1
gcgcgtacttcacgatcagatgtgtgggtgagccacacacagttcgaggtagtgctggatgggcatagaactgtgcatataagaatgtacgaaggagagtggatccagaacattaggtatgttcaggataatgatcagggacattctcagacgaaacacgagccttctatacgaactaatccaggggagagggaagaaccaagccttaacatggaagcagtagatgcaaatactg

SEQ ID NO: 127822 - DNA, 155 bp, Glycine max
  Clone ID: PAT_MRT3847_86427C.1
cccacacattcgcattattgaagatgctagacatccagctaaatacaagaggtgggttggaatggtcgatgtcatatttactgatgttgcttaacctgatgaggctaggatttacgcgctgaatgcttcataatatgtgtaaacaggaaggcatt

SEQ ID NO: 127823 - DNA, 477 bp, Glycine max
  Clone ID: PAT_MRT3847_86428C.1
caagctcatcctaaagtcataacaatggcagcagcctccttcatgggtctatcttgcccatccttgtctgacaaggccgggaagctgatcccatgaacccccgctttaccctggcttatttagaggaacaccggcacaagcaggccttctccggatacccatggaacgggccaaacacgactaaagtacttgtgcccattctcaggctagcccccgccctacctcactggcgagatgccaggcgactacggatgggacactcgttgaactttctgaccgagccaaacaccttcatcagactccgccatctctaagcgatccactaccagcgggccctgctcgagaccttggtctgcgactgaccctaactggagagacacacctgtgacaagtcatgaagaatctgtcatggtcaaggacgcaacgcagatcatcatcgagggtgggctggactacttgcgcaacccaagacttgga

SEQ ID NO: 127824 - DNA, 202 bp, Glycine max
  unsure (1)..(202): unsure at all n locations
  Clone ID: PAT_MRT3847_86429C.1
gnatccaggtatctgagggcaggcgagaacntcagtgttgggcanaggcaactgtnnagtctttcccgggccnttattgngtagatgcganaatattagtncttgaagaagcaaccgcagcagtancngnnagaanagatgcnctcaganaaaaannaantcgagaagaattncacgacctgtacagtnntcattattgcnc

SEQ ID NO: 127825 - DNA, 289 bp, Glycine max
  Clone ID: PAT_MRT3847_8642C.1
gggtctgaggtgcactgttgtcgttcctaggaatgtcacactattgagggagcttgagacacgtgtgaagggcattgaagatggaactggtcgctacagaacggatgatgttgatgatgtctacgtgcagtcctggactgggactattatggtccccgatggcgacgcatatgactggctgtatctaccacgatgtaattatcatgcggcactgattctacggacagtgcagccacgtggatgatgccagactaggattaacatgactcgtgtcaaccaacaaactgga

SEQ ID NO: 127826 - DNA, 226 bp, Glycine max
  Clone ID: PAT_MRT3847_86430C.1
ggcagcttcttcaattcaaaacaaaactctctggggtgttggtgttggtgagggatctgaggcaaaggtgttgatgatatgggagcgtgtgtttcaactccacaagggtgcgtgggagggaggttgagctcttccaagaggaaacccagaaagatagggagagagactctcaagaagagttacttctctggtgtgtaatgaggcatcatcggagatagttgatgtg

SEQ ID NO: 127827 - DNA, 520 bp, Glycine max
  Clone ID: PAT_MRT3847_86431C.1
gcaagaaggccgagttcggcaaggacctgcactggtactcgccgtcgcctaacaacgtgcgctccatgctgtcgacgacgcgcgagagccactcgcgcgtgcgccgcatcttctcccatgccttctctgacaaggccctgcgcgaccaggagcccctcatccagcggtacatcgaccttctggtgcagcgcctgcgcgaaagggccgagcagggcgttgatgtggacgtcgtgcgctactacaacttcacgacgttcgacgtcattgcggacctgacgttcggcgagtcgttcgggtgcctggagagcgatgactaccatgcgctggtgcgcggcgcgttcgcgtcgatccaggcgctgagcttcaagttggcgctgcgctactacaagccgatcgagaaggcgtactactggtggaacaagaacaagcccatgggcaacgtcatcttcttcaacttcaccgccggcaaggtcgagaggcgcctgggcatggagacggcgcgcccggatgtcgtgacggc

SEQ ID NO: 127828 - DNA, 694 bp, Glycine max
  Clone ID: PAT_MRT3847_86432C.1
atcgccaaaagagctttgagcaacatcaccaaaatgaccactgaattcgtccccaaccccaagatgctgtaccgaaacctcggtaacactggactgcgagtccccgtttttagctacggaggatggttgaccgtcggcaacacccaaaagggcgatattgtcaaggatctcatgaagaccgcgttcgacaatggtatcaacatgttcgacaatgctgaagcgtactctggcggagagtccgagcgagagatgggtcgagtgatcgaagagctcggatgggaccgacgagatatcgtcgtcaccaccaagattttcttcggtaccggccgaaaggagacccagaacacccggggtctgtcgaggaagcacattgttgaaggattgaaccaatcgctcaagaacctccgactcgactacgttgacattgtcttcgcgcaccgaccggaccgaacgacgcccctcgaggagaccgtccgggcgttcaaccatgtcatcgaccagggcaaggcattctactggggcacatccgagtggtccgccgcgggagatcgcacaggccaacgagatcgcccgccgactgaccctcgtcggccccgtcgtcgagcagccgcactactcgatgcttcaccgagagcgattccgagaacgagtaccgccccgctgttcaaggaaactcggataccgaacgactatt

SEQ ID NO: 127829 - DNA, 510 bp, Glycine max
  Clone ID: PAT_MRT3847_86433C.1
agatattctgcctcatctgacgaattagctggtgaaatgggtgaagctaaatctcgaactatctctcatttaaaagggacagaagctgcttggattggaattcctacctcggttgccactaccatgatgcaggtctcgaacgtgttctttgagacgaaccagaccaggttctacatgtcgatccttatgcccagatgtgaacaatgttgcatatcgaacagcgcagctcagcctttcgtggctatctttagactagataccccatgtctgccaaggagggaaaactgatacctgatgacaattgggattatgaatacgcacacatgtggcttctgattctggctttgaatagccgaacctatacgatatgatcccttgcagttgactattcgcatacacatagaatagaacctcttagtgagtgcatagacctgaatacaaaggtccaggtgctaactacaactctaacggcaaattctatgataactgatcctttcctatacattccta

SEQ ID NO: 127830 - DNA, 2054 bp, Glycine max
  Clone ID: PAT_MRT3847_86434C.1
ctaaaaccctttccctttgttgtttcttgtggttttggagtctgcagcaatgtggggttggatggtcggggaagcgcgtagggcagcgtgcaactggaactgggtttcgctccgaagcatgggtggcggtcccagaacctttcccggcggtgtgaacaagtggaagtggaagcgcatgcacgagaagctcgccagagacaaacagaacagactcatccaacaagagaagcagctctacccagctcgcattcgctcccacatccgctcctccctctcccccgaccaccgctccgccgctgccgccactcaccgccctctctcccccaacgaccacttcaaagccctcgccgaccgcttcgtcaaagacggcgccgaagacctctggaacaaccacgacggtcctctaactccaaacccgacaacaccgaaccttgatttttgccccaagcacaccaggggttaccgtgctgttcccgaggttgggaacagtcgtgttggggcccacaaatataggttttggagaaagggtagtgatgattcttcttctggtgagagcgagagtgagattgaagttgaattgagtatgaagaagaggggtagtagtgcttctttaggggagtatgatgtcaagagagagcggagggttgtgcccaagacttctccagcaagaactggcatgatttgagtttattagttattggttgagcttaattgatatgcctccgagtggagattaaccccagatggtcatgaaagcattctaagcaacacaaggtttgacgagtgcggtatatcgccactgacggtcaaggcactttctctagtaggttatgttcaaatgacccgcatacaagaggctagcctacctatttgccttgaggggatggatgctttagtcaaagctaaaactggcactggaaaaagtgtagcttttttgcttcctgcaattgaaacagttctgaaagctatgagtagcaatacatctcaacgggtgcctccaatatatgttctaattctctgccctaccagagaacttgctagtcaaattgcagctgtagcaaaggttttgctgaaatatcatgagaccatcggggtgcagactcttgttggaggcatacgatttaaagttgaccaaaaacgccttgaatcagatccatgccagatacttgttgctacacctggtaggttgctggatcacattgagaataagtctggaatatctctgcgattaatgggcttgcggatgcttgtacttgatgaagctgaccatttactggacctaggattcagaggggttcggcacgaggctgtggactggcttgcccggtcgccgccgttccttgcggtttgctgcaacctcgccatgccatctccgtcctgtctctcggcgggggcatacgatttaaagttgaccaaaaacgccttgaatcagatccatgccagatacttgttgctacacctggtaggttactggatcacattgagaataagtctggaatatctctgcggttaatgggcttgcggacgcttgtacttgatgaagctgatcatttactggacctaggattcagaaaggatgtagaaaaaattgttgattgtttgccccgtcagcagcaatctttgctgttttctgcaaccataccaaaggaggtccgttgtgtatctcagcttgttttgaaaagggaacacaaatatgttgatacagttggaatgggttgtgtagaaactcctgttaaggtgaagcaatcttatcttattgctcctcatgagtcacattttcagttagtgcaccatattctgaaggagcatatcttgcaaacacctgattataaggttaaacacagatgctgtttcagatttcaaattgctttgttatatattttatggttttgaccagtagattgcatgcaggttattgtattctgtataactgggatggtgaaatgaaattgcatgtctgctggtacagatgattttatttgcctctgtgtaaacttctccgcgaaatgaaaacgaatgctaggcatatacattatccaaaacctcaggtctat

SEQ ID NO: 127831 - DNA, 468 bp, Glycine max
  unsure (1)..(468): unsure at all n locations
  Clone ID: PAT_MRT3847_86435C.1
tcattgaataacctgaaactaaactattccatgtcaccaaatcaggttttattccttcctccttcatctggttgagtagcttttcagcattgtcaaacaaacccttgtaggtgtaaccagatatcaatgaattccaggcacaaatatttttgtcctcngtatganggaacactacttcagctttatctaagcaatcgttcttaatatacttatccaccaaagaagtacaaacgtagacatcatactcaagcttacttctcattatgtaaccatggatttctttccctaaattaaagcaacccaatccaatgactgcttgtagagcactagttattgaacatgaatctggcttgaagcctgcgctntgcaggctcccggaattggtgagaacattttcatatgacccctgaagaggatggccagacaatagagaattccaagttataatgtctggtttgacgccggaag

SEQ ID NO: 127832 - DNA, 347 bp, Glycine max
  Clone ID: PAT_MRT3847_86436C.1
aaaacagagggaaaaaaatttccctttttacaggaagagagagcattgaatcgaacaacagcaagaaaaaaagaacccaaaacaactacaaatcctaacatggggcctaattttttttcctcaagagcctaacgtagtttttttacaaaaaaaaaaaaaaccaaaacccgcaaaagatctcgccaattaacggatttcgaattttcttttttgcttgggttcacaggaaaactcttccggcgagaaatttacgagctcggtgatgtcacccccggttgagtccgaaaccaagcgcgtcgagaacaccctctaagacaaaaacccggcacggcagccggaggactcct

SEQ ID NO: 127833 - DNA, 135 bp, Glycine max
  Clone ID: PAT_MRT3847_86437C.1
ggggtggattgagttatctaactgggagtctgtgagaaaaacattttaaaaaagggtttaataagtttcaagtaaacctagtgggtaagaaattgcacttcctaccttgattacttaaggaacaaaatctaagtc

SEQ ID NO: 127834 - DNA, 2180 bp, Glycine max
  Clone ID: PAT_MRT3847_86438C.1
ggatgggttttcctatcactttccacgtaagtcttccctgagtgggttcggtggaaccaaagcgtgcttcctcttgctcctatcctaagtcctaattcagcatcgtgctgttccaattcgaaactcatatatataaatacagatcccaactcaaaagccaaatcacaattccacagaacaatagtaagtcctatcagtttccacgtaagtctccaaaatcagaaacactcgaagcttttcaatggagatagatggcaacgttctcgcggccaagtcgctggtgcgcttcggtgtgcagcacatgttcggcgtggtggggattccggtgacgtcgctggccaaccgcgccgtctcgctcggtgtcagattcattgcttttcacaacgagcagtccgcgggctacgccgcctccgcctacggctacctcaccggccgccccggcgtgttcctcaccgtctccggccccggctgcgtccacggcctcgccggcctctccaacgcctccgtcaacacctggcccaccgtcatgatctccggctcctgcgaccaaaacgacgtcggccgcggcgattttcaagaactcaaccagatcgaagccaccaaacccttcaccaaactctccgtcaaagcctcgcatatctccgaaatcccggcccgcgtggcccaggttctcgattgggcccaatcggcccggcccggtggctgctacttagatctccccaccgacgtcttacatcagaaaagtctccgagtccgaagcagagaaactcttatccgaagcagtaaataaccgaccgatttccaatcctagacatggttttcaacattggtggtgtaagattgaacaaccgtagacgcccctcagacacgcggagaggccgttgatagtgttcggaaaaggagcggcgtatgcacgtgcggagcacgtgcttacgaagctggtgaattcgactgggattccgtttctcccaactccgatgggtaaaggaattttaccagataatcacgagcttgcggctactgcagcaaggtcactcgcgattgggaagtgtgacgtggcgcttgttgttggagcgagactcaactggcttctacacttcggtgagccaccaaaatggtcgaaggacgtgaaattcatcttggtggatgtgagtgaagaggaaattgagctgaggaagcctcatttagggttaattggtgatgctaagcacgtgattgaggttttgaacaaggagattaaggacgatccgttttgcttggggagcacgcatccctgggtggaggcgatttcgaacaaggcgaaggacaatgtggcgaagatggaggttcagctgaagaaggacattgtgccgtttaatttcttgacgcccatgaggattataagggatgccattgcgggtttggggagccctgctcccattgtggtttcggaaggggcgaacaccatggatgtggggaggtctgtgttggttcagactgagccccggacgaggttggatgctggcacgtgggggaccatgggggttggtcttggttactgcattgctgctgcggttgctgagcccgggcggctcgtggttgcagttgaaggagattctggatttgggtttagtgctatggaagttgagacgttggtacggtaccagctgcctgtggtcgtgattgttttcaacaatggtggcgtatatggtggtgaccgtagacacccagaggagatagatggacctcacaaagatgatcctgcccccacagattttgtcccaaatgcaggataccatgctttgatagaagcttttggtggaaagggctatcttgttgggacgcctgatgaactaaagtctgctctttcagaatccttctctgctcggaaaccagccgtagtaaatgttgtgattgatccctatgctggttcagagagtgggaggatgcaacataagaattgattcccattagttgcctaatgctctataacatcctttcacatcattttctttttggtttcaaataatgcaaattgtactcctatggctttttatgcttgaattatctggtgcagcatagccatcacgaaatatatttttaacttcaacatagtaaattctctttaccataagggtttcaatatccttcttatgtggatcaatagtaatttgacatttgtaccttagccacctcaaaaa

SEQ ID NO: 127835 - DNA, 450 bp, Glycine max
  Clone ID: PAT_MRT3847_86439C.1
cccacgcgtccggtttcgcttctcagacacgcggagaggccgttgatcgtgttcggaaaaggagctgcgtatgcacgtgcagagcacgtgctcacaaagctggtgaattccactgggattccttttctcccaactccgatggggaaaggaattttacctgacacccacgcacttgcggctactgcagcaaggtcactagcgattgggaagtgtgatgtggcgcttgtggtgggagcgagactcaactggcttctacacttcggtgaaccaccgaaatggtctaaggacgtgaaattcatcttggtggatgtgagcgaagaggagattgagctgaggaagcctcacttagggttaattggtgatgccaaacacgtgattgaggttttgaacaaggagattaaggacgatccgttttgcttggggagcacgcatccttgggtggaggcgatt

SEQ ID NO: 127836 - DNA, 456 bp, Glycine max
  Clone ID: PAT_MRT3847_86440C.1
tttttatagtttctaatcacttgttacattttaatttgaataaaaagagataacataattgtacataaaacaacataaaactacataaaacaatatagaaaacaatatagaaattttttttagtacatatttatatattttcttaagttttatgttgtgtctttgggatggtgacatgagcttcttacaaccatttatatcaagcaatctcaaggatggtggaagctccggtagagacatgagtttcctgcaaccatctagccgaaggcttgtcagcattgaaaggtttttgatatttgcaggcaagctctcaacattagttccccttaagtataacttttctaaagacaccaagtgaccaattgatgatgacaattcacttatattggtgtaagataagttcaattttgtcattttctctgatgttactgagaattccttgagagatgaacaacc

SEQ ID NO: 127837 - DNA, 426 bp, Glycine max
  Clone ID: PAT_MRT3847_86441C.1
tggctcggaacctttgggctgatttatgtgcttgtttatgtgcttgcatggtcgtgagaagatcatagaagggaagagtagttataaacggaagcctcccttccgacggagacgtcgccgagggtaagaaaactaataccgtaaggaaaggcgaaagtcccctcgcccttaagactcggtaacgtctcaggaaagacaagccgataggtctactagacgtctacccttacaatctcatcgctatcctgatcccgttacggacgaacaaagctagaggcatccgatatacgaagtcagcccgcaccccaatcaaccctatacccctaccgaaggaacttacccgccgtgtattagtaaccttctctatcccgaccccatttccccccaccacccgcagcgatagaatccgcaactgcattacaatac

SEQ ID NO: 127838 - DNA, 253 bp, Glycine max
  Clone ID: PAT_MRT3847_86442C.1
aaacttttctcccttgagatccacatttcttgatcttagtactggcagtcattcctatctgcgtgcattttcatctgctccggtgatatcttttgccattgaaagaggttggactgagtcatcaagtgcaaatgtaagaggcctgccagcattgcctctcagactgccacaattggatgaaaggctcagagctggttataagtcaacaactgccgggaaatttaccgaggctcttaaggcattcaccagtatt

SEQ ID NO: 127839 - DNA, 345 bp, Glycine max
  Clone ID: PAT_MRT3847_86443C.1
ttctcactttcgttccttacaacgtcccctaccattaattgaaacaataatggtcttaaaactggacaagggatcagacaatgagccacaagatgtgcaacccgatgtacaacctcttggacaggcaatcgcccagcataacattaccccttccattcctctatccgagcctcatcaagggttccatctaggatctcatcttacaactcaccgaactccaccgccaccacaccggctttgtcacccgctgtcatcacctaaacgatgaccaatgctctccgcagggctgcaccatggacggctacatgcgccccttcgtgcgcctcatggtgagcctggaaggca

SEQ ID NO: 127840 - DNA, 540 bp, Glycine max
  Clone ID: PAT_MRT3847_86444C.1
aacttaatttaattaaatttttttaaattttttgttgagttcaattttttaaatgaattattttttggacccacgggcttgacattgacaattataaaaaggcactgggaagtattccttttttctttattgtgggtgttaatatagttgggtgaatatatggacaaccggggggccggccaaaaaaatgtcccgcccgcaacgccaaaaaaaaacatttcttaaaaaaaaggagtaaaacaagggggggcaaaagagaggccaaaccccctttgggggggaagggttaactgcccgctttccacccaaaaaaacgggcgggacaaaaaaattaaaaaaccgggccgcccaaagggaagggccacccgctaattggggggggggggggctttctttttttccaagagaaaagaacaagcggggaaggctattaaaaaacaggccccaaaagaggggggggaggggggcaaccggggcccccccgggggtttaattttccccctggggggggggcaacgggggataattcccctcccccgc

SEQ ID NO: 127841 - DNA, 653 bp, Glycine max
  unsure (1)..(653): unsure at all n locations
  Clone ID: PAT_MRT3847_86445C.1
ccacgcgtccgagcgaatgtatgcgacccaaccgttatttaaaagcattggatcatacataattgataatgagttaattaagatatatatagtagctacgtggtgtgatacacaggtggggatcttacgaatgttccagcagtatgcgttgttcgagcagtaccagcaacggttaagtgcagaagtgggagcaacgcagacacaacgaatcgtgaatggtgcactgttcctgatgactctgggtggtaacgacttcgttaacaactattttctcactcctgtctctgccaggtctcgccaattcactgtcccccagtattgtcgttacctcatcaccgagtatcgtaaaattctcatggtaattcaaatttccataaaaagtttttttttctttctctttcaaggtaaaactaacagaaaattaattgtctcttttattagcataactctttgattaagacacatacttccattttcaatggaaagttcaatgggagttataagaaaagcaaatacaagctataggaagatgtatgccactatgtaagtatgtgtaagaaaataaaatacaggagatagttttctggggaaaaaaaggtaaagtgagagagccagattattggcttntgcactttctgaaaacctaccagagc

SEQ ID NO: 127842 - DNA, 277 bp, Glycine max
  unsure (1)..(277): unsure at all n locations
  Clone ID: PAT_MRT3847_86446C.1
gccagcttgtcatcnaagngggggcatcagantgatggaacagtnttcgggcttgatngantagnggcctggtncatatgatggcntgtcggtacaaagttgtgaattaannctaggggacttgaangaaggcnnaantttntgggttcctagaattgagggcanancgtgaggatggtttaacanagnagcgaatacttnaggtttcnaacagtggagggntaaaaggctgntgnaacagcagtacacaatngnctggggncgnctnaaataacca

SEQ ID NO: 127843 - DNA, 1070 bp, Glycine max
  unsure (1)..(1070): unsure at all n locations
  Clone ID: PAT_MRT3847_86447C.1
ggctgcanaagacacagaagggggctttggtctctgggaggagggcagcagaatccctattgaaggatagagccctcactgcagcttaacaatcatgtacttttgtcaaactggggacagtaaagggggtcagaaacaaacgaaacaaaaaaacaatgatgtcatcgtgatggctgcattcttggtgattctccgttcttcgcgtcagtgccttctggaggagttgggtgtggaagtggttatcgctatagctccaatgatgagttcaaacaggcagttagcttcagagagatagaagatgttgcatatttggaggagaagttgggcagggtcattgtcaaagcatgaaaggcaaaggataggattgagcaaacttgttgaggcagagaagcacgcctgaggaacacctatggccacttagatcttactctctttctgaaaagaaattgaaacgcatgtggagttgaagacattcatgatggaacaaactactctaggactgcttgtgtaattgctgttgcgaaggctcgtgacacatttgaatcttttcttcatcagttggggtccagactgttgtatatactcaagagattgcttccgatctctgtttttcttcttcagaaagattgtgaatatctaagtggccatgaggtgttcctcaggcgtgctgcctctgccttcaacaactttgcagaatctactgaaaaatcatgccgtgaaaagttaaccaccacttgtccccatttgctacaaatttgtttctatatggcaaatgaattttataatgaaaaataaataaataaataatcatgaccttaatttgagtatgaggaatatgatgcatagcttagcttttaaaagagtgtaatatatggaattcttgcattatatcatgattttttgttttcatttcatttttttcacagtcgttctttttttatattagggtgcattattctttcccttgatcataaaaaatgaacttgatttataccaaatgtgatgtgataatattgccaaactgaaatttgcaaccatgaatcatatatgtttcatcttcgcattctcat

SEQ ID NO: 127844 - DNA, 506 bp, Glycine max
  Clone ID: PAT_MRT3847_86448C.1
ttccgacactcaacttcgacaccaaacactcttgccaacaaaaaactatttacttaatcttgactgagtgggtccttttaagaaacgtccagatgagtaacgcataggaccttcactgtgaagttttgaaccgtttgttttttatataatatccctaacctccgtgaatgggacaatttgtgtcctacaacgccgtcgcatgccagtttgtgaaggattcagaccacctgtgcgtgaacacatgcaaaaccagatgcatcgacttgattacgccgatagacgtgtattcctacgtcgccgatcaaaacgaaagcaaaaaccgttgaggagaggtcgttactgatgaaaccatccactacattctcctatctacctaactagtgcctggattaagagttacatgttcttatctccgccgatcagaaccgctgataaatcttttgccctggtgtgctatataacgatagacaaactctgacaggctttctctgaacgaccatgaggat

SEQ ID NO: 127845 - DNA, 2005 bp, Glycine max
  Clone ID: PAT_MRT3847_86449C.1
ccacgcgtccggtaattctaaaaatgaaaaaaaaattgagataacaactatacgaaaaagaaaacctttcttctttatagtaattcccatgatgcaatcaaaactcatcattaatgataagtagggacagtaaagggggtcagaaacaaacgaaacaaaaaaacaatgatgtcatcgtgatggctgcattcttggtgattctccgttcttcgcatcagtgccttctggaggagttgggtgtggaagtggttatcgctatagctccaatgatgagttcaaacagtttgcttcagagagatagaagatgttgcatctttggaggagaagttgggcagggcattgtcaaagcaggaaaggagtaggataggcgtgagcaaacttaggctttttctggaagaattactccaaaagaggtatataagtatttataattttgatcattccacttctcgagcatgagtactggactgtgacaaggaaattaagtgacattaatcaagaattgagcacacttgatgaagccaaactgaaggagaaaggaagagccttccatgatatgttcttgaccaagttgtcattgttgcttaaagggacagttgttgcacctcctgataagtttggtgaaacactgcaagacgaacgaattaatggaggtgcatttattggtgctgatggtgttcagttccctcacaagctaatacctaatgcagggatgcgtctttatggtggtgcacaatatcatcgggcaatggctgaatttcgttttttggttggaggaatcaagtgtcccccaattactcgggaagaaattgtaaacgcatgtggagttgaagacattcatgatggaacaaactactctaggactgcttgtgtaattgctgttgcgaaggctcgtgacacatttgaaccttttcttcatcagttggggtccagactgttgtatatactcaagagattgcttccgatctctgtttttcttcttcagaaagatagtgaatatctaagtggccatgaggtgttcctcaggcgtgttgcctctgccttcaacaactttgcagaatctactgaaaaatcatgccgtgaaaaatgtatggaggacttggtaagcaccacaagatatgtttcatggtctctccacaataagagtcgggctgggttacgtcagttcttagattcatttggtggaacagaacattccaatgcttgtaataatcctacagcaactgttctatcacaaacaagtgcacatgagaaagaagacacaaagtcacaaccggatgtaaaactcagccatgtggcctctggcactgattctagttcatccattcagacaacagaaacaaagcttgctgatcttctagatagtacactctggaataggcggcttgcaccttcatctgaaagaattgtttatggcttggtacaacagatatttcatggcattagagaatatttcttggtttccacagaattaaagttcaattgtttccttttgatgcccattgtggacaaattgcctgctcttctccgggaagacctagaatctgcttttcaagatgacctggataatgtttttgacataaccaatctgcagcactcatttgggcagcaaaagagagagacagaaattgaactgaaaaggatcaagaggctcaaagagaaatttagaatgatacatgagcagctaattcaaaatcaaaccatgtgaatatgtgagctgctggaactgctgagtataattttcaaatgaaaaaggcatgaggtttatagatttatgatttttcattttcctatattcgtgcttacataatggcttattgtagaagaaggatgactagatgttcattatgaggactctttgctgtagttaactgaatattttttcctcaaagtctcaagtcagttcctgtgcttgtagaatagattgtgggttagaatttcttattattgaatgttacacatacaaatatctggttttcaagagtttcaagaataattttaagat

SEQ ID NO: 127846 - DNA, 796 bp, Glycine max
  Clone ID: PAT_MRT3847_8644C.1
ctgaggatcatcaagccctgcaaccatgtgttgagcctctccttccccatccggcgcgacgacggctcctgggaggtcatcgaaggctaccgggcccagcacagccagcaccgcacgccctgcaagggaggtatccgttacagcactgacgtgagtgtggatgaagtaaaagcactggcttccttaatgacatacaagtgcgctgtggtcgatgtaccgtttggaggtgctaaagcaggcgttaagatcaaccccaagaactatacagataatgaattagaaaaaattacacggaggttcactatggagctggccaagaagggttttattggtcctggcattgatgtgcctgccccagacatgagcacgggtgagcgggagatgtcctggatcgctgacacctatgccagcaccatagggcactatgatatcaatgcgcatgcctgtgttactgggaaacccatcagtcaaggaggcatccacgggcgcatctccgctactggccggggtgtcttccatggaattgaaaacttcatcaatgaggcttcttacatgagcattttaggaatgacaccaggctttggcgataagacatttgttgttcagggatttggtaatgtgggcctgcactctatgagatatttacatcgttttggtgctaaatgtgttggtgttggagagtctgatgggagtatatggaatccggatgggattgacccaaaagaactggaagacttcaagttgcaacatggatcaattctgggctttcccaagcccaggtctatgaaggaagcat

SEQ ID NO: 127847 - DNA, 740 bp, Glycine max
  unsure (1)..(740): unsure at all n locations
  Clone ID: PAT_MRT3847_86450C.1
tcatcattattcttccgttaaataatcnnncgacaaatatatataaaaacatagatgaaaatgaaggcaactaattgagctaagagcgactacaatctatgtttgaaaatttagaagttaggtgtgtaattttgttgaaggaaccattcgatcactagcttaaccacgaaaaatatgcacctatatagaatctttgaccatcttcaaaccaaccctaaaatccttgcacggcctcaaataggggaaagaagaaacaatatctttgaggggctctccgttgcagtaatgcttgggaggaaaatggtaacaaggctccgatgagaaatctcgttcacatggtggaaaatgggtctcgttattgactagcttgtaaagaagccacggtttcaaattccccaatccctgagcaacgtagccaaaagtagagagagaggtagtcaccaactcgtcagataaacttagcagatacatgtctatccaagctttcatattatgcttattatcattatacttttgatgctcttcatggcttggctgataaacttttatcacttccccactaagtgttggattcttccgatacatcctctttagnttatctccatactctcgatataaagatgccacaagaactgcttttacagtagtctgnnnttttnnnncanaagtttgcaaatnnacttnnnnnagtatcttatgcttcaatgtgcagcttaaaactnnnnnnntgactnnntgct

SEQ ID NO: 127848 - DNA, 537 bp, Glycine max
  Clone ID: PAT_MRT3847_86451C.1
caaaagtcatggaccagaaaggcttatctgtgatggtttttagcacgaatgaatctactaacaaggctgtagtttgtgctggggtgccagagaaaggaggtcaaggtaagctggatgtggcagattggctgagtaatgctttggggcctctaaaagggagatgtggtaaaggaaaaggtggtcttgctacgggtcagggtacagaggcatcacatgtaaacgaagctatggatcttgcagaaaaatttgcgtcgatgaaattgagttaaatggagtatttgcagtatatccttcctggggtgtaagcaatgatatggatctttcgtttggtataatcatacagaagggaagggcacttgaagtaattattagatccgaatgagttgaacaaatttctaatttagtgcctgaatattcttttgatacaaacatgttagtttttggtttatgtatagatcacaaattgttccacaatacagtagcaactgctctgatagattatgaagatattttgaaattttaaactcaccattttcg

SEQ ID NO: 127849 - DNA, 4870 bp, Glycine max
  unsure (1)..(4870): unsure at all n locations
  Clone ID: PAT_MRT3847_86452C.1
tacaagacgacagaagggggttcaaaaccttgagagtttcaagtccaatattttgtacgtcatgctagaaagtgatgcatatgatcccaggtttgagctgtccatttcacttttngatgcatttaagatatggggcttcctgttaaattaggttctgagcatacatgacggcttacgcgtgtatgcctgagccttccttattgcctagcggagcagccaccctgtctcggagccgacaaggttgcgtggagacctcaagcaggatcagctcaaacagcaacaaacgacagagattcttcctcaacacaatcgaaaaaaaaaaagcttccgattctaaaaccagaacaacaaaaaagtaaaacacacacgtcattttaaaacatttcattttttttggttatttatttaaagagcgagtgttgtaacaaatggtgaagccgaagagcgtggagaaacccgcagaggaacaacaacaacgaagatgtttcatcgtgacagaggagtacggaagaggaagtggggggaagtacgtgtcggaaattaggttacccaacagccgtcaaaggatttggttgggttcctatgacagcgccgagaaggcggcacgcgcgttcgacgctgccatgttctgcttacgtggcagcggcgccaaatttaatttcccgagtgacccacccaacatcgccggcggggggaacatgacctcctcccagattcagatcgcggcggcgcgtttcgccaattcggagccccgaaatgagggatcagtcccacccgtggagtctttaacttcggatgaggaaacggcatcgtttccggtcatttcggatacggatacatcatctcctcctctctcagacgtgacgtatccaaaacgactgccgaattagtactgggtcgttccctgatatgttttcggatttcgggtcgggcgattttgtgcccgatttctccgattttccgagcttcgacgatttcagccgggacttcttcttgcatgaacttccgggtttcaatttcggagaagagaacttggatggattgataattcaggactcgttcttgtggaatttctaagcgggtcagggttcggataattttattatatccgaacccgatatcagaatccggatcggatccgggtttgggttgggtcaaattttgcgtgccaagccctccatgtgttagtagttagtgatgattatagttttttttttttaacgtaccaagtagtcaaatgtttcgattttttgggatgcgaatcataattcatttatttgtcatgacttatgtgattaattgtaaagtcgtctgctgaatgatagtgtaatttttttggcctttccgttccaaaaaaaaaaaaaaatgttcgtaaaaaaaaaaaaaattacaaaacagaggttggtggatcggctgagatcacatggaggaagatatatagctctccactgagatatgagaaagatatgctgtctttactggctgtgcatatggtctgacagatgcagacctgaagagcttagaattttgagggagaatacaaattattggaaagtaaaaaagataaattcaacagaacagagaattggaggattttgtccattgactccaaaggaggtgggcatttttcttcatgctcttggttatcccccatctacaccaatatacattgcagcaggagtgatctatggtggtaatactcatctttcagagctctcatcccgcttccctagtataatctttaaggaatcccttgcaactcctgaaaagctgacagatggtgccattgtcatggatgccgatgctacctcagctttgcacaaaaggggcattgtcccaacaaatgatagcttcaaatatgcttggttcaaggaccatgagagtgtggtaaaagcaatatatactggttctgagtttgttgatactgttaacaccggtgatgatattggtgtagttctggagtctacaagcttctatgctgagcaaggtggtcagatttttgatactggatcacttgagggcccacatgctttatttgaagtgcgtaatgttcaagtttatggaggctttgttcttcacattggtaatgggactggtgtctcagttggcgacaaagtagtgtgcaaggttgattatggaagacgcgcccttatagcccctaaccatacctgcacacacatgttaaattttgcccttagggaagtacttggtgatcatgttgaccagaaaggatccattgttcttgctgaaaaattgagatttgacttttctcatggcaagcctattgaagctgacaatttaaggagaattgaatcaattgttaatgagcaaattaaagctgagttggatgtaagtgcaaaagaggcaactcttgctgaagccaagggtatcaatggtttgcgagctgtttttggggaagtctatcctgatcctgttagagttgtgtcaattggacaaaaagttgaggatctccttgctgaccccaagaatgaaaaatggttatctatttcatcagagttatgtggaggtacccatatttcaaacacacgagaggcaaaagcttttgcacttttatctgaggagggaattgcaaaaggaatacgcagaataacagctgttacaactgatcgtgcgtatgacgcaatgaaagtggcagatgaatttgagcagcaagtagatgatgcggctaagttagtaggaactttgctagaagagaaagtttcatcattgaaaagcaatattgaaactttatctattcctgctgccaagaaagctgacatcaagatcaagatagttcgacttcaggatcaagtaagaaaagcacaaaagcaggtcgctgaggaaaacaagcgtaaagctgtaatgattacagcagagaaggctgaacttgctgtttcaaatgggaaaacattttgtatatctcttgttgatgttggtctggatgtagctgcagttcgtgaggctgttacaaaagtcatggaccagaagggcttatctgtgatggtttttagcacggacgaatctacgaacaaggctgtagtgtgtgccggggtgccagagaaaggaggtaaaggtaatctggatgtggcagattggctgagtaatgctttggggcctctaaaagggagatgtggtaaaggaaaaggtggtcttgcaacgggtcagggtacagaggcatcacatgtaaacgaggctatagatctggcagaaaaatttgcgtcgatgaaattgagttaatggtgtatttgcagtatatccttcctggggtgtaagcatgatatggatctttcgtttggtggtataatcataatcatacagaagggaagggcacttgaagtaattattagatccggatgagttgaacaaatttctaatttagtgcctgaatatttttttgctctgatagattatgaagatattttgaaattttaaaatgtccaagctcattcaccgcccgtgcacaccatcaccactgagatccacctctatgtgctcgcaacaacaacgacctagccatcaccaaccatcgcatcatcatgcacaactgcaccgtcttaccctcacatctatctatcttaaaaacactttaaaaatccctcacctatccccacttccataaccattttcttttccaaacccctcaaactaactatatctatccattaagggatattcaatgcaattagcgaatgagagaatgaagagccggtggttcgtgtggcttttggcggtactaggcatcatcggagccacactcttcatagtgagcttgatccaaacctcggagaacaacttcctatgttccataacaagaacgatgcagcagcagcagcagcagttcaccgatggccccacatcgatgcaactcaaagccatcctccactacgcgacctctcagattgtccctcaacaatctctttccgagattacaataaccttcgacgtgctccaaagcctccaccgccccgccaacttcctcgtgtttgggctgggccgcgattctctcatgtgggccagcctcaacccccacggcaccacgctgttcctcgaggaggaccctaaatggttcgggatcgtcaccaaggaggcgccctacctccgggcccacacggtccgttaccggacacagctccgagaagccgacagcctcatgtcctcgtaccgatccgaacccgcgtgttttccggccaccgccacgctccgcggcaacgagcggtgcaaacttgccctacataacctccctgacgaggtttatgagaaggagtgggatttgatcatgatcgacgcgccgaaggggtactttgcggaggcgccggggcgcatggcggcgatattctcggcggcggtgatggcgagggacaggaagggatccggtgtgacgcacgtgttcttgcacgatgtggatcggaaggtggagaaggtttacgcggaggagtttctgtgtaggaagcacttggtcaaaggtgttgggaggctctggcatttcgagattcctccaatgggtaataacactcgtgactacgcacgtttctgttagggttcaggattattacagtattagtattcttttttttaccggtgtagtgaaatacattactggagaagaatagtgagaggagcatatatatctatatgttactacagctttattaaaagaaaaactctagattgcttttgcttttccaatttatgttgtcggttatggatacaaaaaaaaaaggaggaatgggattgtttgtggttgtgggttgcgagattacatgtgatgattccgctgcaatctaccgacactagatgataaccttgtgcattgtgttctcttactttttagacattgtcttcaatggcaaatttgattatttatcgtccc

SEQ ID NO: 127850 - DNA, 363 bp, Glycine max
  Clone ID: PAT_MRT3847_86453C.1
ctggggcaaaaagggggaacacccttattaaaaaccgggccaggggggggggcccccccttagggggtttaaaagactaaaggggggccattggatccaaaaaaggaaccccgccccttccacccccaaaagggggggggggggaaaaaaaaggggggactgggggttttttaccgaaaaacaaaaatggggggcggggcacgggccttaaaaacgggcccccctaagggctccccaaaacaaacaacccgcttggggctttcaagcgaaaatgcccccccaccgctaaggggaactgccccccccggaggaatatcggtctgcccgaaaaggggggaaccaaaaaaacatttgtgggggggg

SEQ ID NO: 127851 - DNA, 362 bp, Glycine max
  Clone ID: PAT_MRT3847_86454C.1
acggctgcgagaagactacacaacggggcctagcgtcacacttcataggctcccatcccatacccatgacaggcgtcccctgggccctctttctccttctcttcttcttctcttcttcactctccaatccccaaaaagcccctctctcactcaaaggtgttgatatccaaaggccggatacagagttctccccttagcgttcttcccagcattacagatcctctaggcgttaacgactctttacgatgcaagctttttctcacttccggcatctcgacagtgaacattggagctactctaattcgtaccatgataccttagctccctccgtttcgatcccccaaaattttcataacaaaatt

SEQ ID NO: 127852 - DNA, 505 bp, Glycine max
  Clone ID: PAT_MRT3847_86455C.1
ggccggcctataagttatttggctgctttgcattcaaattccatttgatgaaacactggcattgcatgcaacgtagggagccaaggcattcaaagtactgccacaggtttccatggcagcactatgcaaaagtcagaactgttcttcaagaattagggtatactgcggtacccctacatggctgtctgagaacagaaatacaaacacctagatctgaaaaaagccatgttcaaggacccttgcattcagctagcagcataggtatcgaaagtcctgatagaactgtacaacaccataaggatacgccgtaattgctctacaaaattactcttggatcatctgctcgaaacctgtacaggacctaaacactgccataaaatctcatccctcgactcttgttaggccccagacactggcacacccaaaccaccaacatgctcataatacttgtccgaacagttggaacaggactgacatggaaagacctccctttcaagtgtcaaaa

SEQ ID NO: 127853 - DNA, 367 bp, Glycine max
  Clone ID: PAT_MRT3847_86456C.1
cgggaagggccccaaaaaaatcaaagggcaccaaaaaacccaccccttatccccttataaaaccgtgccaaccaaaaaagcgccattttttttaaaacccttaactttaaaaaaattttccctttttattaacgaaaaaaccttttaaccttcagactaaaccccgagctttccaccgggccctttaaaaaaatatcccccctttaaaaccaatggagcttttttccctcatcccatagcccttccttgaccattcctttggcggaaagggaacccccctttccaggggggtttccattttcccaaaagcccttatacttcctaccattgggccggtaaaactccccaaaccctgggtttttatttt

SEQ ID NO: 127854 - DNA, 134 bp, Glycine max
  Clone ID: PAT_MRT3847_86457C.1
ttggggggatgtaaaaagggccccggaaaatatttggatgatttagccgccctgccttttaatcgggaagccgcaaaacagatgggagcaaaaaaagtttaaccccgggaaagggccttgcaaaaaattccctt

SEQ ID NO: 127855 - DNA, 279 bp, Glycine max
  Clone ID: PAT_MRT3847_86458C.1
tctcattgaacaacgaaagagaatcgtgcatattattatttagttcaaagtctttatgcttacattattacttttagtaaccataacatgtagtagatgcttgcttaattataaataagcatattatatgaagtctcgcgatcttggatcatcatgcattggcaaagttgacgaggtcagcaaatttgactcgatgcgattgcaatggtgaggtgctaaacgcaacctttgaccttgcaagttctaatgccaccaagttctcttcaatgtgccttgccc

SEQ ID NO: 127856 - DNA, 341 bp, Glycine max
  unsure (1)..(341): unsure at all n locations
  Clone ID: PAT_MRT3847_86459C.1
atccggctcgagctttcacatgacacttctctctttgcgtttaactcacctaccttccagtttgagcggccgccatggcgtctttaccttcgggtcncancaacggtggttccaacggctttgatttgggttccggtgacatcctttattcgtacgacgaggaggactataccaaccacgattcttctaacggcactcacatcgatcccaccaaggattctcatgcatcaaggatgggaagaacatcaatagttcctgctactgcctatagtccgtctgaagattctttgagccaggatgtgattgcaactgtcgagaagagtatgaaaacacatgctgac

SEQ ID NO: 127857 - DNA, 375 bp, Glycine max
  unsure (1)..(375): unsure at all n locations
  Clone ID: PAT_MRT3847_8645C.1
agctaatctcccctgcatcctccactggcgagaacgtgcagcacaacgccaccaccacttccaaggcggcctcatcagattccgagaattttgccgagtcagtgatcaaggggccaaagcaggcctctggggagcacaagaacaaaaggaagatcaaggtgactttctcatcaggtcaagagcagcagaatgcaccatcacaggcagttaggaaatgcttgcactgtgagataaccaagacaccacagtggagggcagggccaatggggccgaaaacactctgcaatgcttgtggcgtgcgctacaagtcaggccggcttttccccgaatcccgccctgcagcaagcccaacattntgcgcggccgtgcactcca

SEQ ID NO: 127858 - DNA, 597 bp, Glycine max
  Clone ID: PAT_MRT3847_86460C.1
cccacgcgtccgcccacgcgtccggccggagaaagaagaggaataatcgaagacgttgaatgagaccgaagaatgtggggagcaacaaaagggttggtgagtggggggatatgttggattgttaccaagtgcatggatacaatcaagaaggttcagcagctatggtgcttgtttgtgatatcggtaatgtagaataagctttgctagatgcaggggttgtgtttttgtatctttgattattatgttgtcctggagatacttgcaaattaggtttaatctttcaacacttaactttgtggacatgctctgagtgcttttgtgcatctatattattcatttgaaccttctgagcttgatcttattgcttacatcagttggcatactatgaaccatggtagcttttggttttgatgcttctggtggatcccttagggtgtgtttggtttgcattttcattttctgttttcattttcggaaaactgttttcattttcaaaagattagaattctgaaaacatgtttggtttaacttcttggtttctgttttcatgaaataaaaatactggaaatttatgatatattgacctttttggctttt

SEQ ID NO: 127859 - DNA, 458 bp, Glycine max
  Clone ID: PAT_MRT3847_86461C.1
acacaaaaggtataactgatctatttatccacacaacccatgttctttcttgtaacaagcataaagccaactgaactagaatcttattaattctcccagaactggataaagattacagcccccaagatggccattgggcgcaaaagcatgcctaacatttataaacacaaaccccgcagatggatatatttctcactaacctgcttacggatttacccctgagcaatagatcatctttgagggacagcccatggccttgtgcctctaggcgtgaagcttgtacaattcacccactgagcatccctttaaacacacaccgcagctccatggtacagcactacccatcactagtatatgttgcggacccctaacccatcttggatgaacccagctcaatcaagactctatatatccaccttagaaggagagtgtgacttcctgacactcttgataccaag

SEQ ID NO: 127860 - DNA, 332 bp, Glycine max
  Clone ID: PAT_MRT3847_86462C.1
ggcttaaactcagcgggtagccccgcctgacctgaggtccccccttgtggcgttttctcacacccgcacccttgtggcgttttctcacacccacacccttgtggcgttttctcacaaccgcacccttgtggcgttttctcacacgcacacccttgtggcgttttctcacacgcgcacccttgtgtcgttttctcgaaagcacacccttgtggcgttttctcacacgcgcacccttgtggcgttttctcacacgcacacccttgtggcgtcttctcacacgcacacccttgtggcgttttctcagacgcacacccttgtgtcgttttctcaca

SEQ ID NO: 127861 - DNA, 557 bp, Glycine max
  Clone ID: PAT_MRT3847_86463C.1
ccacgcgtccgcctctctgcatcacatcacatacatcatctctctccttttgacctaaatcaccttctgctcattccgcgcattttctgtgacgaattacacccaaattgtacttacctttctaaactcaatggtgctttggaattcgttgattttcaggcggtgaattgtcgatcaagaggtttcgattgacattgctcgtaattttggtattgcaattaggagtgcggtgttgattgcaaaggtgcactgcatgttcgattgttgaggagagggggtcctctgttccgaggattcccgtcgttggttgttcagattcgtggctctgttgttcgaagtttaagagttgctctgaattttaggtgttgaattttgttggggaaatgtttgcttctgttgtggatggggcttgtgaggggagtggagtttcaggacccattttgattccacggcgctttgtttggccttatgggggaacaacggtgtttctaactggttctttcacgagatggtcgaaccatatagctatgtctccgatggagggatgccctgctgtg

SEQ ID NO: 127862 - DNA, 481 bp, Glycine max
  Clone ID: PAT_MRT3847_86464C.1
ccgcagcaatttttttttttttttttttttaaaacctctcaatttccaccaatgcattgagatgccaacaaagaatgctttgatattcataaaaataataatataggataatcaattttttggcaatactatgctacaatttgattgctcactaaatcaaaaaactgacatcaatgggcaattacaaggtcccattgcatgtactatgacattttagattgtagaacctacgtgctgggtgatgatttgcactggcaagctaataccaattaactaattatcttttgaagcaagtgtagcttttaatccgtacttggagaaaacctcacttaatacagctttctccctgatctttaaccttcttgaggatccaggaacatctaaaacctttttttggttttctctttgggaaaattgggtttttattacgggcattctactgtttaaccttggcagacgacttctgcacaggtgcggggtt

SEQ ID NO: 127863 - DNA, 554 bp, Glycine max
  Clone ID: PAT_MRT3847_86465C.1
ctttgttgagtttaaaaacatgttgatgaagggtttcattttcaaatccaggcggttgttcaacataaacttccttttggattaagccatttagaaatgcactttttacatccatttgatacaacttcatattactataggttgcaaatgaaagtaagatgcatattacttctaaacgtgcaacaagtgcaaaggtttttgggtagtctataccttcctgttgtgagtaacctttagcaactaatcttgctttgtatctcacaaccttaccatcctcgtctagtttgttacaaaatatccatttcactccaactaccttctttctttttggtaatttaacgagcttctagacattattcttttgaaactgatcaagttcttcttgcatcgctttcattagttgtcatctttaattgcctcatcgatgtgtttgggcttcatctcaaagatcagtgcagtgtgtccttgtgtttttaatgacagtctagtttgaacacggtatgttggatcacctatgatttgactttctggatggctccttcttataatgcatc

SEQ ID NO: 127864 - DNA, 253 bp, Glycine max
  Clone ID: PAT_MRT3847_86466C.1
gtccgattcccgctcgaccaccgtccgggcctcttgttctccaactacacaaggccgacacgaaaaacgaagaaaagccgtgccagaaccacgacacgcaagttatggcaaaaatcgcgattctcctggcgggatcctccgccaccacaaccaaaactgctgtcgccggagatcttgtctcttcgacatcaccacgggtagagggggagggaggaaggaggggggagggaagaatagagaccgtatgagcgac

SEQ ID NO: 127865 - DNA, 1450 bp, Glycine max
  unsure (1)..(1450): unsure at all n locations
  Clone ID: PAT_MRT3847_86467C.1
ctcgagcgacgcgattttccttctctcccgtcattttcccgagaaaatcagaagaggggtggatgatgagaggttgagacgctgatcactcactcgaagacgatggtgagttcgatccgcgatggaaccaagccagattctatcattgcggaccaccacaactgatcctgatcatgtgaaggtcattcagtgggacgacttccagcacgatcttgcaaggttggccagtctctcttccgcgctccacgaagccaacgagaagaagcggaatcttcagtacaagctcgagcccctaattcaggtcaatgctgaatcattgggtcggttgaatgaacttgaggagatgcgtcaaaaattggaatcaaagaaaatggtgatggagaatatgtctatacgttctaggctggctaaggaggaagctagcaagcaggaggagcagcttagtggtgcagtgcaatcacttttggtggcagggggtgctctttctgtaaccagcagaaatctccaggaatcaaatagattactgtctgaagaaaatggttatgttcatctgagaaaattgcaaaagatgctcaggaagaggcaacaatacatgacatctcaaatttcaatgctctatcctgttaagatcgtggttggaccagcacaagagcaagagcttgaagcatatcctttaggtagcctgacagggacttctgctggactaaaaccaattaatcaaggatccttaacaattcatggtctgcatttgaatgtgctatcttttcggaagatgagctntntcactngataaaagggaaattcaaattctgctacagccctaggatatgttgcacatgctgtttcacttatagcctcatacttgcaagttcctttgcgatatcctttacggttgggtacttctcattcatatattattgataatgcaccttcaactgagctaacatcgtctgaagcttcatcaaatgcaaacataaatgccaaacatgtggaattccctctttttttagaaggtcaagacaccacaagagcagcttatgctgttttcttactaaataaggatttagaacagcttttgaatttcattgatgccaagagtttgggaccacgccatgtattggctaatttgagggagcttttaagaactatcctgtcttcagcttttatagacaacttgatctagtagtatttttctctactgtaacttccttgtaaattgattttttttttttttaattcttgtccgggtgcaatttttttggtgcaccttgcattttagcattgtgatcaaaatggagtcaaactttatataatggatttggtattctttgaaaaaagagagtatacactgtcgaaaatatattgttctttgagaagaacataaatgccataaattcctgcaaggatattatgtataaggcaacttttggagaaatacatacattttgcg

SEQ ID NO: 127866 - DNA, 390 bp, Glycine max
  Clone ID: PAT_MRT3847_86468C.1
tcacgctatagcactgctatagtggtgttgcagagtgtcatgtctatgggctgctccatggaagcctgccatgtcgcaactcaccgtcgtgcctggagtgacatgaattgcgactgctattgcatcaaagacgaaatccccttgaacaatgtcatttggtgcatctaacccagagctctcaactgcattgctggccaaaccatggcactctggagtttccggccaacccacaagctgtggaactctggcacaccattctgtggtctctaccttgttcacatcctttgcagtcatctgacccaaagctctcaactgtgtttccagccaactaacaatctgtggaactcttgttctgtggtctctactcacatcctttggggtctgttccat

SEQ ID NO: 127867 - DNA, 2333 bp, Glycine max
  unsure (1)..(2333): unsure at all n locations
  Clone ID: PAT_MRT3847_86469C.1
atggaaccaccaagttatactgccttcttgtgcactaccacaacagatcaggagagggtgaaaagctttaagcgtgaatccctcacgcacgaacttgaaacgttggtgagtttctctccgggatgcaaccacccagactgaatgactcagaaccgacaacaccgactcatctccctcatgggaaagtcagtgggacggccgacttccagcactagcgagtatgggctgggtttctctctcgtgccccgtacgatgcttaagtgcaaaagctcatggctgaaggaaatcgaattggggtggggagatgaatgctttattatccccattgtgttttcggattgtggtttttaagttggtaaccaagatgcttgagaatttgaccgctgtttagtgatgtatagtctgtcccgctatagcagtgatctagtggtgatgaagagcgtcatgtctatgggctgctccatggaagcctgccatgtcgcaactcaccgtcgtgcctggagtgacatgaattgcgactgctattgcatcaaagacgaaatccccttgaacaatagctctcaactgcattgctggccaaaccatggcactctggagtttccggccaacccacaagctgtggaactctggcacaccattctgtggtctctaccttgttcacatcctttgcagtctgttctgttcacatcaaaaggggtggcctcttctctcttcgatgttaaccatctgacccaaagctctcaactgtgtttccagccaactaacaatctgtggaactcttgttctgtggtctctactcacatcctttggggtctgttccattcaattcaaagaggggtcaatgctgaatcattgggtcggttgaatgaacttgaggagatgcgtcagaaattggaatcaaagaaaatgttgatggagaatatgtctatatgttctaggctggcaaaggaggaagctagcaagcaggaggagcagcttagtggtgcagtgcaatctcttttggtgtcagggggtgctctttctgtaaccagcagaaatctccaggaatcaagtagattactgtctgaagaaaatggttatgttcatctgagaaaattgcaaaagatgctcaggaagaggcaacaatatatgacatctcaaatttcaatgctctatcctgttaagatcttggttgggccagcacaagagcaagagcttgaagcatatcctttaggtagcctggcagggacttctgctggacttaaaccaattaatcaaggatccttaacaattcatggtctgcatttgaatgtgctatcttttaggaagatgagctttttcactgataaaaaggaaattcagaattctgctacagccctaggatatgttgcacatgctgtttcacttatagcctcatacttgcaagttcctttgcgatatcctttacggttgggtgcttctcattcatatattattgacaatgcaccttcaacagagctaacatcgtctgaagcttcatcaaatgcaaacataaatgccaaacatgtgaaatttcccctttttttagaaggtcaagacacaacaagagcagcttatgctgttttcttactaaataaggtccctgctgttttcgcactgctgcaggtgatcctgttcccaaaattgagtagcaagattaacacttatattgacaggcttttggttttgcattggtgttggctggatttagaacagcttttgaatttcattgatgccaagactttggggccacgccatgtattggctaatttgagggagcttttaaggactatccagtcttcagcttttatagacaacttgatctaataattttctctactgtaagtctgtaacttccttgtaaatttgattcttttcttttaattcttgtccgggtgcaatttttttggtgcaccttccaatgtagcattttttttatcaaaatggagtcaaactttctataatggatttggtattctttcaaaaaaaaaaatagagtatagaccgctgctgaaaatattgttctttgagaagaacataaaatgtcgtgcattcctgcaaggatatcatgtataagacaacttttggagaaattcatacattttgcgaaatcaaaaaaaaaaaaaaaaaaaaaaaaaaaaaaaaaaaaaaaaaaaaaaaaaaaaaaaaaaaaaaaaaaaaaaaaaaaaaaaaaaaaaaaaaaaaaaaaaaaaaaaaaaaaaaaaaaaaaaaaaaaaaaaaaaaaaaaaaaaanggggggggcccttttaaaagaaccaaatttaaaaaccggggggtggaaaagaaaaattttttttatggggccccaaaattaa

SEQ ID NO: 127868 - DNA, 125 bp, Glycine max
  unsure (1)..(125): unsure at all n locations
  Clone ID: PAT_MRT3847_8646C.1
gtagaatccaaaacactaaactccaacacgtatataatagaatgatccgaaacacaganaggtcggatcgccgggtactaacctggtcggtggttcacccatgcgataacatcgctctctctacc

SEQ ID NO: 127869 - DNA, 225 bp, Glycine max
  unsure (1)..(225): unsure at all n locations
  Clone ID: PAT_MRT3847_86470C.1
tncacaccnaanncagcgnangtaagctnggaattcggctcgagggctaatnntatnactancananntcacnncnctcaagnacgncagnnancncganncaatngntancgcnnatngatnacngnnntaccctnnagngnncncgcatggcangngaccnntcagannagnccnagccgtnacgnncgcgcanncacnnnannaccantccgancangcagn

SEQ ID NO: 127870 - DNA, 363 bp, Glycine max
  Clone ID: PAT_MRT3847_86471C.1
cctgaatgcctataagtggagacctctgcgagagcagagtgaggcctacgcaagaggtaggcacaggttctacaccacaccattatatctacgtgcaagtcaaagccggctttcatacgagttacaaacatcagcgaacttccgcataaattgtcttgtcttaccacattattactgtatgaggaacagaatagtccacgatggcacagaagagatacatcatcaacgtcgcgaacgcgcacgatgccagctactgaaggccttacacaggacctagctatcgtagcacttttgtcaaggatggaatgtctgatcctattgacgtgatcaatagctgctgggacgtttatcgacagtctgttg

SEQ ID NO: 127871 - DNA, 342 bp, Glycine max
  Clone ID: PAT_MRT3847_86472C.1
ggctcgagagatcacggccacattactttctcagtagcctagttcaaacccaagctgtccatgggttttgtaggacccttggctgcatgaaggccagttacgatgctggaactaattggctggttcatggaacgaactaaggtatatttgaagacttttggccccagggacgaacacgttaacgatagaaatggagcctggacttgaaggctggaatgctagagtgtctacaaggctttggaggagctgggcaacactactgggaactgaatctggcagggtttaaatgccccattaccatactgcccttgttaaagcaagtctatcacaacatgtgtggat

SEQ ID NO: 127872 - DNA, 954 bp, Glycine max
  unsure (1)..(954): unsure at all n locations
  Clone ID: PAT_MRT3847_86473C.1
aattctgtattgttcaaaaattgtctggtctaaagacctttctgcatgtttcttctgttttctgccaatccttgatcgggaattatcgttctttttttatgcgttctcccactctttcattgggaattttctttgtgttgtgtgtcttctccctttcttggattgggaattttcttttccttgtgtgtcttctcccactcttggattgggaattttccttctctttgtgttttcttccgagggcaaggattgacattctcaccctgggtcaaggtttatggtaagctgggattttggctcaaggcttgtagaacgattggtcatgatatatgtcagggtttggccagcggttcggggataaaggggatgtcctacattatttccatgatacacatgcaacaatgatgattaggaaattttatgcaaaactggtcatgcatgcacccatgtggacactcaagcatcaagtttttatggtcgtgtgacactagggctcaggattcattttccctattttaagtcaacccagtgtttccaaaatatgttcttttatcaaatcatgcattcatccgagtccattttgggcgttcggaaaattttcacaacattcactcttcaggtgtatacacattttttttcaaaaactggttaagatcagtaaaatctttcaaagaaaagttggaaattatctttttcacaagcatgttgttttttagctagacaaattttttttattatttttttttattttctattttttttcttcttattcttttcttgctcactctctttttgctctcttttttttccatgaggtattttgctacctaaacatacgtatatttttgtgaggtattttgctatatacatgcatgtcctaggcatcttgctacatgtatgcaatcatatatgttatcatttccttaattntctttgcagctttgtcaactaggg

SEQ ID NO: 127873 - DNA, 961 bp, Glycine max
  Clone ID: PAT_MRT3847_86474C.1
tgcggctcgagcagagacagagagtgcttacgcagttttcactcactgtttcagtagtagggtttttctttatccccttttttcttctctcttctctctttcgttcaccacttcgacgctaagctaatatttcattcgttttcgtgaacgcgctaacggagaacgatttcggttatagagagagaaactaggagagatagagagcgattgatcatatatggatacgcacgcggtgcatttggccttggcggcgatcgtcggagcctccgtcgtggccgtgtcggcgtattacatgcaccgcaagacgctcgcgcagctgctggagttcgcgcgcacggtcgagagggaggctgacggcggcggcggttccgacaccgaaccgcctacggcgcatttgaagaagcgccttggcagctccaggaggcgtggcaacggcggatatcggcgtggctccgcgtcgctgccggacgtcacggcgatctccggcgggttcgacggggaagagaagcggaacgggccagtgcacgtcgacgggattcctgtggggttgccaaggttgcacacgcttcgtgaaggaaaatcatctcaatctggttcctttaagagaagtcttttaagaccaacttctcccaagtcccctgttgcaagtgccagtgcctttgaaagtgtagaaggatcagacgatgaagataacatgacaggcgaagttaaactggatactacgtatctgcacacaaatgggactgttgtgccagaaggtaaaatcccatttgagactttacccaatcatgttaatgctaacggagagcagatggcaattactccaagtatgatccgctctcatagtgtttccggtgacctgcatggtgtgcagcctgacccaatagctgctgacattctgaggaaagagccagagcatgaaactttcacaagattgagaataactcctcttgaggctccg

SEQ ID NO: 127874 - DNA, 380 bp, Glycine max
  Clone ID: PAT_MRT3847_86475C.1
cctcacaagaacagaacagaaccaccagtgcttttcaaagacggtgagatctcaacttcctttcaattttcttatttacatcataatttcactgttgatctctgaaagcttctttggctcgatttttttttcctcgcaacctcttgctattggctatgtagcggggggtgttttttctccttggttattatttatactgtgaaagatttgatttttaaggtccgcaacagatctttttgtttaaaatacaagagagtattctcaattgtgtttctgaatactttattatgcctttctggcttgtgggctctttgcttaaaattgtttggcctatatattgcgcatatgaacatatattaagcataaatagagttttgctg

SEQ ID NO: 127875 - DNA, 954 bp, Glycine max
  Clone ID: PAT_MRT3847_86476C.1
ataatacggctgcgagaagacgacagaaggggtaatgatagaattcatgtcatttaaagttatatctgttgcttgaattaggaagttgaaacttggatacctgtacatatcaatttagacttccatctaaagtagtagggactgcttgttttggctgaaagtgtgaaaacctatattgaacaagttgaaattttggaagaaaaaatcatctaatgcttgataaaataaaattgagaaatggttgaaaatggtatatatcccttttttcattttccaccctctcatgaccagagtgaaactcaacctcacaatattagtcttcattttacgtcttcccactaagcacactcttgatcttatttcttatctaagctccccagtcctaacaagacatgtgatatgtagggaagaggcactccaaaataagcgcttataaaaatacaaccaatcccttccagcttgacagtcctgacaagacatgcatgatatgttttaagctggaccaaacagaggcaaactcattccttgttcaaaaaaagagttatgttcctgagggtcctttcataatcaggggattcttataattccttgcagcctcggctgaagagtgattgcaggtgcatttttgtggccaaggattttactccattatggggttcagtggaagttctttatgagggaagggcaagttgatcaaggttttagttttgttcagcttcctcatgtttagtgtcaaatatgggggatggggtgattttgctaacatgtaagaatactttcttttttctttgtgtagcatgcagcaggttctctttcctctcccataagtacagggtattggctggtcataaaactgtaaattgccttttattttagtaacatttctggtgaagaggatttttctttctgtagcgtgtcctcatatcaaaataaaaaaatcaaccacttttcttt

SEQ ID NO: 127876 - DNA, 274 bp, Glycine max
  Clone ID: PAT_MRT3847_86477C.1
ggctcgagcaataacaatattattcttctttttctttcattttcaaacctacctgcatccgggtacagtaaccatatcatggcatcagaagcaaatgctgcccacaccaactgttgggtccatgttatctacactggctacattatcgctaatgacccctccaactggggtgcggctgctgaagctatgtcttggagccacctactctaggtcacgctcatgctaaaggagtaccggagggccttatggctgctccggggacagaccctgacca

SEQ ID NO: 127877 - DNA, 223 bp, Glycine max
  Clone ID: PAT_MRT3847_86478C.1
ggagggtacgtatacatgcatgcagcgtactagcgcgtgctatggtgcgacctaaatttaatatcactggccgtagatttacaacattgggactgggaaaacaatggcgtgaccgaactaaatcggcttgcaccacatttaactgtcgttcagctggagtaatagtcgaagaggctcgcacagatcggaataggcaacaatggacagcccgaatggcgaatgg

SEQ ID NO: 127878 - DNA, 386 bp, Glycine max
  Clone ID: PAT_MRT3847_86479C.1
tttcggactttcctttggtgatttttgaaagcttttgtacccaccgtcacgccatcgccgcacaaggttcaggcctccgtcaccgccatcctttcacgtcacgcacaaggtcgtcataaatgaggtgagagtgttggagaatttgtcggcgacaaaagcatagagaaccttgacattagagaaagagcaagccattggtgattcaaattggtggaagctaactagctagggtgttcagctgcggaaagcttgttccttaattagaagtgacatgaacgaacaagatctccacagaagaacgaagatcactaattgtaatgtacaagattgaaactccaagtctatcaaatctcgaattagttatatgaagagcatcatacattatt

SEQ ID NO: 127879 - DNA, 160 bp, Glycine max
  Clone ID: PAT_MRT3847_8647C.1
tcttactgctgctagataacaccagaaggtaacactcccttttgaaaaccgtctttgggtgactgtggtaaaaccaaccaaacccttttcctattctcaatccaactatctattgcttcaatagcaatctccatttacaactctttgccaatgctccttt

SEQ ID NO: 127880 - DNA, 1522 bp, Glycine max
  Clone ID: PAT_MRT3847_86480C.1
ccacgcgtccgctttggtactggtgaagatccttggcctatattcaagttacaaaaggagttcaatgccccaggaaaatcaccacctttgtcagctgaattttacaccgggtggcttacacactggggagagaaaaatgctcagactgatgctgattttacagcagctgctcttgaaaaaattttgcaaaaaaatggttctgcagttctctatatggcccatggtgggacaaactttggattttataatggagcaaatactggtgtagatgaggctgactacaaacctgatctcacttcatacgattatgatgcaccaattagggaatctggtgacgttgacaattcaaaattcaatgctattcgaagggttatagccagatatagctcagtacctcttccatctattccctctaataatgaaaaggcaagatacggaccaattcacttacaaagagaggctttcgtatttgacatgtttgatttcaccaattccaccaatgtgtttaaatctgaaaccccaatgtcaatggagtatgtgggccagttgtttggtttcgtattgcatgtcactgaatacaaagcaaagagaggtggaagaattttgttcataccaaagttacatgacagagctcaagtatttatttcatgcccctctgaagaaagtggtgcaaggccaacttacattggaactattgaaaggtggttaaataacaaagtaactcttccggatattaaatgccattctaagatcaacttatttattctggttgaaaacatgggtcgtgtaaattacgggtctttcatctttgataggaagggcattctgtcttctgtttatctggacaaggaacaagtaaaagggtggaaaatgttccctattcctttgcacaacctgaatgaaatgtcaacctacaatcccatcacgcaagttgcatattctgcattcagtggcatatcatcattcagaaaaaagttgatttataagaatgggaatacttcaaaagaacctgctttttattcgggccacttcttaattgataaatcaagtcaggtcaaggatacatttatatcattcaacaattggggaaaaggcattgtgtttgttaatgacttcaatataggaagatattggccgttgagaggaccacagtgcaacctctacgttcctgctccactccttaaacaaggagataactttttggtaatactagagttggaatctccagaccccgaacttgtggtgcacacagtggatgagccagacttcacatgtggctctagtgggacgagtctccatcagctgtaataaattgtcataaaaatatgcttgacctttgaaaatacatgtaagaatttggaggttatcgaatgactatcaagtcattatgcttgtaaatattaactatggttattattgctctttaatttttagctacaattctgcacaaaagaaaaacctcaccattacaatttaaatctttttacattaaagtaactcatagcacttgcctctaagagac

SEQ ID NO: 127881 - DNA, 251 bp, Glycine max
  Clone ID: PAT_MRT3847_86481C.1
ctgtcatgtgataatacttgagctaaaaccaggtgatctcttagcatctttcttggattttgtgattaaagataatgaaaaaaatttagctcttgatttttttttaaaaggagctcttgaatcttgatagccagacacaattttaactactatcattttcgtagacgggaagcctcaatgaacatcgtcgtctacatttaatagattttgttaaatataactttaaagtacttattgaaaaaaatattaat

SEQ ID NO: 127882 - DNA, 329 bp, Glycine max
  Clone ID: PAT_MRT3847_86482C.1
ggtactttcggacccattccacctctacaaacagcccatagtcaaactgagccatggtcacaatcataccaggactcgtgcagtgtctcgggttgttagggcatctacaaagaatccgacaaacctattttttgatggtggaagatcttcaaccaaatcaaatgaatcgtaataatacgtcgctacgtaaaatatgtaatgcacaatcaagacttacaacttgatctggcaaatcacacacacttcatcgcagatttaacctgtgaggtacggagagcactaccacaccaatagctccttgacacattcttttgcgcatagggcacttt

SEQ ID NO: 127883 - DNA, 316 bp, Glycine max
  Clone ID: PAT_MRT3847_86483C.1
ccacgcgcccgctctgtttcaaagaaaagctgttgactcttacttggcatccatcgaaactcgattatccgctttccgtggtccttttcggtttctgattcacccctatgacttgtttcagcttgcctgaccttaccactagcgtcggaagcatctactgcctggaatcgtgttgaaccatttgccgactttaagtagattcgaacaagagctctctgcgctgtgccctgattttgcttcagattttacttgtatagctcgagctgtttccttattttgttgaagggcagtaaacgttgcctgccttccacaactt

SEQ ID NO: 127884 - DNA, 554 bp, Glycine max
  Clone ID: PAT_MRT3847_86484C.1
ccacgcgtcgttctgaatctcgcgcccgtttcgcttcttccacttccccagggaattggattttgattttgattatatgccgaaagggttgcggaattttcaagaagtttgaaggttcgttcatgcatgaggggttctgaaagtttccttgggaattttcgatggcgatattgcccctgggagggcctcagccgccgggaatttcttgaccgcaacgttggatgggatgacgttcgcgtcggatggcccttctgcccaagctgtagttttcggagcccttatggggggccattggttaatcgaagggttttggctgggggccatcctttccttgttttaccaaaaaacctccaaccctcctaaagggcctttaccaaataaggaattggaggagttttggaacaaaggggtcccaaaccccctaattcctttggttattaagaggtgccggatgaaccacccatgccgggaagggctgctgggccacataccctaattaatggggaagaaggtggcaattttgctttaaccaactatcttggggttatagggca

SEQ ID NO: 127885 - DNA, 261 bp, Glycine max
  Clone ID: PAT_MRT3847_86485C.1
ggtgctacaaggcgtgtaaagtacttgccttagagaattgagtgtatgttttgcaagcgggggatatccaacaagagggggtgaactaggtggggggggggggattctatctgatgatcactataatgggggagctactcattaatagacatatgtgtttgcataattcgataatgataatgacattcattaatacatgcttaaagatttatatgatatagctactgatgaacatgctaattccatgcacaatggtttatg

SEQ ID NO: 127886 - DNA, 346 bp, Glycine max
  Clone ID: PAT_MRT3847_86486C.1
cttccccgccgccgccatgtacatgatcactatgcgcccttcctcggaccacccctcccgccccgatgccctccgaagcaaccgccgcaacggcggcgaccgctcccccttcaaccccgccatcgtcctccgcggcggcgcagccactgcggaggatgaaagtcggggaattgaactctattacgacgacagccccttctccggccaccgacccacaccacctagcatgaaagagttcctcctcgaaactggcctcgacagacacttggaacaactctcctacatcgagatcaaccatattgaacagaaaaaacaccctcctgctcccacaccgccattagaccct

SEQ ID NO: 127887 - DNA, 324 bp, Glycine max
  unsure (1)..(324): unsure at all n locations
  Clone ID: PAT_MRT3847_86487C.1
aaaaaataaactagggtcctctagagagggcgcgnngggccttttttttttttttttttttttttttagaaaaaaacaatatttttttggggcctcccctgcgggttttttataaacacactctcccgacactctctctaagaggaaagcgcatgtgtaagagaaaatgtttcccgccaaagcctggaaaccttgaaacttgttcattgtgcgcttcctaacccaaggaagagcccttatttttcggacttgcgcggatggggaaatgttctggtttgggcacgggggcggtgggaggctgtgtgtgagcccttcgggggagga

SEQ ID NO: 127888 - DNA, 516 bp, Glycine max
  Clone ID: PAT_MRT3847_86488C.1
aaacaaacacgaaattaatttattaagcacaattaaaaaaaggccttcggaaaacacaggaaaaacaaaaggatttaaattcccagaaacccagggaacaggaggggaattaaaccaaccccgggcaaaacgggaagcgaaaaccccccacccccgggacaaaacggggaaaaaaaacaaaaacaaggggggaaagacccatctggagctcccattaaaggggggggaggaaaaatgggaggcggaaaagaagggggacccaaaaaaaacccattcttgggaaggggagggggctgaaaaaaaaaaaaatccggaaggggaaacttgacaggggggcaaaagggaaaaaccggaagagtttccgacggggccaccggaccaaatccgtaatcaaaagagagaaagaggggagggggaacaagaatctgcacaaaaaaaaggggggggggacccattatttttttgggaaacttttggggggggaacccggggggggtatataagcccaaagggggg

SEQ ID NO: 127889 - DNA, 388 bp, Glycine max
  Clone ID: PAT_MRT3847_86489C.1
tttttttttttttttttttgggaacaagggcagaagattttttaaagccggttagaaaaaacaacctaaggaccgggaggggcttaggggacttacccccctaacataaaggggccttaacaaacctaggttatgcttctttttgaataaggcattttagcttaccttattaaattttaattgggaccaacttttacttaattgttgaaaaaagggaagggtcttcttaatggggttcctgggaataggaagcttaaagggcccggttttggcttttggggctccaaagaaaacggttcattgggctccaaagaattcaacaattcttttttcctggcttaacaaaattttttttaatggtgaattggatgaaaaggcatttggaagg

SEQ ID NO: 127890 - DNA, 826 bp, Glycine max
  Clone ID: PAT_MRT3847_8648C.1
ccacgcgtccgcaatcttctccaattaacctcctctctcactattccatcttcttaattactcatcactcttcttagaaactagtctaacaattaggttttgaagggcacacaaatatattccaaggttgtgtgaaaatgcgaatgagttgtaacggatgtcgtgttttgcgcaaagggtgtagcgaagattgtagcataagaccgtgtttgcaatggatcaagaacccggagtcgcaagctaatgccactgtgtttcttgctaagttctatggccgtgctggcctcatgaacctcatcaacgctggtcctgaaaaccttcgtcctgctatttttcgatccttgttatacgaggcatgcggtcgaattgttaacccaatttacgggtcaggtttattttctcggttgcatgtttaatttttttggagcaaaacttaaatataattctttgggaatttttggtgttattttctgagaatttgagttttactttactgatttgcaaaacaaaacttttaatttaatttgtttaggtaaaataaaattcgattttaattgaaaaacgtacatgcaattgtcttatactatagtactatctcttaaaaaatttaaaagagtaatagcaaatttttttagccaaggctaaaaattcactttttttaaaaaaattaatttggttttataatttaaaaaattatcttttaaaatgttactacgacgtaatatctcattaatattggcatgttttgatataataaactgatacaacagccacatttattttaaccaaaattacttatgagaattaaggtttttgtaattttaag

SEQ ID NO: 127891 - DNA, 3879 bp, Glycine max
  Clone ID: PAT_MRT3847_86490C.1
gttaaaaaagtatcttgctgacatttcttttcttctcgtagattaagaaggaacaagcagcagtagcctagctagccaagagtgaaattaaaccggtgagaattgaaattgagatcaaattcccaaggaatcggtaatttagctagaataagtctgctgcaattactagccagcatggggaaactaacaagtgcgtgaagaaaaggaaaactgaattaacaaatgagtaccactgcatcatcacttttcctttccttaaacactgccagacatatatataacatgtcaaaaaggctctgagatgatgacggagcgagcatgcagggatatatggctacatagtctattagttaaggacttataaaaaaagaccatgaaatgaaatcagatgaattaagctgttgggaatggcagcgcaataagtgggccaagggaatagggcaccccagaccctaggatccaagaatcacgctcagtcgaattagcgatctgaaagaatttgcctgggtagtattcaacagcctcaataggattaagaaccttaaaaccaggccaggtgattctaccaatagtgttagcaccaggacccctgttgttgaactcgtagtaggtgcttgtgtccttgaaagcacttcccatccacgccatgtacccttcgggaacaaagatgtcgtcgatttgggagtccatgatgacaaccttggcgtaaagcctccatggtcttcccaagtaagcaatcttgggggtcaaggcaagcacgttgggttcgccggtgaatacgcagctctggaagacgagtgcgctggggctatcgatcttggaccttccaccggcggtgaccaggcattgctggttttccaggggcatcctcacgatgaacttgcagttctggaacaccgccacggcgtcgccgaacacgaagtcgatggtgcccgtcacggtacagtcgcggtagaactgacgctgggattgcgtgtagagggtgtcctggaacccgtccatgttgcagttgtagaacactgccttgtctgctgttaccctcagggccacggcttggtgcttctcagctccagctgtgttctcgaacccaatgttcttcgccatgaagttagcagcgttcacaccgaaggttgcggtgttgtaagtttggacgccatcgacgtagtttttgctgccggtgattctggtcttggtggggccatctccgatcatggtgacataggtcaagtgcttgttcatgataatatactcattgtagataccggccttgatgtaaatcacaaaaggcttcttgttcttcttaggaaccaatttaagagcctcgtggattgtcttcacctgtccactcccatcctgagccacaaccacgtcgggtttggggtccacagcctgaagaagcctcctctgtccttcactcacccacgtagggaacccatccaccaaagccgtttcctccgagagaagcttcctgttgctgttgacgctgaaggaactcaagttaagacccttgaagagactcgaaacaccgttgactatgtccaacgcgttgttgctgagctccaaagacgcgttcagaaccttagccatggtctttccagcctcgctgctcgtgttctcgaacccatccaaacatgtctgctggtgagctagagtacccgcgatccagaccttgaggtcataggcgtaatcgttcaacttgtttaggtcgaacttttccaacgtgtgaacggatcggcgaatgtcgtcgacagcgtaacctagtacctccttgcagatgtccgtggcctgttttgtcatgtggtcggtggcgagttcatggtagagcgtcgagtttttgatttggttcgcgatctcttcggccgtggcgttgaacgcggttatgatgagctccttcagatcgcggaatacaaagaaacatgccacaagagtctggccaaagcctccggaaccagcgatctgaaggagctcatcataaccgcgttcaacgccacggccgaagagatcgcaaagcaaataaaaaactcgacgctctaccatgaacttgccaccgacgacatgaccaaacaggccatggacatctgcaaggaagttctaggttacgctgtcgatgacatgcaccaatccgttcgcaagttggaagagtttgaactaaacaagttgaacgattacgcctatgatctcaaggtctggatcgccggtactctcgctcaccaacagacatgtttggatgggttcgagaacacgaccaacgaggctggcaagaccatggctagggttctcaacacttctttggagctcagcaacaacgcattggacatagtgaacggtgtatcgaatctcttcaagggtcttaacttgagttccttcagcaacaacaacaacaggaagcttctatcggaggtagatgggttccctacgtgggtgagtgaaggacagaggaggcttcttcaggctgcggacgccaaagcggacgttgttgtggctcaggatgggagtggacaggtgaagacaattcacgaggctcttaaattggtgcctaaaaagaacaagaagccttttgtcatttacgtcaaggccggtgtctaccaggagtatattatgatcaacaagcacttgacccatgtcaccatgatcggagatggccccaccaagaccagaatcaccggcagcaaaaactacgtcgatggcatcaaaacttacaacaccgctaccttcggtgtgaacgctgctaacttcatggcgatgaacatcgggttcgagaacacagcaggagctgagaagcaccaagccgttgccctgagggtaacagcagacaaggctgtattctacaactgcaacatggatgggttccaggacaccctctacacacaatcccagcgtcagttctaccgcgactgcaccgtcacgggcaccatcgacttcgtgttcggggacgtggcgtggatggtaagtgactgcaaggacacaggcaggaactccatggagaaccagcaatgcatggtcaccgccggtggaaggaccaagatcgacagccccagtgcactggtcttccagagctgcatcttcaccggcgaacccgacgtgtttgccttgtcccccaagattgcttacttgggaaggccgtggagggtttacgctaaggttgtcatcatggactcgcaaatcgatgacatctttgtccctgaagggtacatgccgtggatgggaagtgctttcaaggacacaagcacctactacgagttcaacaacaggggttttggtgctaacactcaaggtagaatcacgtggcctggttttaaggttatcactcccattgaagctactgattactacccaggaaaattctttgagatcgctaattcgactgagcgtgattcttggatcgttgggtctggggtgccctactcccttggcccaattattgcgctgcctttgccaacagcttaattcatggtcttttttaatgactctaatagaatatacatgtagctacatatccctgctgcatgcctgcatctgcatgccctttttgacattgctatatatgtctgccagtatttaaggaaaggaaaagtgatgatgcagtggtactcatttgttaattcagttttccttttcttcacgcacttgttagtttccccatgctggctagtaattgcagcagacttattctagctaaattaccgattccttgggaatttgatctcaatttcaattctcaccggtttaatttcactcttggctagctaggctactgctgcttgttccttcttaatctacgagaagaaaagaaatgtcagcaagatacttttttaacacattttttattatcagctgaaattttaataaaaacataaattttagtgatttttacttttt

SEQ ID NO: 127892 - DNA, 216 bp, Glycine max
  Clone ID: PAT_MRT3847_86491C.1
caaatagcaatcaaacacacaaacatggaagaaacatgtagtcgtgctggttttgggaagaaatttactaaagcaaagccttatttgttaaccgggggacttcaatttggtttcgccggaggatacatcttcttcgtcgctagtctcaaccatggaatgagagcgtatgtgttcggtggctatacaatgccattgctgcattggcccttgctcttt

SEQ ID NO: 127893 - DNA, 313 bp, Glycine max
  Clone ID: PAT_MRT3847_86492C.1
actctcgtataaccgcttgataatcgcatagatgtcttcttacttcgaatccacaatacggcggattgatgaaaccatcgtggggttctgtgcatacacagtaacctagataggaactcttcgtatagtatcagtatatcattggatgtgctaattgctcttgcctattattctataaccacgctgctgatgaattttaagcatatggctgctcgctttccatatagatggatgcttattcagtttgttgctatgattgctctgtctagagcaactcatttcataaacctgagtacattctagatacactcta

SEQ ID NO: 127894 - DNA, 263 bp, Glycine max
  Clone ID: PAT_MRT3847_86493C.1
cggccgccccttgttttttagttttttgttctttgcagcccgacaacagaagagaatcagcgtaccacgctctagaatggcacagtactaatggaaggttgtgttgtattaaaccacaagaacaaccctccaaaagaggctgaaacttgctgcgctaaacaataatgttgtaaggggcctccgaccgacgcaacacattgaaacaccggtccaccaaagcaattctgccaccgttgatcaaaaactcagtggtgggaacaaca

SEQ ID NO: 127895 - DNA, 247 bp, Glycine max
  Clone ID: PAT_MRT3847_86494C.1
ttggctgcgataagacgacagaagggggagaagattttgcttgcactgtttaagacattggtataacttcacctctttttcatgttgtttatcttcttgtctatgactgttttataatatatcatgctattgtatgtcatgtttggtagggtactatctatatgacgtttatctgagtcgccactggattgccagctacaagtcctgtgcccatttcatcataagttatttccggttactgttttga

SEQ ID NO: 127896 - DNA, 329 bp, Glycine max
  Clone ID: PAT_MRT3847_86495C.1
aagaaacaattttaaccatatcatgggcgggtaccccttaaaaaaaacgggttaccctttccaaaaaagggggcggccaaaggaattcatataggaaatagaccccatcacaaaagctatgcccagaccaggatttagggggggggggaaagacccaaggggtcccagaagggccaagacttaccccccctcacttattatctaaaatgggggccccatttctctatagagccctaaccaagggcggcaaacgggaaaaacaacttttacgggggggttataagaaacccccccgctccggggaacgccggggggtcgcacccgggaaa

SEQ ID NO: 127897 - DNA, 444 bp, Glycine max
  Clone ID: PAT_MRT3847_86496C.1
tcgtccacgcgttcgcccactcgttcgcggacgcgtggggtttgttgttgtaactcgttcttcttcttttgatgttctgtgttcgggtttgcaacttctctgacctgaaaatgtcttgctgcggtgagaactgtggttgccgtagctgctgacagtgccgaaacggctgatgatgctgcaacatgctcccagacttgagctacacttgagtaaccaccaccgagaccttggtcatgggagtggcacctgttaaggctcaaattgagggatctgaaatgggtgtgcccactgagaacgatggctgcacatgtggaccagactgatactgcaacccctgcactagcaagtgacgtgtttggagagcaagcttcaagcatagatagcccttaattaggaataatgatcaactactaacgtgtagctaaaaacttatgtattatgtct

SEQ ID NO: 127898 - DNA, 303 bp, Glycine max
  Clone ID: PAT_MRT3847_86497C.1
gggtgaaaggatgtgcaagattaaaccattctcctgccatgaattgttgtttcctgagacgatttgggcgttttggaactgtgtggactgcggcgtttggttccactctgtcgtgctctaatgacagtgctctttttagagcttcggttgcatcttcggtccctgagccattgcataaatcactatggttgacctgtcctgtgttgcgtgatgtgtctccgcaatcctcaccttttctcgactaattcggaatgcgtccgctctaatcttaaacagtcagtctcgttacaacatcgtgtgtat

SEQ ID NO: 127899 - DNA, 843 bp, Glycine max
  Clone ID: PAT_MRT3847_86498C.1
tagaaatgaaggtggaaaaagaaaattaaacgcagagacaagttgtcctcattttcttcacccaaaacaaagtcgaaaaaatcatcaccattgtccagaaaacaacgcatacatcttcgatccttagtccttattctctctcatgaaccggtggtccggcggtcggggtcgtaagcctcggcggcgagcatggtgctgctcgttcgcaatccctccgtcgagccccgaagtcaacacaatccctcactccaaatcgcgccacaaaaacaaaacagaatctttttcaaaacccagcgtcgtttcggtcccaaactcaccgcagagcgccaaatccgggtttcccatcgtgggccggatcgacccgcgccggatcttgtcgccgggaagagtctctcccatcgactccgatcccgcccccgccgcctcgcagcttcgatcccacagcttccgcgactcctcgccgccgccgccggagagtgcggcggcgctggacgtgaagctgaagctgcgagggaggagcggcgggagcatggtggtggaggtggagtcagaggttctgggagcgaactcggaggtgtttgcgggtttgatagctgattgcaagagaggtgtgggtggagccaccatggaagttgagaacttgggagtgttcagagacaccattgagcttatgtttgaagacgacgatcgcatcaccaagaccctcatcaacgttggtgtttctcgctccattgatattttggaggtttcagcagggaattgtgtttgctaaagggcgttcgttgctgcttgaagtacctttgagcggttcctttgactgagggaggagaagagaaattgagg

SEQ ID NO: 127900 - DNA, 404 bp, Glycine max
  Clone ID: PAT_MRT3847_86499C.1
ctgcaggcccgggtccggattaattccgggttcaccaacctacctatccgggggcgcgccctttttttttttttttttttttagtgctttatgttcaattatagttttttatttctaaaatatcatatatatttatccctaggaaagtatctcaacatgcgcttgtgactggtgtgacacgcctagaaagcctaggacgcccaatggcttgatgatcaccccatgttgacaatcaagccacccgtggaccattggcttggattaccaagatcgcaaagcctttctagcatacagcgcgattttaccccattagatgacgggctgtgcgccttgggcttgtgctctttccgaacagccttattgagatgctgcttctagatgctaggactggcaccaggttgtaa

SEQ ID NO: 127901 - DNA, 290 bp, Glycine max
  Clone ID: PAT_MRT3847_8649C.1
tttggatcgacactggcagtcacgcttcttcatcatgggtaaagacgacagatacaccaagcgacttatctacggtcagggtgagtgcaaagtagaagccctagacagatatatcaggaccgataatctcggcttctgcggcctatcctacgatgtagtagcagttgtgggacggcacagacgtgggacgagcacgctaatgaatcatctcctgcacgcaccttctaggaagcttgataaacttaggggaagacctgaaacacacaaggatattgtgatagacaatgctg

SEQ ID NO: 127902 - DNA, 423 bp, Glycine max
  Clone ID: PAT_MRT3847_864C.1
ccacgcgtccggtttgatttaagtgggggtgaattaaagttcctattcaacggtaaaagtcatcgtgtagctgctgtatgtaacatatttacgtagaagtgctagtgtgtaattcttttaccacatggctgtgattcatttgcaattgaccttgggaaaatgaaagttaagttgtcaacaccaccaccctacaagtacccttgttctccaccaccacctaagaagccctacaaatacccatcttctccacctccaatttacaagtacaaaataaggggcggcccgctctaaagtataaaaaccttatctcccccgccacctccatataatagtttctttttatggacccccaaattacaagacatggccggcattttataaaagccctactgggaaaactccgccgttcaccaatttattttc

SEQ ID NO: 127903 - DNA, 197 bp, Glycine max
  Clone ID: PAT_MRT3847_86500C.1
caatttccttcccactttatttaactttccatttttacactcaccaaaaaacccaccccttcgccttttccaccattgaagagggggcgttttctattcccccttccttttcttccaatttaaatacccctatcacattaccaattccgttatttggttcccctttttactccttcgaaacctacctttccttcttc

SEQ ID NO: 127904 - DNA, 373 bp, Glycine max
  Clone ID: PAT_MRT3847_86501C.1
attaaaggaaattaggcatgaccctcttgttgagtatgctctgcctattttaaaataacacacacttcacacattattacgataattaatagaggtgtggaaattttcagagaattaactttaaattcatcccacttttgaatatgtgcattttggtgggcgttaaacgggtaattgactttgctgtcaaagtgcgcgtaaaaaaggacggcaccggcgttgcgaaggatggcgtaaaccattcgatgaacccattctgcgaaattgtgttagaagaggcggtgcgaatcaaagagcgtaaagagaatgatggcggtgggcccgttggagacttcacctttttattttggcacacaaaaagcacaggaaacac

SEQ ID NO: 127905 - DNA, 731 bp, Glycine max
  Clone ID: PAT_MRT3847_86502C.1
ctactctacaaacacaacaaaactctccaattctgaagattttcttatctcttgtctttgaaactagaagctccgtgattgatcaatggcgacaaaagaaggcaaagccataggcatagacctcggcacgacctacagctgcgtgggcgtgtggcaaaacgaccgcgttgagatcatccccaacgaccaaggcaaccgaaccaccccctcctatgtcgccttcaccgacaccgagaggctcatcggagacgccgcgaagaaccaagtcgcgatgaacccgcagaacaccgtcttcgacgccaagcgtttaatcggtcgcagattctcagactctcctgttcaaaacgacatgaagctgtggccgtttaaggtcgtggcgggaccgggcgacaagcccatgatcgtggtcaattacaaaggcgaggagaagtaattctctgcggaggagatatcttcaatggtgttcgtgaagatgagagaagtagcagaggcgtttctcggacacgcggtgaagaacgcggttatcactgtccctgcttacttcaacgactctcagaggcaggcgacgaaggacgcaggggcaatttcgggtttgaatgcgttgaggattatcaatgaacctaccgttgctgccatcgcgtatggattggataagaaggcttcgagaaaaggtgaacagaacgtgcttattttcgaccttggtggtggcacttttgatgtttcaatattga

SEQ ID NO: 127906 - DNA, 418 bp, Glycine max
  Clone ID: PAT_MRT3847_86503C.1
cactataataattgtacaggacttggaatccagggtctcacttaaggagattaagttcattaggagactaaaaacttgttggtaaaaatttaaatgtttttttatagagttacttttacttaataattgaaacaatttaatgtgttaaagttataaccttttcatttaatatttgtatttaaactatttaactaacttataattttaaattattacactacaacacatgtgatctttaataacattttatttttgtctaacacttagttaaaatgttgctaaaaaattttgttgataacatttaaaaaatgttgtcaaatatgaataaatgttactaatatattttcatgacattttatcaaatgttgtgtatagtccatggtgttaaaaaatcacatgtctagtggtgttattttat

SEQ ID NO: 127907 - DNA, 972 bp, Glycine max
  Clone ID: PAT_MRT3847_86504C.1
aattcggctcgaggatcaaacactcgagaactctctagccagctctgctactttcttcctaatctcgtatattctcgaactcactctaatttctaacgcggactataaattgcggtttgggttctctctctctcctcactcacaacaatatctgcacataaaaaaccactctacaaaactctccagtaattctgaaaattttattttcttttggtgaaattaacagctctgtgattgatcaatggcgacaaaggaaggcaaagccataggcatcgatctcggcacgacctacagctgcgtgggcgtgtggcaaaacgaccgcgtcgagatcatccccaacgaccaaggcaaccgaaccactccctcttatgtagccttcaccgacaccgagaggctcatcggagacgcggcgaagaaccaagtcgccatgaacccgcagaacaccgtcttcgacgccaagcgtttaatcggtcgcagattctcagactcttcagttcaaaacgacatgaagctgtggccgtttaaggtcgtggctggccctggcgacaagcccatgatcgtggtcaattacaaaggcgaggagaagaaattctccgccgaagagatatcttccatggtgttggtcaagatgagggaagtggcagaggcgtttctcggacacgccgtgaagaacgctgttgtcactgtccctgcgtacttcaacgactcgcagaggcaggctacgaaggacgcaggggcaatttcgggtttgaatgtgttgaggattatcaatgaacccaccgctgctgccattgcgtatgggttggataaaaaagcttcgagaaaaggtgaacagaacgtgcttatctttgaccttggtggtggtacttttgatgtttcgatattgaccatcgaggaagggattttcgaagtgaaggccactgctggtgatactcatctcggaggtgaagattttgataacagaatggtgaa

SEQ ID NO: 127908 - DNA, 1346 bp, Glycine max
  Clone ID: PAT_MRT3847_86505C.1
gaagtgggctcgagacgttgattgattatggtcttttaaatgccgcatcatagtctatctgtcttccgtttctattctcttctcatctcactattttattcattctctttccttcatccagctcactctcttccgtttctttccctataaaattaactccttaccttcctccaatatttctcttaatcatacttaacgtgcactcaaccacattcatcacaactcacacccttcataagctttgtgttttttcgtagaaacaaagatctgatcatgacgatgatgagcagcagcaacaacaacgttggagaatttggagacaccactctgaccaaggtttttgttgggggcttagcttgggagactccgaaggatgcccttaaagaccactttgagaagtatggtcagatccttgaagctgtcatcatttccgataagcacactggcaaatccaaaggctatggctttgtgactttcaaggaggctgaggctgccaagaaggcttgtgagaattcaacaactctcattatcaatggccgtcgagcgaattgcaatcttgctttcctaggtgctcgtcgcccaaggtcttcttccaatgtttcacctcctccaccgcaagcacaagggggatccaacggtggaatagtgaagaatgttaacaatgcatcaggtccaccaccagccattaatcacgtgcagccatattattatccagtgaggacaactgctctgccattccataatcacactcttcctttctatgggtatgcgcctacctacattgttactgacgtaaactacaattacaatcagaatcagaaactgtgctatggtagcggtggggcctacatgaatgggcagcatgtgtacccgaggcaggctattgtgggcggcaacacactgatgccaatgtatcctctctatcagtatcaccatccaacggagaccattggcgtgccagctcatcacaacttttatcaaacggcaccgtgggtcccaatgaccatcatgtccaagccatcgtctatcgttcctcacacaggtacagttggcacaggtgagtgttttaaaagggttgtctgagaggagcttagttggctaaataacagcagagggaggggatatgatggtggtggccgcacagagcaacattattatctgatctgtcgtggctttactttcctttttttgttgttgtctttaaatattgtttcatttttagttgttaatcgtaggcattttgttcttgatgagattctttcattctctttttctgtctaacatatcagcatgtgctgtgcacagttacattcagttgaaattatcgttttgttttccggtgttgt

SEQ ID NO: 127909 - DNA, 127 bp, Glycine max
  Clone ID: PAT_MRT3847_86506C.1
atccggtccaaaaggccaatttaaaatggaggataaccaaggacaatttctgcacctgtgttgcaaaaaagacatgatgacaaaggttgatgtagcaaggggacctaatatgtttcactagtacttc

SEQ ID NO: 127910 - DNA, 245 bp, Glycine max
  Clone ID: PAT_MRT3847_86507C.1
catgtagaacagatcactatattacctataaaattattctacattataacctcttactggtccctcagtgataccttctttgaccctcatctgagattagaatatctttcttacctataacatcaaaactggtaatattgccaactattttgtaaaccgaatgacaggcactgattcaaaaggatctataggataaaaaaaaaaaagcggcatgcacgaccgactaggatagctacacaaccctt

SEQ ID NO: 127911 - DNA, 317 bp, Glycine max
  Clone ID: PAT_MRT3847_86508C.1
gtaacccttttgtatattgtataatagtaggtgatggatccaccttctcctccaagcacaccgttgctaagtccagctccccctagccctaggggaggattcatggatacatgcttatggtttgtgtgctgctgcggtctatttagttgctgctctcctcccctcttcgaatcaggacctcctccactctagactctactgtttttgctgctttgttctttcaaaccatttctaatttacctcaaaaaaattgtggcttttgtttccttatggttgtattttgagatcaagttatcaaatcaatattcaaattaaaa

SEQ ID NO: 127912 - DNA, 296 bp, Glycine max
  Clone ID: PAT_MRT3847_86509C.1
cttttattaaaattaagattttattttagttttgaaaaaaacaaaaaacaaataaggagagggctacaaaaaaaatgggtctgccaaattgcaaagaccaattctactgacgcatccttacgaagttacaaaacccatatattcctaccttaaataaatccactgcccgactttttacaacaagctaacttgaaaaaccaccccgtatcctaacttaaaatctttttataaaatgccttttttgccagatagtgatatagcatataggtccaaacccatctgctttcctaacaatt

SEQ ID NO: 127913 - DNA, 196 bp, Glycine max
  Clone ID: PAT_MRT3847_8650C.1
gcgccctttttttttttttttttttttgggtatcaaacacagctttctttcatcccctttaacaaatttctcgatatgattttgttacacagattcctcgtaaggtgaggattaccacaactagaacgaggctatggttcccagactagatcccacacggtggggggggggggggacgtctcacgtgggggggggg

SEQ ID NO: 127914 - DNA, 1356 bp, Glycine max
  Clone ID: PAT_MRT3847_86510C.1
cgtaagctcggaattcggcttattaagcaaaaacaatatggaagtaaagaaagttttttttgttgctctatcctttgctttggttctgagagttgctgagagctttgagttcaatgaaaaggacctggaatccgaggaagggttgtgggatttgtacgagagatggaggagccaccacacggtttctcgaagcctcgatgagaagcacaaccgcttcaacgtgttcaaaggcaacgtgatgcatgtccacagttccaataaaatggacaagccttacaagctgaagttgaacaggttcgctgacatgaccaaccatgaattcaggagcatctatgctggctccaaggttaatcatcacagaatgttcagaggcacgccacgtgggaatggtactttcatgtatcagaacgttgacagggttccttcttccgtagattggaggaagaaaggtgctgtcactgatgtaaaggatcaaggccaatgcggtagttgttgggcgttttcaactattgtagctgttgaaggtattaaccaaatcaagacacataagctagttcccttgtctgagcaagaacttgtagattgtgacactacacaaaatcaaggatgcaatggtgggttaatggaatctgcgttcgagtttatcaagcaatacggtataactacagcaagcaattacccttatgaagcaaaagatggaacttgtgatgcatcaaaggtgaatgaacctgcagtgtcaattgatggccatgagaatgtccccgtgaacaatgaggccgcattgctcaaagctgttgcccatcaacctgtatcggtagccattgaagctgggggaattgacttccagttctattcagagggagtatttacgggaaactgtggcactgctctggatcatggggtagcaattgtgggctatggaacaactcaagatggaaccaaatattggacagtgaagaactcatggggatccgaatggggagaaaagggttacattagaatgaaaaggagcatatctgtcaagaaaggtctttgtggcatagcaatggaagcttcctatccaatcaaaaagtcctctagcaaaccaagggaacattcatcatatcctaaagacgagctttaaatatttcacatgaatattcaaccttgatctacgttgattgttgtttaatttgcttgtgcgtaagggattgcttcgtgccccctaattaataatatttgtatgcctagttatccatcaaattgttaggtttgtatcacataaatcttttagtttgattgcttgcatactactgtaacatttcaaatatcctgatttctactaaagaaatacaaatcacactgatttactgcccc

SEQ ID NO: 127915 - DNA, 787 bp, Glycine max
  Clone ID: PAT_MRT3847_86511C.1
aggaagtccttgagcttggaccagtttgtggtgccacagaccgtgtttgcgcttactgacaaaccagtttgctccttcctgggacatctccatgatgtgcttgacctctcatggtctaaaactcagcacttgctctcatcttcaatggacaaaactgtgcggctgtggcatctatccagcaagtcttgtttgaaaatattttcacacagtgactatgtaacttgcatccagtttaatcctgttgatgatagatacttcattaatgggatctctggatgctaaggttcgcatatggagcattcctgatcgacaagttcacgcgtccgctgatctgcatgagatggtcactgctgcttgttatacacctgatggtcagggtgcattggttggttcatacaagggtagctgccatttatataatacgtccgaaaataagttgcaacagaaaagtcagatcaatctgcagaacaagaaaaagaaatcacatcacaagaaaattactggtttccagtttgccccaggaagttcatcagaagtacttatcacatctgctgactcacgaattcgggtggttgatggtgttgatctagttcataagtttaaaggctttcggaatgcaactagtccaatttcagcatccctcacggcaaatggtaaatatgttgtcgcagcaagtgaggactcccatgtattcatctggaaaaatgaagctgattgcagaccaaacagaagtaaaggtgtgactgtcacacgatcatatgagcattttcactgtaaagatgtgtca

SEQ ID NO: 127916 - DNA, 438 bp, Glycine max
  Clone ID: PAT_MRT3847_86512C.1
gcgctcacgcgtgctattagaaacaatgatggaagaggtaataaattcgattcgacgcgcttgtgtattggcccaaaaccttgaacaagacctacccaacttggcgaaccaaccagctatgatgtccttgtccattgatcagataactgaggctttcagtggtgccaaggaaaagatgttacaattttcccgacagaaccaaacttgggacgaatctcctccaacgttggttcatgaaacgacacagctgcaacctcagatggatgctactctaatgcaggaatggctaaggtctagtcatgcactaacaatggatcagttgtttcaaatgcatcagtttcatgctgcaaggagtacccttcaaattggtgaaatgggagggagagatgggaagataattttgagagaaacaagggacctgaagaaatggcaggaatc

SEQ ID NO: 127917 - DNA, 460 bp, Glycine max
  Clone ID: PAT_MRT3847_86513C.1
atcttcgacttctgatacatttcagaggacactaatcactcgtcatcccaagtgaaaattgaagaggcaaacacgtggtgcgagagtgggagtgtttagtcataccgcggatttggttgtgcgcttggttatattacttggttggcactatagctgcccataacatgtttgatataatgtctgactcatagaaaatctgagtactgtgttgagaatgttttattggaaaccgtggccatatttcgggctcaactggtgtatttttattttattttttaaaccccgagacctttgcttgttgcaagcaccctctgggagggttatagcatgaattaaataatgacatgaactgtttcctttatcatcattgcgctgaatataattatgatagcttgtgatggctgcggtgtttttggcttttgcgtgtccatgattggtttgctctttttttacagatcac

SEQ ID NO: 127918 - DNA, 268 bp, Glycine max
  unsure (1)..(268): unsure at all n locations
  Clone ID: PAT_MRT3847_86514C.1
aaaatcacttcatcatggcttcctcgtgtgcttcctctgccatngcagctgttgccatcttccacacnanntacnaacananaatggatcactcttgggaagcacaaaagcttcttttcttagtgngaggaaactgaaggtgaacaactttacagcaccanttngnncacgatcccagcantacagtttgngcagttgcngagcctgataggcatctgtggtncncaggcagactcnccctcaagggtagaggcagttannnaganat

SEQ ID NO: 127919 - DNA, 191 bp, Glycine max
  Clone ID: PAT_MRT3847_86515C.1
acgcacgcgtcgcttctagcccggattctgacttagaggcgttcagtcataatccaacgcacggtagttcgcgccactggctttcacaagcgcgtacattgtgcatcacgtcctctcgactagtgatactattgcgacatgtcatcataggtaactacgccagagctaaccaccagtccatgtgggaatca

SEQ ID NO: 127920 - DNA, 438 bp, Glycine max
  Clone ID: PAT_MRT3847_86516C.1
aaaaaaaaaaaacgccgtttttcccttggcttataaggggttgtttcaagttttttagggataaggcatttaaactttttccccttttaaaagggccttaaactgcttgactttggtaacaacacttttacagccaacaggggacaaattcttttgaaccttaattaataaccagggggcccctcaatatcaatttagtgatgggggaattggaccctttccactttcaaaaccctaatgggggagaatactttgggttttcaactggaacctgaaaagcatttgcactgggctgaaacacaagataggacccaatttcataagggaaaaccaaatggtttattttaaaatgcaaactcttctccctacaaaaacgctgacattgatgcttcagcctttaaaagggtgcttctgttctgaactggtttgaaaacttaa

SEQ ID NO: 127921 - DNA, 508 bp, Glycine max
  Clone ID: PAT_MRT3847_86517C.1
ctctaacttttgtttcttaccatgaaacttttagtgggtctggacaatgatttacagaaacatgggcgcgtacacctatgcctacgctccgaaagatggcgaaacccttggtttttacgtccgggcgaggcctgcatgcttataactcaaaagttctgcacgcgatgctctacgggatgaccttgcaggaaatgactaacggggaggagcacatttactttagcttgatcctggcgtgggttgccgtcgctcttagcttctggaacgctttccacaccggcactacacttcacgatggtcggatcggcggtgcactcatccggcaaggggtttatgcacgtctacatcttgtccgatattcactaacgcgcagtgtgaccgggtttgattcttatcaggcgacacgaattgatactagctggtgcgactgcttgcttgggtggaggtgcgtactatacatgatgcgcattttgcaccaaagatggtgctttatagaacaccctggggc

SEQ ID NO: 127922 - DNA, 323 bp, Glycine max
  Clone ID: PAT_MRT3847_86518C.1
tggtgggtttttttttttttttttttttttggggaataacttcgtaaatatctcgacaggcaggttcgagttgggtgttccaattcagcgggtgaacccacgaatatcatatatattcctcaatacaggttttaggttacggaagatttttaaatgtcgctgaaccttgttaaattgtttttgtgttcaattagaaaaaagggtattacatggtctttttttttgacatcatttacgagctctagctgaaaatatatgttctgaggggaaatttaaggcctttggcaacattcatcccctatcacttgaaggttgcccttggt

SEQ ID NO: 127923 - DNA, 158 bp, Glycine max
  Clone ID: PAT_MRT3847_86519C.1
tcgaggacgattccttttctttttaagtttttttttggttaagcttaagcaacaaccgggaccaagcacacgcgcagacgcaagctctttaaaccggggagaacgggaactggaccacttcaaaggtcaaaacccagatttttccaacaaaataaggc

SEQ ID NO: 127924 - DNA, 504 bp, Glycine max
  Clone ID: PAT_MRT3847_8651C.1
ccaaaacttaagtcctttttcagggaacttcaccctaaatgactcctccaaatcagcatgtttcatatcataatcaacacctgtgtccacacaacgatgaccatgctgctccaccttcttcatgcagaaaaaacccttggagtttgttcctcctactgaatgagttgcaatttcctttaaattatcatcacccttggatggaccacaattcttctcagaaacaaagtaacccatctctgcagcttccctagcggcatcatccctgtctctaacatgtttagcagccgcctcctctcgtgcaaccctcctcactttagtgcgatgatcaagtccttcgttggttgacaagcgcctctgaatgcccccttgagacagcggtatccctaaccagctatagtctttcttttgcactactaagacacacggatgtgacaaaactgcatcaaacacaaacttccccctccacagactggcaagggggcgaaaacgaaccttcgcagtggg

SEQ ID NO: 127925 - DNA, 476 bp, Glycine max
  Clone ID: PAT_MRT3847_86520C.1
ttccgaattttcttgaaggctctcaattaatgccacagaaacacttcacaggatcctccactaaaatgaaggtctggtccttactggcagctctggctttcacactgttactagtggtgtcctcaactgaggttaattactctttgacattcagagtgaaatcatcttctcatcaagctctgaaagatttgcggggtcatagaaaagatccttcaaagcatgtggtggagtcatgtttccgagcaatacccccaagcaaatcaaatcccacacaaaataagtaactcatgcatacggttagacactgtaataataacagtatctcaaaattagtagtactctctcttttgttttagttttaatttttcattgtaattgtttactggcttctaattaaagttgcagataaaataaaattgttggtgatcaattgtcaatgattatatgcactgcagtttagttaatatttattttac

SEQ ID NO: 127926 - DNA, 198 bp, Glycine max
  unsure (1)..(198): unsure at all n locations
  Clone ID: PAT_MRT3847_86521C.1
cccacgcgnccgcnanccncaactagngaaatnccnncnncncnnnccacgagccaacaacaacancagggangcgagnncggggcccaaaaaaaaggcccgggagaaggagaaggaagnngaaancgnngaggganacaannaccgacagcagacgggcancagnggagggggaaaangaanannnagagcngcaaa

SEQ ID NO: 127927 - DNA, 123 bp, Glycine max
  unsure (1)..(123): unsure at all n locations
  Clone ID: PAT_MRT3847_86522C.1
cgcncatacccactgttanttttgcattttctcttggtttgggncaaatgggtctcatttttctgagaagccagtgaaaaaagcttgcactttgactccaaaacttgcagagaagagggagat

SEQ ID NO: 127928 - DNA, 163 bp, Glycine max
  Clone ID: PAT_MRT3847_86523C.1
tagccttaaccgatcacattattctttctcacactccttcactctgtgttgtcctttctgtttattcagcaattcttctcatcgcaggggaacacctgaagttctgcaaaaagtatcacgaatacatgcagggccacgagaacaaacttccctgtgtctgatt

SEQ ID NO: 127929 - DNA, 2613 bp, Glycine max
  Clone ID: PAT_MRT3847_86524C.1
ccacgcgtccgcagacctgctggactgaccccatcagctgcattaccgtcatcaacatctccaatctcaccaatgccgcagtcatctccaatctcaccaatgccccagtctacaactgttaacactaaagcattaggtgtatctggaaatgggttctcctccaattcagttttgggcaatgattttttctctgctgcctcattgacaccgaaacaagaacctgctggactgagttactctgtcagcaatgtctcatcagccattgttcctgtttccactgctccccaacctgcaattaagcaaaattctcttgactcattgcagagtgcatattcttcaatgctgcctgcaaatagtcagtttcagcgggcacaatctgcaccaaacataagccaacaaatttcaccaccagcttcttcttctccaaatacaccatctgggcttggaaatgcaaattctgacaattcacagctttcttggccaaaaatgaaacctactgatgtgcagaagtatacaaaggtgtttatggaagttgacactgacagggatgggaaaatcactggggagcaggcacgcagtctatttttaagctggagattacccatagatgtcttaaagaaggtgtgggacttgtctgatcaggacaatgatagcatgctttcattgaaggagttttgctttgctctttatttgatggaacgttacagggaaggtcggcctcttccacagtctcttccaagcaatgttatgtttgacgagacactgatgtcaatgacaggccaaccaaaaagtgcttatggaaatgcagcctggggtattggccaaggttttcggcagcaacaaggtattccaggtgctcggccagtggcaccaacagctggtttgaggccatcagtgcatggaagttttgcccgggctgatggcactcaacagcccaatcagcaaaagtcaggaacacctgtgttggctcgagtcctttttgaatcgtgcagaaaatggtgagcagaatatattgaattcaaagcctcaagaggcaacaactgcggagaaaaagtttgaagaaactcagaatgtgattttggattcaaaagagaagcttgagttataccgcaacaaaatgcaggaactggttctatataaaagcagatgcgataatcgactaaatgagattacggaaagggcatctgcggataagcgtgaggcagaatcattgggcaagaaatatgaagagaaatacaaacaagtagcaaatagtatcaaaattgaccgttgaagaagctaaatttcgtgatatacaggataggaaggtggagttgcagcaagcaattgtcaaaatgcggctcgaaggcagtgcagatggtatccttcaggtccgtgctgaacgcatacagtcagatctcgaggagttatttaaggctctagccgaacggtgcaagaaacatgggctagatgtgaagtcaattacaatggttcagcttcctgctggttggcaacctggaattccagagggagcagctctttgggatgaagattgggataaatttgaggatgaaggatttgctaatgatctcacttatacatcttcaaaaccgaagtcggcatttattgatggagaacaaaatttatctgatgataattctgttcatggttcacctgtgaatgcaaatgggaagcaagaaaattctgctaatggtgattatacagttgaggatgaatcctatgcacacagtgaagatgacctggcaagaatcccccatagtctagctgggaggagtacggtggagagtccttctcaagacttttcaaattctcattttggaaaaagttttgaagcagatgcagaaacacacagaagttttgatgaatcaacctggggtgcatttgacaacaacgatgatgtggactcagtgtggggttttaacaccaagaccaaggactctgacttcgagcagagagatttctttaaatctgatgattttggtataaacccagttagaacaggatctacacatacagatggcacgttccagacgaaaagcccatttgcttttgatgattcagtgcctgcaactccagtttccaaatttgcttttgatgattcagtgcctgcaactccagtttccaagttcgaaaactctccaaggtacagtgaggcaggggatcacttctttgacatgtcaaggtttgattccttcaggcacgaaagtggatattctccacaaccagagaggctcacgagatttgattcaataagtagcagcaaggattttggctacaataatcataaattcacaaggtttgactccataagtagcagcaaggattttggctccaatcctgagacgctcacaaggtttgattccatgagtagcagcaacgattttggctttggtcgtcagggacatgcaaggtttgactcaattagtagcaccaaggacttcggtcacagtggtccattctcttatgatgactctgatccattcggctcctctggcccttttaaggtctcttctgaaaatcattctccgaagaaagctagaagaaaagctggacggtaatatatggtgtggcaaacatatcagtttgaagagaactttttctattttttttggt

SEQ ID NO: 127930 - DNA, 307 bp, Glycine max
  unsure (1)..(307): unsure at all n locations
  Clone ID: PAT_MRT3847_86525C.1
tggtgttgcttatactgaaaaagatgtaaaggctatggcagctgagattgaagtggttgatggccctaatgatgaaggcaagatgtttacacaccctgataaactcagtgatcgctttccccatccatatgcaaatgaagcagcagctaagtttgctaatggaagatcctatcctccagatctaagtcttgttaccaaatctcaccacaatggtcagaactatatattttcccttctaaccaattatcataaccctcctactaatgtttcgattagagaangactacactataatccttattttcct

SEQ ID NO: 127931 - DNA, 1850 bp, Glycine max
  Clone ID: PAT_MRT3847_86526C.1
ctcgagccgaatcggctcgagcagaatgtgattttggattcaaaagagaagcttgagttataccgcaacaaaatgcaggaactggttctatataaaagcagatgcgataatcgactaaatgagattacggaaagggcatctgcggataagcgtgaggcagaatcattgggcaagaaatatgaagagaaatacaaacaagtagcagaaatagtatcaaaattgaccacgcgtccgttgaagaagctaaatttcgtgatatacaggataggaaggcagttgcagcaagcaattgtcaaaatggtacaaggaggcagtgcagatggtatccttcaggtccgtgctgaacgcatacagtcagatctcgaggagttatttaaggctctagccgaacggtgcaagaaacatgggctagatgtgaagtcaattacaatggttcagcttcctgttggttggcaacctggaattccagagggagcagctctttgggatgaagagtgggataaatttgaggatgaaggatttgctaatgatctcacttttgcatcttcaaaaccgaatcctgcatttattgatggagaacaaaatttatctgatgataattctgttcatggttcacctgtgaatgcaaatgggaagcaagaaaattctgctaatggtgattatacagttgaggatgatcctatgcacacagtgaaaaggatgtgaaaatcactggggagcaggcacgcagtctatttttaagctggagattacccatagatgtcttaaagaaggtgtgggacttgtctgatcaggataatgatagcatgctttctttgaaggagttttgctttgctctttatttgatggaacgttacagggaaggtcgtcctctccagagtctcttccaagcaatgttctctgtctccgggcagggaggtctctgtaaggccgacgattttggtataaacccagttagaacaggatctacacatacagatggcacgttccagacgaaaagcccatttgcttttgatgattcagtgcctgcaactccagtttccaaatttgcttttgatgattcagtgccggcaactccagtttccaagttcgaacacacgccaaggtccactgaggcgggggatcacttctttgacatgtcaaggtttgattccttcaggcacgaaagtggatattctccacaaccagagaggctcacgagatttgattccataagtagtagcagcaaggattttggttacaataatgataaattcacaaggtttgattccataagtagcagcaaggattttggctacaataatgataaattcacaaggtttgactccataagtagcagcaaggattttggctacaatcctgagacgctcacaaggtttgattccatgagtagcagcactgatttgggcttcggtcgacagggacatgcaaggtttgactcaattagtagcaccaaggacttcggtcacagtggtccgttctcttttgatgactctgatccattcggctcctctggcccttttaaggtctcttcagaaaatcattctccgaagaaaggttcagataactggagtgcattctagcctgcaatccaactcttcccgattttctttgttgtttctatttccttgattgttcatgacagcctatttttttgtgtatagctagaagaaaagctggacggtaatatatggtgtggccaatgtatcagtttgaagagagctttttctatttttttggggtaatgttcggatgttgtgtgaaagatagatagataaaattaaatgtcttgatgcgtatttactactaagtttaatggcaagtgcatgcaaagttttttttcttctttt

SEQ ID NO: 127932 - DNA, 1548 bp, Glycine max
  Clone ID: PAT_MRT3847_86527C.1
cgtgattataggataggaaggtggagttgcagcaagcaattgtcaaaatggtacaaggaggcagtgcagatggtatccttcaggtccgtgctgaacgcatacagtcggatcttgaggagttatttaaggctctggctgaacggtgcaagaaacatgggatagatgtgaagtcaattacaatggttcagcttcctgctggttggcaacctggaattccagagggagcagctctttgggatgaagagtgggataaatttgaggatgaaggatttgctaatgatctcacttttgcatcttcaaaaccgaatcctgcatttattgatggagaacaaaatttatctgatgataattctgttcatggttcacctgtgaatgcaaatgggaagcaagaaaattctgctaatggtgattatacagttgaggatgaatcctatgcacacagtgaagatgacttggcaagaagcccccatagtctagctgggaggagtacgttgggtagtccttctcgagacttttcaaatgctcattttggaaaaagtttcgaagcagatgcagaaacacacagaagttttgatgaatcaacctggggtgcatttgacaacaacgaagatgtggactcagtgtggggttttaacactaagaccaaggactctgacttcgagcagggagatttctttaaatccgatgattttggtataaacccagttagaacaggatctacacatacagatggcacgttccagtcaaaaagcccatttgcttttgatgattcagtgcctgcaactccagtttccaaatttgcttttgatgattcagtgcctgcaactccagtttccatgttcggaaactcttccaggtacagtgaggcaggggatcacttctttgacatgtcaaggtttgattccttcaggcacgaaagtggatattctccacaaccagagaggctcacgagatttgattcaataagtagcagcaaggattttggctacaataatcataaattcacaaggtttgactccataagtagcagcaaggattttggctccaatcctgagacgctcacaaggtttgattccatgagtagcagcaacgattttggctttggtcgtcagggacatgcaaggtttgactcaattagtagcaccaaggacttcggtcacagtggtccattctcttttgatgactctgatccattcggctcctctggcccttttaaggtctcttctgaaaatcattctccgaagaaaggttcagataactggagtgcattctagcctgcattccaactcttcccagtttttctttgttgtttccatttccttgattattcttgatagcctatttttttttgtgtatagctagaagaaaagctggacggtaatatatggtgtggcaaacatatcagtttgaagagaactttttctattttttttggtaatgtgcggattttgtgtgaaagatagatagataaaattaaatgccttgatgtgtattgtatgtactacgaagtttaatggcaagtgcatgcaaagttttttttcttctttt

SEQ ID NO: 127933 - DNA, 255 bp, Glycine max
  Clone ID: PAT_MRT3847_86528C.1
accatcgtgatgaggcatatgggtgaagcataaagttagattttcttatgtttaatcaggtcaacatctaaccttagtggaactttatttccactataaaggaacaaaaatggtcacagtcaacaatgttgtaatttacatagatgagaaactcatggtataaaagaaaagaccaattaatattaatgaaaaaacttaaatataaggacacataacttaatcaacaattgctcataaaaatttcatttaaattat

SEQ ID NO: 127934 - DNA, 173 bp, Glycine max
  unsure (1)..(173): unsure at all n locations
  Clone ID: PAT_MRT3847_86529C.1
ntgngaggagagtcgatcgtcanggatgncagaacttcataattgattnaagaggtnccnacagtggcacagttngtgatgtntgntgctgaagaccganacagtgctggaactgcacagacactgtctgtttgaatncaccaggcagtgattagagttcggaactgcggaat

SEQ ID NO: 127935 - DNA, 1718 bp, Glycine max
  unsure (1)..(1718): unsure at all n locations
  Clone ID: PAT_MRT3847_8652C.1
ctttcctctaatttccttcctagcactgatttgaactctttcattaattggttgctatttttaatttctgtgcccatttgcccctcttccaaccgtttcctgcatttatcaactcctagaatggtgtgaaagtaaccacacagtgggagaaaaaaaatgtcagctttcggtgatcttgggagttattttcaatgcgtgtattgtgtgtccctgtgtctagtctagtgtctaacgttttttaaccattccactctaatgtatttttttttgttgttgttaatttttgcggctcgagaacccattccctccctcattgggcccacgcttctccacttctcaatcctctgtaacttcaaaacatacacctcttctctctgtttctcttcactctctctctccctccctcttcaactaacatggcaattgaaaaccaagacaccgctgtcagagaaatcaagcccaagaacaggagaatcatgggtgctggagggcctgatgatgaggacaataggtggccaccgtggttgaagccactgctgaaagagagcttctttgttcaatgcaagttgcatgctgattctcacaagagcgaatgcaacatgtattgcttggactgtatgaatggccctctctgctctctctgcctcgcccaccacaaagatcaccgtgcaatccagattaggaggtcctcataccatgatgtgatcagggtctctgagattcagaaggtgttggacatcactggtgtccaaacctacattatcaacagcgcaagggtggtgtttttgaacgagaggcctcaaccaaggcctggaaaaggtgtcacaaacacttgtgaagtctgcgagcgtagccttcttgattctttccgcttctgttctcttggttgcaagattgttggaacatctaagaacttccagaagaggaagaagcagtcaatggcaatgtcatcagattctgaggactcgtacagcagcaacagcgtccatggtcttaagaaaaactgcaaagtccagagcttcacaccatccacaccacccccaacttcggttaattacagaacggccaagagaagaaagggaataccacaccgtgccccaatggtgggactaatcatagaatattagtgatagtgggtatttttaggctatttgctataatgctcttaggtagtataaaaatactactatactaatgcgagtgtttcgacgtcgtttcatcaaaatccaatactcgagctttcctagggcaggtattgggaagtgtcaccgtccttctttctttttttctgtagtggtttctagcgttttgtatatatagaaagtccaatagaactggaaaaggctgaagaggtagaaataagacacctatgaaatagttgatggtgcagtgatcaaaagaatggcatgtagcaaaataagcaaggctcttttcaaccttagttaaggtgatgatgtttgataaggacttatagggtttggtttctaaggtaaaattatacctaagttttgggggtagaggatatgtaaatagtggctaagtgaggttggggaagaggacaaatgaaaatgtacttcttggaaaataggtggtatgtctatattatatgaaaatagaaaataaagatgtatttattattacaattaaatttttacccccaatgtcttctttccttcattgtttcagcttctgactaggcaatttttgaaancttaatt

SEQ ID NO: 127936 - DNA, 208 bp, Glycine max
  Clone ID: PAT_MRT3847_86530C.1
gccaagactacttttcagccgtgttactagtttaataactaagataggctatcttgatctgtgttaatcattgaattgcacaagggccttgctttttttaatgatttgcaataccttaaatattgagccgcatccttctttaatatacgtgcttctgtactgtatttttaaatctactacgtattaaatttcaattactgttcattct

SEQ ID NO: 127937 - DNA, 295 bp, Glycine max
  unsure (1)..(295): unsure at all n locations
  Clone ID: PAT_MRT3847_86531C.1
attccttagcccggagtataaaatttctaaagaaagttttgacactccaaaaatctctccacntctaacccaattaacacttcatactaggtactcaaatactataatttctacttaaaaaacaacaaggacctcaatattaattaccaaaacaacaacaaaaccagcatattcttccttttccttaagagtgtgcattgtgacaaaatcaggaaaggtagttttataacccttttttccctttaagatcccaaacaagcatgatcttaaccttgatcccaaaaacacccttttt

SEQ ID NO: 127938 - DNA, 361 bp, Glycine max
  Clone ID: PAT_MRT3847_86532C.1
tgctcctgatgatgataaaactgcttctatcttgaagatccttgatcctcctattcgtttgattaaagacactgcctctgaggagaagatcaaagaccttgttctcgcgatatcatgttagagcattactcgatccattcttattctctgaaatccggcatgtaatgttcaatattgcgaaggacctcaccaatgagatggtttctgtgattatccgaaaagacaacgtggacctgcttcgactgatcttctatctgctgatcaatctactgctgatgttgaagagaataccattcctctttatcctattttcccaaaactttctggagaagagggtcactgcttttctgccttagctgag

SEQ ID NO: 127939 - DNA, 259 bp, Glycine max
  Clone ID: PAT_MRT3847_86533C.1
attttattatcttttcgtttgttttacaaacacaagatatgtgaaagaaggctttggagaggtctatgagcactttgactgttacaagaggtctactcccattttgacctttttttatacaaaaacatgaaactctttttaggacattcatatatcacgatgttcttccattaaatatagcatcggcgtgcgcacgtgacacggttccttaaaaaaaactgggccaaatgcaactggaaagatgttggatgtgggtttt

SEQ ID NO: 127940 - DNA, 244 bp, Glycine max
  Clone ID: PAT_MRT3847_86534C.1
agagtcttaggtgttttcgttaaggtatatttttaagtttctggccgtttcatgtagccggaaccttccaaactagggtcttggtcgggcggggacaattttcaatgctgggtggttttgatgagtactggtttttggtttgatgggcaaaaaagtctgggatatttcgaatttcacaagccgctataggggtttaggccatttcccttgctgctgagggatgttttaagatgcatttaattta

SEQ ID NO: 127941 - DNA, 222 bp, Glycine max
  Clone ID: PAT_MRT3847_86535C.1
cccaaggagaccataaaatttttcataaagagaatagaattcaggttggatagagggaaaaacactcagaacttccatgataataaaaattgaaaaccccttggtcggtttttatagcggggggaaatccaaggccttctctcttaacctctcattgattttccatgtccgtatggaaccattttaattaaaacaaaacaccgcccccaggaactagttttt

SEQ ID NO: 127942 - DNA, 349 bp, Glycine max
  unsure (1)..(349): unsure at all n locations
  Clone ID: PAT_MRT3847_86536C.1
tctcgctaatcttaaaaaacttgccttattttcaattttcaaattcctcacttataatgtctcctttcccatctagatagggtctactttataaactaatattcaatacactcatacccaccactcctcacttatcatacnaatatattatacccccctcctacttattattctcaccctcacaattttcttcatccttattcacataatcaaaaagaaccattttaattctttacatgataaactacctcgaacaaaaaatgtcatattttaaacctctaacttttatactactcattttaaaaacaacatccatatttctcccgtacatccttatgaattcaaccca

SEQ ID NO: 127943 - DNA, 343 bp, Glycine max
  Clone ID: PAT_MRT3847_86537C.1
agaaacagccacaaaaataaagtgtctgagtcattacattggcaaacagattatccacctccttccttatatcatcagatagcttctccaacacactcagctttgtctgcaattccttggctgcatcatgtctcacttcatcagaagcaacaagaaggttagaaacagcattgtttacctctttgatctcactgaagattggcctttgcttcatcaactgttcaccaactttggtcaagatcatgatgactaaaaaagggtttttttctctggcaaggagtggatggttcatgaggctgtaaaggaaatgaggagttttggattttgggtctgtggggatatg

SEQ ID NO: 127944 - DNA, 428 bp, Glycine max
  Clone ID: PAT_MRT3847_86538C.1
gaactagatacactcacccacaaagagtatgtactcctagtctaaggagccgtctgctacgatgaagagtcatcactattcgctatccctccagggccactctcctctgtagagtctgcctcagatgctgacataatatcctctgggtaatcaacatcagggagtgggtcttcatcatcctcaggtaagtcaaggttgtccatatcaggttcaagaggtaactcctctgggtcttcttcaagatcctcttcagaggatgacacctctatcacttgaactggctccactagtcgatatggagtaggtgtaggtaatccacaggctgctgaagtgtgcgtgtgggttcctccggatgtactaatgaagtagtagtgagtcgaattgtgccactgaatcggcacctctcattgccttcaagggtctcccaa

SEQ ID NO: 127945 - DNA, 416 bp, Glycine max
  unsure (1)..(416): unsure at all n locations
  Clone ID: PAT_MRT3847_86539C.1
gagagaccctaagttgccctttatgagtaaattaaaattaaggatctacatgtgtaaccgatgacagttctttatttagattttagtacatagaggagttggttgtggtggatattcttgtgttttgcttgaacaaaactccatgatgcaaaagcaagaaggaagcatgacatggaaaaaactgagactaatgccaaagccaactaaagggaacagtaacacaattgctcaagcaagttcgtgaccaatcaaggattagatgactgtttttcaaatgagtaactagttagtggaatatagtaaatatatatagtttgatgacattttcaatgtcaaataaataaaatcatagttgcctgtatggctgtnttnnnnnnnaaaaaaaaaaaaaaaaaaaaaaaaaaaaaaaaaanaaa

SEQ ID NO: 127946 - DNA, 712 bp, Glycine max
  unsure (1)..(712): unsure at all n locations
  Clone ID: PAT_MRT3847_8653C.1
aattcccggngtcgacccacgcgtccggttctagctcgcgatcttgcccagattgatgttaatgatcgagaactgattgcacttaaagctgtaattaagtgtattgaagatcacaaacttgatgaccagtaccctctggatcctctccagaagcgagcgacccaactcgagaaggccaaggctgacaagaaaagggtaactgaagcaacaaagcctcaacccaagagaccccgtgctaatggtgtgggatatggcccgcgtgtcactaacattctatctgacaaaacttcttatgctagagttgctgacaggtatcctcaatacgtgtatgaccgaccttacatgtaccctgcaccaactgacaatcactgccctcctctcatgggttctgcaacttataacatctctcctaatcctggcaactactttggaaatggctatcagtaccaagctacatatctccactagttagcacagatgatggtgaactgatgactaagaagctacatatccctttgtttaatatttagtcttaagtcttaacccttaagctgttgtatgttgcactttatctatgtagtctttaagaattgctgaaacaggtaaaatgtcatgttaaattttaacttctgtgctagaagatattctgatcctctaatgtatgtactctgttctcgttttgtaaaatatctttctttgtttcttaaatatg

SEQ ID NO: 127947 - DNA, 363 bp, Glycine max
  Clone ID: PAT_MRT3847_86540C.1
ttcttcgcgtccgtaaaccgttaccataggtcgtcggaccttataaaccggaaacaaacgcattcgagacttgattccatgaatctctcaattactatctacttttctgtgttccatttcttaagggaaagaaaatcactctttgtgctggccacagacttcgtgaatcattctcttttacattcgtagttgatttgctgtacactcttctatttgataaaggaacttatgtcacatttaaaccatgtactgtttctttttcagatctttgattaatttcaagtcacaagctggtgaaatcttggattagtgctcccactctcctatacggtattggacttccgtgggttgacttttctattt

SEQ ID NO: 127948 - DNA, 1541 bp, Glycine max
  Clone ID: PAT_MRT3847_86541C.1
gcacgcctacctaagctccttttcggctcgagagtctcaggggattagagatccaggaaggcctatatggctagatgattgcatttgtttgttatacaaacaggcttgaaattaacgctttcccttccaacctggatctcccttgcttttcccatctgagtgttgaacagagaagaagggagaagccaatcatgggttgcacttcactgccatcttttattcagatgtcatctgctacacactccagcttcagtgaaaaactccgcaaccctcaaaagaagtctcaaattgtgatacctacaactacaagagagacacacacaacaatttcttggtctttttcttctctatgcaaagctcttcacaaatcagttcctttggctgcatacacttgcaattcttctctggtcaacccctgcacatgctggtttcatgtcaggaatttctggaatataggctattcctgatcctcagctatctccaaatgactttctcaagcagctcaacgaacaaaaccagtagagatatgctgagaatgatgagagaattaaatcataaccccttgatgaaggaactacttgagaaatccaagttgaacaaagagaagtaccgtaaagaatctaagaacaaatactgaataagtgggtcaagatggggaattggatttaatcctactgcgtgaaggtctaccgatgagagggagaaattcttaataaagttaaggaagaaagctgaataggaataatatgatgatgatgatgatgccaatggggcataggaaataatacaacacaggaaaagggttcagtggagagtgtggatattcatagctatgtttgacaataagaatggggaatagttgaagtaacatttaggcgtctatcgtagttgcgaatatatgattttgaaacaattatacattgttcttttttattttgataatatgtgcattatctcaaaaagaatcagactacaactggtttaatcattagagtctcaaaagattagagatctaggaagggatagatgtctagatgattgcatttgtttgttatacaaacaggcttgaaatgatttatcttctcattttgctgttaatttcaagagggaggtgctttgaatatgtaatggcttatatcacctcaaatggctgtcttatatgcgagacaacaaatatttgtgaaatgataacttgttttatcgtggtggatcaaaaaaacaagcttaggatatttgacaatcactttcatcagccatcaacacataccaattgaagttgatggtaatccttgctggcggcaatcatgtgactaggttttgtggtttcacagcttttatttcaaatttacttccattgttgattggtatgatgcattgtttacactagtatttttcagagaaaacattaaagactctcctgttcgtaatttatatgtatcattattagcaatgtagtatttaaaatacaagtgatataaacttaattgtctgttatttacaggcaatctgtgcgaagttccatttaatcaaatataatgcat

SEQ ID NO: 127949 - DNA, 351 bp, Glycine max
  Clone ID: PAT_MRT3847_86542C.1
aggagctcaatatgtctggaaacaatacatgttataaaaggtcaaccttaagattcctttccctaacatccatggtacatctcccgaattgttcacatatctttttattaacaagacttagtctaaactgcccctggcatgcttccctcaataaacttgccctgtgaatgaatgtttcgggtacaccttccaaccgtgctgtgtatgagactgactccgtacaactagggccttaacttatcgaaccgaacaaacggccctaattttcccatttctcgcagtgaaaactgcatccctccccaatgtcgtcatctcaggcactttggtgcggaggcttgcctctgaccccgt

SEQ ID NO: 127950 - DNA, 503 bp, Glycine max
  unsure (1)..(503): unsure at all n locations
  Clone ID: PAT_MRT3847_86543C.1
gtttccgtcatcactgtatgacgtcctccttctttggggggggggggggggattaataaaagagagtaagcatagaaaaaaaaaggagaactaccgccgcaaatgaagggcagtgtaaggaaaaaaacagggataagctatctaaccaacgggataaggataagtaacaggatcgaaaaaaagcagaaagcgagctaagtaagggtagggcgtaagggcaagctaaagcaacttgtgtggtactgcagtgtatatttgttagtggtaataggttgacgaacaaagtctgttagcgcgtgagacgtttaccgaagtattaacgtatataagtaggcgatacgcgtataggggtaggacattaacgtttagagtgatggcccgcgattaggtgccgtgtaataaggagcntggcgcgcaagagtaaagacnttgagagggctaaatttggtgggtgcctggtgggtgttctaaggggcaatgttgttaaggcaagtagagaaaat

SEQ ID NO: 127951 - DNA, 308 bp, Glycine max
  Clone ID: PAT_MRT3847_86544C.1
ggttctagtgtgtgagtgtatgttgtggtaacccgtccatcttctcttgtggttctgtgtttgtgtgtgtattttctctcatctgacaatgtcttgcggcggtggaaactgtggttgctgaagctcctgcaagtactgcgactgcatcggaggctgcaagatgtaggcagagttgagctacattgagtctaccatcacgagaccgtggtcatgggagtggacactgataaagctcaaattgatggtgctgatatgggtgtgtccgcgtagtaccatagctgcacatgtggagctcaatgctccatcaa

SEQ ID NO: 127952 - DNA, 422 bp, Glycine max
  Clone ID: PAT_MRT3847_86545C.1
ggaaagggaaataccagggcctttaccataacccctaaaaaagagggaccaaaaccagggccttttggtaaattcccctgaaaaaaaaaaaccccttttaccggaaaaaaactagttaaaaaacccccttttttttttttttaattaacaggagcccaattaggcggaacccccatttccggaaaaaacaaaagtctcgggcccagccagggggggtccaccccctccggggggggcaacacaaaacggcaacaccgggggggggggaaacccaattgggaccctaaaaaaaaagggggttggagtaaaaaaaaaaaaacctttttggacatcgggtggcaattctttaaaagggatggccgccaaaaacctttaaaggaatttttggaaggcttccttccctgggaacaaaacctcctttt

SEQ ID NO: 127953 - DNA, 366 bp, Glycine max
  Clone ID: PAT_MRT3847_86546C.1
acccacgagtcaaacgggtgccaaaagaagaaagaagggggttctagtgtacgtgattgttgttactcgttcttcatcgtcgttatcttcatcatttgttgtttgtgtgtttgttttttcactcacctgaaaatgccctgcagcggtggtaactgtggttgtggaatctcctgcagttgaggctacggctgcagaggctgcatgatattgccagacttgagctacagagagtcaaccatgactgagacgttggtcatgagagtggcaccatttaaagcgcagttcgagagtgctgaaatgggtgttcccgctgataacgatggctgtatatgtggatctaactgcacctgcaatacctgaacttgc

SEQ ID NO: 127954 - DNA, 167 bp, Glycine max
  unsure (1)..(167): unsure at all n locations
  Clone ID: PAT_MRT3847_86547C.1
tnancacaatacagggcagcatcgncatgggactgagtatncnganangcacttccattttcactactatntntnccngcnaatccngncccattttctcaantcttgttcgttcatctttcgcctccatttcccccacnnagtgtgtnactcccacnactcttttc

SEQ ID NO: 127955 - DNA, 617 bp, Glycine max
  Clone ID: PAT_MRT3847_86548C.1
aaaccgaacatgtattattttatttgccatgggcgtttatgacttataatcacacacattaagtaataaatataacagaacagtgtatttcaccactaactgggtaaaccacgaatacaaatcgttttttattcacacacaaacaaatataataaaaccgggccactttgttttttatttatttatttcggtaggcactgggcaacttaatttgttgatctcctctctaaccattttctttttggtgaatcaatctcctttaactgcaatattggagtcattgcccttgccagaaatgcctatcggttttgcatggcagagttcagatcagtttccaatgggatagcatcttcgttccacttgaatgtcacttgtaacagcttgtctgttttgactgtacctgcacacaaaccttccatcctctcgcaaaacaatactgtgaattcctccaaggacgggaaacttaaactccctttgtagaaccttctcagctttcgtaatccttcaagttccaaacaattgagctgctgaaatattatctcattctcatctgattcatccccttcctctgttgaagacactatctcttcaatgaatcacaccaacctatctccatt

SEQ ID NO: 127956 - DNA, 665 bp, Glycine max
  Clone ID: PAT_MRT3847_86549C.1
aattataaattaaacacggcaattaaactcttctcaaaatttaagttaatcgtgccacgtaacatatcactgacacggtgtattataacaacaattataataatgtttttttaaaaaattaaagacataccctggccagaaatgcctatcggttttgcatggcagagttcagatcagtttccaatgggataaaatacccttccaattggatatcatgtctccattcgaatgtcacttgtaacagcttgtctgttttgactgtacctgcacacaaacttttcatcctctcgcaatacaatactgtgaattcctccaaggacgggaaacttaaactccctttgtagaaccttctcagcttaaataaatattcaagtttcaaacaattgagctgctgaaatattatctcattctcatctgattcatccccttcctctgttgaagacactatctcttcaattgaatcacaccaacctatctccattgttttgagttgacccaaacttcttgctgtagaggatgtgaacaaatatagcagactcttgcaactgtatactttcaaatatgtcagattggagaaagacactgtgcatggtaccagatttattgaattgaaacaactgattacttgcaatgtttcaagacccacgcgtccgcggacgcgtgag

SEQ ID NO: 127957 - DNA, 744 bp, Glycine max
  Clone ID: PAT_MRT3847_8654C.1
agcaaaatacttgagttttgattccaagtgaaaatatgcatcccataaaactaacagaaccatacatgataacatgtaggaaaaacacactcgttacaaaccatgaaaccacactactactactactctttcttttttttttttttataaccccacactagtactactacgtaccactactattcttttcaggcgacaaagcctagatttcttagaagacaataacacctcacgccataattattttcttgaactaaacactaaaagaaacactatataggctatgataatagcgaccgaaaataagaaacacgaaggtgtgtggtctcaactctcaagggagaggaaggttgggcccttcaccgttaccaagacctccgagcccgctaggcccaccgaatcctccaaatccaccgagcccagaaggcccacccatattaccatcaaacccagaacccactcctccaaagggaagcccattgttgccaactccagagaacccatacccgaggaagttcttctggtcctccaaacctgcgtcattgggcatgtttctggcacttgcaaccacgacaagggcaagaaccaccaagatgcaccacctagccatttctctctacacaacactttttttctcactgtcttacacgctatatatgcttagttaattgctttttcacttggtagtaatcgtccccttctgtcgtctctcgcagccgtacggacgcgtgggcggacgcgtgg

SEQ ID NO: 127958 - DNA, 769 bp, Glycine max
  Clone ID: PAT_MRT3847_86550C.1
aggacacatttttattttattttgggataaaacaatagagtcaagttttagtgttacaaacttacagttcatcacttcatttttattctccagggtcgtttaagacttataatcacacacattacataataaatagaatagaacaatgtatttcaccactaactgtatagaccacacgcacaactcgtttttttattcacacacaaacaaatataataaaactgggccactttgtttttttttttcggtaggcaccaggccacttaattcgttgatctcctctaaccattttctttctggtgaatcaatctcctctaactctaatattggagtcattgcccttgccagaaatgcctatcggatttgcatggcagagttcagatcagtttccaatgggatatgatctctccattcgaatatcacttctaacagcttgtctgttttgactgtacctgcacacaaactttccatcctcttgcaatactttactgtgaattcctccaaggacgggaaacttaaactccctttgtagaaccttctcagctttcctaaatatttaagtttcaaacaattgagctgcttaaatattatctcattctcatctgattcatccccttcctctgttgaagacactatctcttcaattgaatcacacctttttatcttcactgttttgagttgacccaaacttcttgctgttgaggatgtgaacaaatatagcagactcttgcaactttctactttcaaatatgtcagattggaggaagac

SEQ ID NO: 127959 - DNA, 846 bp, Glycine max
  Clone ID: PAT_MRT3847_86551C.1
ctcgagccgattcggctcgaggcacgaactgttggagtagccgtggacttttctcctaccagcaaattagcccttcgttgggccgttgataatctcatcaacaaaggtgatcaaatcatcttgatcactgttcagcctccccaagctcatcacacccgaaaggagctttttgaggacactggttcacctttggttcctctggaggaattgagggagttgaattttactaagcaatatgggattgctagggatcctgaggtcataggtatccttgacacagcctccaagactaaaggggcaaaggcagtggcaaaggtgtactggggagatccaagggagaagttgtgtaatgctgtggaagatcttcacctggactctttggttgttggaagcaggggtttaggtcccattaaaagggtgttgttgggcagtgtaagcaagcatgtgatgacaaatgcttcttgccccgtcacagtggttaagggaaaacaatcttccaattcccgtcattaaatccgatttgtgaataattagtatgcatctatccatatgaagattgaagaaaaattcagaagtttgtttgatggcgcacgtgtgtggggaaatgaacatggctgtgacgaaacgaaaacactacgttactattcaataattgtgtttctggtcatgttgtatttacgtatagtaggattgctaaccatcattattgctttgtttacatctctcataatgataggtgaggtatatgtcatataattatccattaaataaactttgtaagtgtatttgaattggattgattttattacaagggaatatcttagaatttaaaaaaagtcggcccgg

SEQ ID NO: 127960 - DNA, 453 bp, Glycine max
  Clone ID: PAT_MRT3847_86552C.1
taaattcttttcaaaatttaaattaatcttgtcacgtaacatactagtaaaaactaaatttctgacacggtgtattataacaacagttgaataaaaagacatacccttgccagaaatgcctatcgcttttgcatggcagagttcagatcagtttccaatgggataacaccttctgaccaatggaatgtcacttgtaacagcttgtctgttttgactttacctgcacacaaactttccatcctcttgcaatactttactgtgaattcctccaaggacgggaaacttaaactccctttgtagaaccttctcagctttcctaaatgttcaagtaccaaacaattgagctgctgaaatattatctcattctcatctgattcatccccttcctctgttgaagacactatctcttcaattgaatcacctcgagccgaattccgagcttacgtaggcgtg

SEQ ID NO: 127961 - DNA, 4338 bp, Glycine max
  Clone ID: PAT_MRT3847_86553C.1
aaacatacataatttaggacacatttttattttattttgtcataaaacaatagagtcaagttttagtgttacaaacttacagttcatcacttcatttttattctccagggtcgtttaagacttataatcacacacattacataataaatagaatagaacagggtatttcaccactaactgggtagaccacacgcacaatttgtttttttattcacacccaaacaaatataataaaactgggccactttgttttttttttttcggtaggcaccaagccacttaattcgttgatctcctctaaccattttctttttggggaatcaatctcctctaactctaatgttggagtcattgccctgtcagaaatataacgatcggttttgcatggcagagttcagatcagtttccaatgggatatcatctccaaagttaagcagaggtgccacaagattgacttgtaacagcttgtctgttttgactgtacctgcacacaaactttccatcctctcgcaacgccatactgtgaattcctccaaggacgggaaacttaaactccctttgtagaaccttctcagctttcttaatacttcaagtttcaaacaattgagctgctgaaatattatctcattctcatctgattcatccccttcctctgttgaagacactatctcttcaattgaatcacaccaacttatctccattgttttgagttgacccaaacttcttgctgttgaggatgtgaacaaatatagcagactcttgcaactttctactttcaaatatgtcagattggaaaaagacactgtgcatggtaccagatttattgaactgaaacagctgattacttgcaatgtttctagatttctgagaaagggcacaatgccagagttctctgacccaatggaaacaagctctggaagggagtccgagcatatcactttcagctgtgaaagcaatcccgcctcatccacattaagactatcaaagcagaaaatctctctgaagaaaccaccaagcacctcaagcttctctatattgggcacccgttgtacaaatacatcggactcaaaatgaaagaacagagcaagaacttttaactcgtttaagtggtttccctggaattctccactcaaaatcatgttgagttcatgttgaccgagtgtcaggtgctctatgttgggtgtaagcttttgaaaacagacttgatttagagcatgtggttctagatgtgtaaatggcttcaacatgtcatactttaactttggcagatcacagagtgccaatgacttgacttgggggaacgtaagctcaacatttgaattccaaacattctccagatttggcagatcacagagtgccaatgacttgacttgggggaacgtaacctcaacatttgaattccaaacattctccagatttggcagccgctctaaaatcaaatcctccagggcaaaagggagtggtcccatagttgtcacatcaaatatgattttcacaaaatcacagtttcgaactttcaatattttcaatttaggcaataaaggaagtaaagagaagggtaacaccgcatctgataaaaaatggcagccgtccacaatcaaggtgtctaagtgagtgaagcagaagtgtggggggatatgcagtgagtgaagcctaagccatatctcttgtagtgggctatctttgaggtcaagatctgattcccatggccaacttgcagagtcccataactttttcccaaatgcctcccgcatggtagagttcaggtcattttccaatttgatagcatctgatgactcctcaagttcatataagtccctgttaagttgaacttgtaacagcttgtctgcttttagggtacctggacataatgtttccatccactcgcactccattactgacaattcctccaatgatgggaaacttaataaacttcctttatagaagcttctcagctttgataaatattcaagtttcaaacaattgagctgcggaaatattatctcctcctcatgtgattcacctccctccttagagactactatctcttcaattgaaccacaccgttttatctccattcttttgagttgacccaaacttcttgctgttgaggatgtgaacaaatatagcatgctattgcaatcttgtacttgcaaatgtgtcagattggagaaagacactgtagatggtaccaagtcttttaaactagaacaacgtattacttccaaggtttctagatttcccagtaagggctgaatccaagagttctctaacccaatggaaacaagctctggaagggactccaagcataagactttgagctgtaataggagtccagcctcatccacattaagactatcaaagcagaaaatctccttgaaggaaccatcatacaccacaagcttctctatattgggcgccagttgtagaatttcatatggaaatacattcgacccaatatgaaagcacagagtaagaacttgtaacttgtgtaagaagtttgtctgaaattctccacgcttgatcatctccagtcctatttcaccgagtgacaggcactgtaagttggatgtaggcatttcatcctcggtaggtgtctggaacatgtcacactgcagtgagcagtagtaaaaatacttgaacttgggcaaaccttgtagtttcaatgagctcacacagggacaagggaacgtaagctccagatttgcttctcttggatctgcattatcctctgcaacaatttctatcaatccctcacagtctttgacaactagtttttcaagatctttggctaatgatgccggaaacacacttgtaaggcatttacaatttttaacctttacatgttgtagaagttgcatggttagaattccatgaggatcttcattccagacattctccagttttggcagccactctaaagtcaatttcttgagggaaaaagggagaggtctagggaaggctgctgctcccaatcccatagctgttttcacgtcaaatatgctttccacagaaccacactttcggacttgtaattcttccaaattagttaagaaaggaagtaaatagaagggtatgacaacatctgttaaaaattggcatccgtccacagtcaaagagttcaagttactgaagcacgactttgggatccgccctgagtcaagccatatcacttgtaatggactatctatgagactaagagatgattcagtacttgcagactccaaaagcttgttgaaccctttttgtatggtggcattcaagtctccttcccactgccatttggcttcctcttttccttcttcattagcactaactatgttttgtaactttggtgcactcgcgccaccctccgtgaatctttccatccatgggcattctctcacaatcaatacttccaatgacgggaatttgaattcacacttcttgtaactgcaaaaacttttcagctttattagccactcaagttctatagtaatcaatttgccaaacactatttgctctgcttcttcatttcccttattggttactatttcctctaattcgtaacattttcttatcttcatggacttaagttgaaccaagctttttgccgttgaggatgccattaaattccttaatcctttacaatactctactttcaaatttgtcaagtaagccaatgataccgagggaggagccaaattcctcaatttgtggcaccaatgtaagctcaaaagctctagtctctgtagaactggttctcgttcaaatcctatatcctttatctccgaccaccacaaatccaattccttcagctgtaatacggttcccaaacgtgactccgacgactctttaagcaaatatttagcgcccgacaagtataacttttctagatttggcattctgtacagaatttgacagagacgttcatcatcattaacatagtacaagttaagctcttttaaacggtgcattcgatgcttcacagtgttgctcaacaaccacttctgtgttcgtcaaagtcaatatccaaatactccaagttggggaatatcttttcagctgacataactgcttcatcttcttcattgctcctttctccggttccgaatgtttttagcttcttgttacatttctctacttccaacttcttcaattttggacactctataggatgtctccccctgtagaaatgctggatgcttcgtaggtcatataagttcatgtaggttagttcaggaaacactaattgttcagtgtttgtttcggatccatcttcagaggcaacaatttccacaattccattcacaccatctgaccgacatgtattcaagctttggaacatcggacgcgtgg

SEQ ID NO: 127962 - DNA, 779 bp, Glycine max
  unsure (1)..(779): unsure at all n locations
  Clone ID: PAT_MRT3847_86554C.1
ggaatatcatgggcaccaagaagaattgagatgctgctgagcatgtcccttgtaatggttctttggggtgtcacattggctcaatctgatcaatcaagtagttgcaccaatgtgttcataagtcttgctccatgccttgactatgttacaggaaatgcctctatccgttcttcttcttgttgctctcaacttgcctttgtggtacggtcacagccactgtgcctatgtgaggttgttaatggtggtgcttcatctattgctgcaagtttcaacatcaatcagactagggctttggcactccctactgcttgcaatgttcagacacctcctattacctcctgcagtgcctcggcttcttcctcacaaggtgtttctgtttcctactttccaaattccccttcaggaattggatctagcactgtttcatcaacgatcggaggcagtagaagtgtcggtgcctcatatcatggaaattcaagttcaacaaaattgccatgttctttgcttgtcatcatgtttttccttgcaacgactttgactttcaccttcaagaccatgacctagacaacgtcgttgcacatttttttaaactttgttattatcttctactgcttcgagcatactcacttactggtatcatttgtcctttatccttattaaaaaacttaggattaaaatttccccctgtatatttcattgtacatttttatttntcctgtttcctttctatgtgaatggcctagagaatataaacctgtgttttgatttttcaaaaccac

SEQ ID NO: 127963 - DNA, 265 bp, Glycine max
  Clone ID: PAT_MRT3847_86555C.1
gataaatcatactgctctatagaaagaagccgactgtactgtagagcgacttttgagttcaaatgatgactgagtttgcagtgttgagttttgacaatcgcactggtgaggaccgaaaccatggtttagaacattttaaatatccatcgtgaaactggggaatccatgagctgtgttaatcattgcagttcgcacgacggaaattacactgtcgagaaggtgaccaaggtgcacaacctgatattcatggaccataggttcaagg

SEQ ID NO: 127964 - DNA, 367 bp, Glycine max
  Clone ID: PAT_MRT3847_86556C.1
ggctccttcactgatctctaccgcagctgttaccactgtcaaccgtgccggtgcccgcatggacgctccattcactggcctcaagtccatggctggctaccccaccagaaagaccaaccacgacattacctccattgctagcaaccgtggacgagtgcaatgcatgcaggtgtggccaccacttggcaagaagaagatggagactctctcctacctgccacaccttgatgatgcacaattggcaactgacgtagaatacctccttaggaacggagggatcccttgctaggaattccagttacagcacggaatcgagtaccgtgagcacaacaggtcaccagcatactacaatggacgctactggaca

SEQ ID NO: 127965 - DNA, 466 bp, Glycine max
  unsure (1)..(466): unsure at all n locations
  Clone ID: PAT_MRT3847_86557C.1
ggaatatcatccccagttgcttaaagattacatgaatggaactgaaggcactcacttcctttaccctaggttgaaccgtaattcctgtttctttttttactgatgtaacataaatacccatattatgtatacattatatgcaatgcttatcatttacggaaatatgtctcttgcagtgcagtagatcaattcagaaagcactttgcttatcttgaggaaaatcatggtaaaagtggcccagtgattcctccagaaaggaagcatgtctcccttccaaggtaagactaacttgcactaaccatggaatgctttctaattacgatatttaatttctggctattaatgttggttcatatgtcaagtttgttgctttatttttaagtaaatattttctgatggatatgttatatatattatatataataatttccttttaatttttgaaggtccatngttcactctagta

SEQ ID NO: 127966 - DNA, 810 bp, Glycine max
  Clone ID: PAT_MRT3847_86558C.1
ccacgcgtccgcattgtagtagtcccactaattactttataattattgtaatttattagaaatggttactataagtttagccttttttaggaaagtgtttagtctatataatgtatcactctgtccagttttattatagataataatattcggaaattttccattcaagtctcttgctcattgttgtgtacagattgttctattgtttgaaaatatgggttttgataaagaaaccatcggaagaatacttgctcgctgccctgaaatttttgctgccagcattaataaaactctacaaaggaagattgagttccttggtagagttggtgtttctaaaactttccttcctggggttatcagaaagtatccagaattacttgtttctgacattgacaaaactttgctacaaaggtattgttctgactcatcttttttatattttgctgacgacagaaggggtatcatatttgtttactctttcccaatcaatggttcaattcaatattttgtttactctagtattataaaataattctccatgctttagattttttgatgatataaccatggtattgttcagtgcaagtttcacttttctttgatcattagatatgaaaaataaaagaaaataatgatttcctgatttcttcaactgcatcatgagtcatgaccactgcataattgttacatcgcatcaacagaaaagtgaaacaagaaccttgtttctcacctggagtgattgaatgattgaggtggtggattgccttaactaggtctatatggcagcataggaatcattggattttccaa

SEQ ID NO: 127967 - DNA, 607 bp, Glycine max
  Clone ID: PAT_MRT3847_86559C.1
agcttaatacattttttaaacaaagattagattaagaaaacaaagcaaaataaaaaatgaattactgaagaagaaattaaagacactaatcatgttaattagctggttataagattttaaaaatgactgccacaggaatgttgacaacgtgaccttgattaccatacagcccaattctcccatagctagcagcagaactgttgttggttacattgaagatcacagacaagacaagtctctccccacttgcaagagagaaataattaggagatactttcatagaagtgccatatggagcactccaaccaacattgtatgtttcatttccagcaatgttttggattattctttgtaccactctagattggttcaaccttgctattgtgattgagggcaagttcagatcagggccatatagtgttgaattataagtccagcaattttgaccggtgtagtttagcactgtaggagttgaaccattgataccacataggaatgacatgtagtcatcatagctagaatcaaaaagcaatcccggatttaatgctgcagtagcattcacaaaaccacttcccatgtcaaagggagttgctggagataaggtttt

SEQ ID NO: 127968 - DNA, 310 bp, Glycine max
  Clone ID: PAT_MRT3847_8655C.1
attaaaatcttttcaatagctctccacgggaatcaagggtgcaaaattatccagacaacaccagaagactgcaactcaacagcgagacattgcccactgaatgaagagagaaaaaggaaaaaaagaaaatattcgacaaaaatagaaggaaaaataaagcgcgctatcacaaggattgtacaacactgaaccagccactcaataatcatgaaggaaaattcgaggtgacccacagtgcatgacattcctcaggttgacaacaacaaatgctgcctttgcctggcgcttcttatcctccaaactggctttt

SEQ ID NO: 127969 - DNA, 460 bp, Glycine max
  Clone ID: PAT_MRT3847_86560C.1
gtgaaataacatcaggtgaaaaatgcttgaacatagccatacttcaattttggaccatgtatatgaatgagtggagtaatggcttgggtcatcgatcggtgtatggattccttgagcctcaatctatacacaatgcaaaggatagacgtgggcaatgtgaagaatatattgaaaaatggcttaaggaatctcaacgacaactgtacataggagcttatttgaatgacgcccattggcaaatggttgtgttgtgtcctaaagacaatgtggtggtctagttttgtttagtgcgtagaaggcctgatgttcatatcaaaactgcaattaacaagttaagtaatatatttttagtcgtttaacctattttaaagttggaggctacaattctgaacattatattaacatcatattaatcttccaatgcaatgcatataagaaattaaacacgactgctgatggg

SEQ ID NO: 127970 - DNA, 429 bp, Glycine max
  Clone ID: PAT_MRT3847_86561C.1
cgggtcagccccgcgtccgaccacttgtacaactcaaatttccattttcatacaaggttacatttctgttacctagtactgactacagcgtctagtctgtctccacccacttagcgtcttgctggcaaccaacctttgatcttgaggtctctggtcttttttgtataatcaacaagtatttgaggcttctatttgatactcatcgagtcttcattccaccgagtcagttcatttttgaacaaagtgatatcttctcattcttaagccgacaatctatactccacactttagttgttccaccatattttttgttacttatactacaccttttaagtgtttgtagcaagaacttttgtgtgaggtttgttgcaatcaagagatatctaaaccttctatttgatactaaattaatgtttagaacggcttatt

SEQ ID NO: 127971 - DNA, 350 bp, Glycine max
  Clone ID: PAT_MRT3847_86562C.1
tgcccttcttgctaatgtttttttttccccatacgccatgctacactatgtccaagcttgagattaatagcagggacacatgtccgctgttgtttaccactgatcaatactgctagccgagcccaacgaggggtgccctgctaacctggggcacatcaacactgtagactgcggccaacatggaatatctatcttctaaaaatcaggtccctgctttaatcgctccattagcatgagcgccctggctactattcatggcgacgacaagctattcagaattcacatgacagggagcgagattagatggggactgccagatgtcggatgctacatcctctaaactcatgcct

SEQ ID NO: 127972 - DNA, 353 bp, Glycine max
  Clone ID: PAT_MRT3847_86563C.1
ggggaaacattggacaacttccttattctttttccatcataaccacatggaattatctttattctcaaattcccattataaccacatggtatgcaaaacccagaccttacgttctattttaatggtaagagagataaaggggataaacacattacttgcattaccctgccttgtcatttcttgggactagcagccacaacttattacccacttaagcaaaccagtcttcatcactttcattagcatcctctgaagcctttgaaaatttttcaatggcatcacccttattatcaccattttcaacattagcttccttggtttttgccctgatttttataccaagatttttgccc

SEQ ID NO: 127973 - DNA, 310 bp, Glycine max
  Clone ID: PAT_MRT3847_86564C.1
aagccttaatcgtctttaacttaaaactgcaaacatgaaagggaacttcttacacaccatgaatatcatacttaaaaggacttttttactcaaattcttagtaactgcgcaaaatagcttttatgacatatattatggttggccatgtcctgattaatgaccataaatctcatgactatatttacttaaggccattgaaattcaaaccaaggacgaccatatcatcctgtgaattcaatgggtttaatcttctatgggacgctaactagtgccgtttattgccctgcttctgccaaacctgatttcccat

SEQ ID NO: 127974 - DNA, 304 bp, Glycine max
  Clone ID: PAT_MRT3847_86565C.1
cggacgcgtggttttggtggaaatttttatgtacggatttctgtctaaaatattttttctgccactgcaattataaaaggttcagttaaagcgtctgaaaattttaggctgagttatatatatcatgtctgtcatgagggggtttactttttcagcagttttgtattattcaaactgtccatgaaaatatactggcaatgtgtataggctcctctagtttagtaaaaaaatgtgttgtaaatgggacatgtagggtgggtttgatttaatgaatgaaataggtgtgaaagtaaacttagatgac

SEQ ID NO: 127975 - DNA, 359 bp, Glycine max
  Clone ID: PAT_MRT3847_86566C.1
gtgcaactcaaattgtattgcaccttctcacccgaaagaaaccctaggctgggtggctaaccaacgttggcgacgttgttgacaattgtagcttgcattaaacacaggcggcgcgccgggtgtagaagaaacacactagccagcacatccatcgaatgaccatggtttagcgctcaagaaccttcccagaaaaaaaaaaacttgtgtagcctcatcaaagaaaggacgaactgcactcaaacaaagactggctaaccaaaatggataagcctgttctcattgcactgtacctatgcatccattctactattcccaatatcgagcgcgacaacgatctctgcccaacccggaatatgcta

SEQ ID NO: 127976 - DNA, 178 bp, Glycine max
  Clone ID: PAT_MRT3847_86567C.1
tgtgctatcatggtgaaactctgataggttcaggctaacaaaatggccatacacagcaagagatgtaatgttcttacgaggcaacctcagacatacctatgcctcaaacgatatggcgaaaaaactatggcgccttctgaataaccaccaatcatatggaacagtctcaaagactttt

SEQ ID NO: 127977 - DNA, 452 bp, Glycine max
  unsure (1)..(452): unsure at all n locations
  Clone ID: PAT_MRT3847_86568C.1
gcacgaggcaagacacaatgaagctcctctccactatctgcaccctggccggtttcctggcactgttggagccggctcgcgcatacacgaaccccatcacgatcaaaaactacaagatgtacgatgctaaaacaggcgagtactttggcgtcaagggcgtcgactattacccacgccccaatgctggagagctcaacgagaacaaccttgatctcttcactgacgactacgaggcgatctggacgcccgatctcgcgcagcttgcagcactcggagcaaacgccgtgcgcctttacgctgtcgacccgtccaagtctcacagcaagtttatgtgtgcactgcgctcttatggcntgtacccgctcntggacattggtgcgagctgcgaangatgctccatcacgaaagaaaatatccggcttgtttactcctccactctcnagaccggggaa

SEQ ID NO: 127978 - DNA, 616 bp, Glycine max
  unsure (1)..(616): unsure at all n locations
  Clone ID: PAT_MRT3847_86569C.1
acgagctgggatggtacttaaagaaatgggtttggcaaaaacagcatcttcagctgtaaaacttctgatagatattggatattttcctgtacatatcaatcttgatctgttgaagttgggaattcccactgatcattcagatgaaatcatatcggctgctcaaagtcttttattggactcatctgatccagacgagattgataggaagaatcttaccgatttaaaggtctatgccattgatgttgatgaggctgatgagcttgatgatgctttgagtgcaacaaagttgcaagatggtcggattaaagtgtggatacatgttgcagatccaactagatatgttcaacctggaagtattgtggacagggaggctatgagaagaagaacttctgttttcttgcccactgctacatattctatgtttccagaaaatcttgccatggngggcatgagtttgagacaaggagagctttgtaatgcagttactgtatcagttgtgctgcataatgatggcagcattgcagaatattcagtgtttaactcagtgattaaaccaacatacatgcttacatattagagtgcatctgagctacttcatttgaaccttcangaagag

SEQ ID NO: 127979 - DNA, 491 bp, Glycine max
  Clone ID: PAT_MRT3847_8656C.1
cagataagcgttgcttatattgagagcctaagacactcactcactagcggctagccttaatagaacaagacacctttattggatttttaggtaccaagacccctatatatgctgaagatatttaatagctttcattctgctttagaaattgagagaccaagagcaggtaataccttccgatttatatctaaccatatttatcagataattaaaatatcgactttggcttgttttataactttaatagcttgaacatcaacatgaatctcaaaacacacctataccatctattggaggacatcaaaatctcattctgtcttaaacatctgcaactttgctgaatgattcttacaccaagaattaacgcaaactatgtgggaacttgcaacacccctctcttcacaaatgcctgattataaaaacaagcctaccaaagcactcgatagaccaagatgtgatataggctttaatatcatgttaaatcttatctt

SEQ ID NO: 127980 - DNA, 486 bp, Glycine max
  Clone ID: PAT_MRT3847_86570C.1
tcgttctcacagctgtttattttcttcctcttctcaactgtgttcgtgtgtatgcatttgagttgaaagccagactcaaggagctgaaagacaaaagaagaaacttggatttgaatcagccaaaatttgagttacacgtatgccctttattgcctttcaagattttctgggctttcttgtccccaaaactaatttgattgcagtgggcacggaattcaagaaaaattctcatctgaaatgttgttttgtcatcattgaaataaatttattttttttcatttctaactcaagaaagatgttgagcatatagtttgaatttcccatggaagcataattttttgagatatcatgcatagtaacctcaccaaggcagtattcatattttaaattattagtatactaccatgtcttgaaaaggtgcttagctagctatgcagatgaattatagttataattataatgatgataatctttctgagtgatttt

SEQ ID NO: 127981 - DNA, 421 bp, Glycine max
  Clone ID: PAT_MRT3847_86571C.1
tggggggggggggggggggggggggggcatctaaccgcacgccgaaaatgacttaattaaaaataaaggtaactagggagtggggaaacgaggggtcctattaaaaagataacactgccccaactggggtgtaatggttattgcggagaaaaatgggaacatgttctggaaatgatatgatgctgtagtaggtaggctgatctaacaatagtgtgacactgtcgtagcacaagtattagttgttgtcttgcagctattattattgcccctgttattgcagtgtgcagagatactatgcagcaggcccggctaaatactggctattgtgggcactggtgttgtagaggtggtgggtgttatatgtgccggcatagttagttaggttaagctggtggggatgctacgtgtaaggggtgttggg

SEQ ID NO: 127982 - DNA, 558 bp, Glycine max
  Clone ID: PAT_MRT3847_86572C.1
ggctcaatcacctttacaatatcagaaacctagtgtccaagttattacagctatgcaattatggcacaacttaaaaacacaattcccctaagaagattccaatcattccacagaaaagtcatgtctttagccatattcctattctttgttctttgtattttcctttattttaagcagtttaatgcaggcgatttcattcagtaaaatattactggagagatcgatggtcataacatccataagcagtttcggtaaccttttcaccattttgcttgattctggagctaatgtgacagtaccaggcactacacattactgattagtagaattcaactcagcagattatatattgaaatctcccagagtcagagtacatggaggaatgatattccgccttggttggtatctagggaatggcacaccaaatactggctgcacaccatattctccaccccaaactggaggcattccaaaatgggtgggcgagaaaataatgtttcttgaaatcccctgtcgtcgaaaaggaaccgcttgacgcctcttctttggttcccagga

SEQ ID NO: 127983 - DNA, 387 bp, Glycine max
  Clone ID: PAT_MRT3847_86573C.1
atcctttatatctagtggactgtttataaatccaatacatggatcaaaattctaggattaatattcatgttcgcggtgtcacctttgatgagcacacgatatgaagggcaaagagtagatgatggatagtttctcgattggaaccgctgattttgctgaccttttataagggaacttgcttgaacgcatcaacttcaatgaactctttatgggaatgaatgactatgaatatgtcttgccggatctgaatagggaccctgagatgcttgctgagttctccctaagaactgatgaaacacatatggcctactcatgagttacagtggaaaataacaacaaataatcctatagcaacaacaacaatgattgcactaatatagctactac

SEQ ID NO: 127984 - DNA, 274 bp, Glycine max
  Clone ID: PAT_MRT3847_86574C.1
tgtagctatagttgttatgtgattgttttttaattgctgtaggatcctgttctttcagcaggtgaaaaataaaacgcagttcaaatttcatggttttaattttcaactcagaagcactcaaaaatgcaaaatgtgataatgggcacttgtttaaaagaattagtgtatccagccttcactccagctggttaaaaatgttgcacttatcagcaaccctaccactttcatctgctgaaaggacaaatgtgcttggttttactattatgtaatcaca

SEQ ID NO: 127985 - DNA, 1155 bp, Glycine max
  unsure (1)..(1155): unsure at all n locations
  Clone ID: PAT_MRT3847_86575C.1
ccacgcgtccggagaggacaagagaagaagcagggcagagtaggcgccgaggtgggagtgagaatttaaataatcttcatcaattcattcactcattcgatacaaacaaccaaaacagaggaaaaggaagaatgggtatatttgaaccttacagagcaattggatgcatcacaagcagcgtccccttctctgttcaaaggctcggcaccgaaactttccttaccgtcagcgttggaaaggcttttcaggtttttaactgtgcaaagctcaatttggttctcgttggtcctcaactgccgaagaagattagtgctcttgcttcctatcgcgaatacacttttgctgcatatggaaacaacattgctgttttcaagcgtgcacaccaggttgcaacttggagcagccataatgctaaggttaagttgcttctgttgtttggagatcatattgtcagtgttgatgctcgcggcaacatgttcttgtggccatttaagggaattgatgagaacctttttccatttgggcacattatgctggatgagaaatttagccccagctgtataatgcatccggatacttacctaaataaggttcttgttgggagtgagcaaggtcctatgcagctttggaacattagcacaaagaaaaagatttttgagttcaagggatggaattcacctatctcctgttgtgtttcatcccctgccttagatgttgttgcaattggctgtacagatggaaggattcatgttcacaacattcgttatgatgaagagttagttacatttacacattccacacgtgggttcagtgactgccttatcttttagcactgatggacagcctcttctagcttcgggaggttcatctggtgttataagcatatggaatctggaaaagaaaaggctccaatcagttgtaagagaggctcatgatagtgtgatcacatccctacatttttttgctaatgaaccagtgctaatgagttcatcagcagacaactcgattaaaatgtggatttttgatacaagtgatggtgatcctcgccttttgcgcttccgaagtgggcatagtgctcctcccctttgcataaagntttatgccaatggaagacatattctttctgcaagtcaagatcgtgcctttcgccttttc

SEQ ID NO: 127986 - DNA, 199 bp, Glycine max
  Clone ID: PAT_MRT3847_86576C.1
acgagagaactagttcttcactctgctctcacccttattcctctctttcctttctttcttctgcaacaaaaatcattggtctgggcgacctgcctttgttaagcctgggcagcccaaggatgaactagggagagaatgatgaatggatgaggatctccctgctgtattattgatggggggaggtgaaggtcttggggcc

SEQ ID NO: 127987 - DNA, 1042 bp, Glycine max
  Clone ID: PAT_MRT3847_86577C.1
ttcccgggtcgacccacgcgtccgcttgaatttctctgatgtgattaggtaaactcaaatgacttttgccttaaatagcatctatcacgagcctttaaaaattgccaggtgagactgtcttgaataagtgcccaaataggctcacttaagcaaggccttcaaatatgatattggcctctagaacttctctcacttaagcgaggttgcactgcagcactggtaccatctcaatgcctcaattaagccccaggatgactcgcttaagcgaggctgcatcttcaaggagctcgtgctccacccccttgtcctcgaagtggttagtccccaggcatatgagccatcctacatgagctacatagtcctcctgagatgggaaaggatagtcaatggctctattgttggccaatgtgcgttaatctcatagagatcacatctggcctctcatctactctcgcaatggcatggtgcgaggtggtgaaggaggtgttggagtcactgagtcatcatcatctcttggacattgttggtttgaatctgatgcatgggcgggcaaaagcagcattcacatccacttcattgtgggcacacaagactgtgatcgaagctgggtaaccagtgagtcttagtggtggaggtgacattattgtggaggccctgagaaatgatgcctccaagatcaatggacatgcctttgatgatggcatagaggagatgagccttgtcagttggaatgtcttaagtatgtgaattaggatagatgttgaagagcagagtgatcatccaaatctgtgacaaagtgatgagttcagatctgaggatccattggcttgcccatctccttaaagccattagtcaaattatttgaaattttaaaaagtctcaaattttattcgatacgtctgttgtgtaatgcatcgaggaatgtaagaaagagccgagtgaaatctcatgttggttttcattaaactggaagcaggagttttttttttttcagttcatacaaagttgataaaaataaacttatttctacataagttgaact

SEQ ID NO: 127988 - DNA, 217 bp, Glycine max
  Clone ID: PAT_MRT3847_86578C.1
cctctctcactttttcctcaaactccctatacatactctcactcactaattttcttcactcttcttgttacgtcgtcatcgccattttccctcctaacctagaagaatctaaaaattttatcttcaaaacaacacaacacataaaaaaaaaaaaaaaccctttttctccttagcctgggattcacccaatttttccccaatttccccaaatttcccc

SEQ ID NO: 127989 - DNA, 261 bp, Glycine max
  Clone ID: PAT_MRT3847_86579C.1
gcttcctctcttctctattctaattctatgggacactcttttttaaaacctattccttcaattcccaaacaatggcgaaccttttttaattcaccggccggtttttctttttctttttctttgggttcactcggaccgaattcacttgccttaattggtttcccttccgcgtgaactttcgagagcggttggccccttggcggcacgcccttgtgtttttgcgccttaacttcttcagaggccccgagacccgggggttcc

SEQ ID NO: 127990 - DNA, 539 bp, Glycine max
  Clone ID: PAT_MRT3847_8657C.1
tgtatgttgtttataatatacttttggggggagaaaaaaagccttatgaggtgaatctatacaattatgcgcaaacagattgcagcgcaataactttgccacaactttaggaaaaaaaatatcaaatcatttctaacaatatctctacaacagctcaatatgaggaattcctctaatgaatcagtcgatcaccacaccataaaaaaaaaaaaaaaacttatttcatgccctacgcaactacaatggtaaagaaaaaagaggtgatattgatggaagtaaactaaacaacctggccataataaggattattttactgcaagctacttggaagacttatcagaatatggataacccttttacactactttggaaaaagaagatgcagaacccttcccaatagcttcgtgttcagaaaaagtacaacccttctcaaccacttaggaaaaactaaaaaatacttaagcttcaacgagcgtacctactctttctgggacagtttttactgtagactctgtcttgcgaacctttccccatctata

SEQ ID NO: 127991 - DNA, 388 bp, Glycine max
  Clone ID: PAT_MRT3847_86580C.1
atgacatccaactcgcggtagtgagcgaaacaaacactttttgaattcatgggctaaaagggaattaaactgaatgagcttcaaatctcgcatatcccacgggactgcaggctctgtctgcttccaatcatgcttctccccattcgcactacgactatgtggagtgtttgcctagtccttgaaggtcaaccatgcctttgccttgggcctacccccttaagatcaccattctccttctactactcgccgcggtcataattgcatgctttactctcccaaaccataagatgatgaaggacttcttattatggtttgatcaccatcttgttccctggggcccaactgttctggctgatgctaacattcctttgactgccttgcctgtttc

SEQ ID NO: 127992 - DNA, 247 bp, Glycine max
  Clone ID: PAT_MRT3847_86581C.1
ccaagaaaaaacaaacatatccggggtggtttatttaagcagagtcattccaacaaaattccaaacatgtcaatatctcatatacatatagggcaggcagtaccccgctttatcgtaggtaatctgttatcttaccgacaagcgcctaaagaatgtctttttcgaatgcaatgcttatatcaaatgctttaaggtttgcattttacctgtcatccacatttttccacaatatttgacagaaacttga

SEQ ID NO: 127993 - DNA, 166 bp, Glycine max
  Clone ID: PAT_MRT3847_86582C.1
gtcggaatttcgctcgagcaacacaaccacaaagtctcccatctgacaggtttgaggtttgaatccacattgtcttcttggggtgagataaatgtaaatatctatataagtgttcttttagctccaatgtttttcctgccttaggttgagacatcatttcctcctc

SEQ ID NO: 127994 - DNA, 106 bp, Glycine max
  Clone ID: PAT_MRT3847_86583C.1
aaattccaataattgggccgaacagcccgatgctgatggattttgggtgggcggagcctccctgaagccggatttcgtggacaccataactgctgccactgcgaag

SEQ ID NO: 127995 - DNA, 606 bp, Glycine max
  unsure (1)..(606): unsure at all n locations
  Clone ID: PAT_MRT3847_86584C.1
gaaggaagttgattttaagttatgcgtaaactttttttagctaataaaaaaacttattttgtttttctttcttattttcttctttataactgtttaggaagaaacatattcaaacaagacttaatccaaattttaatagtgaagacatattattggattaagtcctttaatattttcttttcacattgagagtgattttcacgttgaaaattcttagttagtgtcattcttatactcttactttctttatttctcttattccctattttaattacagggaaaactgttttggcatttcctaacaatttatattccctattctcttgttctcatcgacaatgaaaccctatcagaaagaaatacaacccgggcaagttagcaaatctcaagaacctgctactaattagcaacctatgaatttggaggaaagaataatatgacttgccatagagattgaatgagggcatgataaataaaataaacaggagggagatacacttgactgcacgaacataattcacaaaaataatctgcaattatgattcatgttatacatgnaaaactatgtangtccaagctgggaagtaatctcaactcatcaaaaca

SEQ ID NO: 127996 - DNA, 182 bp, Glycine max
  Clone ID: PAT_MRT3847_86585C.1
tgctcaaccccaaagaaaacgggggcccattgttttgaggaccccaccatcctatcatctgagacaccttctactgttagcgaagcagaggccttgcatgaacttctacatcaagttgagcaattcacttgctgaagatggtcttaatcacaaggtgagctagtgccttcaagcattccggt

SEQ ID NO: 127997 - DNA, 354 bp, Glycine max
  Clone ID: PAT_MRT3847_86586C.1
gttatgattttttttagattgagatcccaagctttcattatggaaaagcctccataactgcctcttccatgcttatggacagctagtgtatcatatatataatgcactgtaatgcggacgttgattgacaaggcaaagactgagatgacaatatgccaacatatgatactattgtcgaggaagataaacaattgatcgaggcacaagggactttcactcttcagacgcggcagacattcaagccgcggaaccgtctgaagaaatgatgtcacagcctgctgtaccggtcatgttatgacaaaaaaaactgtacaaattactcaagtaaaagaactatttggatggttttttatg

SEQ ID NO: 127998 - DNA, 371 bp, Glycine max
  Clone ID: PAT_MRT3847_86587C.1
cgtcttttgtcacctgttatttgctcagcagtaccatgacatgtatcaaagagaggagaggatgagaatgagcagggaagagagggcaaggaccccttatgttgattacttgaggccaatcatagctgatggcgacactggttttggtggacccacaacaactgtcaagctttgcacgctatacgaggagagaggtgctggcggaatccacattgaggaccagtcttcagcgaccaaaaagtgtggccacatctatccaaaagagacttgatgccatcagtgaacacatcaataggcttgacgctggacgacttcagtttgatggcatggtgggcggaaactgttctggcggcatgaacaggagcataaac

SEQ ID NO: 127999 - DNA, 599 bp, Glycine max
  Clone ID: PAT_MRT3847_86588C.1
gagagttatggcaaatgctggaaatctgatatcaccaaggaactttaatccaataatattcaatccataccactatgcaactaagctcaaaaccttgaggttgctctctcggtttcactcttacaacaataatgccactgtcactgcttccaaaagaaaggatgacttgcaatctccattgattgggaagaacacgagcagggctcctcgccgtctgatcacaatatcaccaggtgatggcaaatatcatggggattggacttgtgactatcgcgtctctttgcacgacctagagttacaggatttgattgaagatgataataactcacgtaaggatgctcaagttttcatcaatctctctatccaaaagcatgctagctttggtttatcggtggatggaagagtcaccacatccttcactagaaaatgtagcacctgttcttctccgtattgccgacagattgatgcaaaatttaacgtatgggttcttatagcacgtagagatgaccgcaagataccgctacctgatattggaggtgaccctaatgtgatttatgttagaccgggatacgaagttgatcttgattctcttgtgctca

SEQ ID NO: 128000 - DNA, 292 bp, Glycine max
  Clone ID: PAT_MRT3847_86589C.1
tgcagcctgagtctgaggctgcacaagtgcaggttgcaccagtgtgttgtcttcctatcacgtatgatcgggtatgcggtccggctgatgtacacgcggttgatcaactattcgaagcgtctgtcgaatatagttcagatgataaagcattcactcatgttgggcaatatggctgtaagttcatgtttgtggaggaattgggtcgaatgagaaaagagttcactagatgttgcgatgaatgccggatcctgttgtcaaggtactctagatatagtggtacaatgactcatag

SEQ ID NO: 128001 - DNA, 408 bp, Glycine max
  Clone ID: PAT_MRT3847_8658C.1
ggaacaaggggccataatttataaaagcctcgaaagaaaaaacaacatagggagagacttttacctagactgggggacccacacggtgaaacaaccaaaagggaacctggggcccctatttgaacgcactttatttcatataaatggatcggacccacctcaatggtggagaggggaaggaaccactgaatgttgaacaggggaataagaaactcaaagggcctgttttcccctttggggcccccgaggaaaaccctccattggactccaaaggtcccaacaaggggggatccccgccttataagcttctctctcgggggtggctcgaataaaaccgcttttggaggggaaggatcttgtggctccttgaaaatcaattttccccatgggggggagcccgcccttttt

SEQ ID NO: 128002 - DNA, 357 bp, Glycine max
  Clone ID: PAT_MRT3847_86590C.1
agtttccatcctctatatttcttcaatcttctctcccttctacttctagggtttcgcttctgcaacggacgaccttcttcaactcatcaaagttgactttgtgagccaattcaatcaggcttgagaaggtatcctagtgttgtttgttcaccttcatctccatgatggaatactgtaaagatgtcctcagctgtcttgattcggatacgtctcttaagatattcatgtgtctggatgatctggctgatcttgttcgggttacttgtgtctcgcgatcttggagacactttggtgagttatactagttcaaacaaagcatttgtttctcaaccgatgcctcagtttcatgaaaattca

SEQ ID NO: 128003 - DNA, 199 bp, Glycine max
  Clone ID: PAT_MRT3847_86592C.1
cccacccgtccgacacgcttccgagttcaaccggccgtttttttttttgtttctcatttcttctttgagggcaaaaaaaaataaaagttttcctattgttaaaattacctaactctggcaaaagaaaaggtttgtttttgtctcactgtgtaatctcgatggctagacttctaaccaatccccggcttttataaactac

SEQ ID NO: 128004 - DNA, 528 bp, Glycine max
  Clone ID: PAT_MRT3847_86593C.1
ccacgcgtccggacaaaactgttaagctctgggacatcactaccggtacctgtttaaaaacattctcacatacggactatgtgacttgcatccagttcaatcctgtggatgacaacttcttcattagtggatcactggatgagaaagttcggatttggagtgtccgtgaccgtaagattgaggattggaatgatcttcatgagatggttaccgctgcttgttattcccctgatggacaggttgcaatggtgggctctcacaagggatgctgtcatatatttgatacatctgagaagaagcttctgtacaaaagtcagatagatttaagaattaggaaaaagaaatctggccagaagaagataactggattccagtttgctcctggaagctcatcggaagttctgattacttctgcagattcaagaatacgtgttgttaacggcgatgaatttgttcacaagtttaaagggcttcggaacacgagtagccaaatctcagcttctgtagctccgaatgggaaaacatcat

SEQ ID NO: 128005 - DNA, 309 bp, Glycine max
  Clone ID: PAT_MRT3847_86594C.1
gatcgtcagtctagcgatcaattgggggattgctgggaattcaagtgtatgtacatggatgccgagatggttcttctagagctggccattgttgttgctatatttatctcgacttagactttagccatcaagttgtggtggcagttaatagtaatgttggggctgaatttttattttcaaaatttaaactgtggttaactttagttttgtttatcccttctgcagggtaatgttatacagcattattctggaccttctgtagagtgattcagtgtaagtttatgacattgggctctcatattgcatgct

SEQ ID NO: 128006 - DNA, 238 bp, Glycine max
  Clone ID: PAT_MRT3847_86595C.1
gaagattccgcatcatagagtataaaagatggcgcggttgatggcagttgttttgtgcgcgttggcggagctactatgctcctagtttgtccctattactttgaagtttcgttggaccgtacccgacccagttctttggttgaagttgtactttcacaacattggcagatttgcaattgaatttaatttatttgcttacaaaaaaaaaaataaaaaaaagggcggctcgctactattt

SEQ ID NO: 128007 - DNA, 350 bp, Glycine max
  Clone ID: PAT_MRT3847_86596C.1
ctcatcttatcaacacaacatcccgcccttcctcctcttccctcatatatcccgaccctacactctttgactttaaacagtcactactacttcttcttctcaatcctaccagaactcgaacaaccatgtccaaccttatcgctactaagcgggtcgacctcctcgccccttacctcctccttgaccaggggtcgcgtgtgcaggctgagtacatttggattgacggtgatggaggtcttccatgcaagactatgactctggataaagctccggctttcgtcttcgagctcaaagagtggaactttgacgggtcgtcgaccaaccaagcacccggtgacaactctgatgtc

SEQ ID NO: 128008 - DNA, 364 bp, Glycine max
  Clone ID: PAT_MRT3847_86597C.1
ttatataccactaaattattttttacattttattcactcactctcatttaaaatatcgttatcttatataataggtggtcatatatattatcattaaattcttaattcttatctctattacccctataaatattttaccttaaaattatattttttggctcaccttctattttaaataaataaaattcactaaataaaaataattattactcataatcttaaatgctcttaaagaaacctactactactaattattataagaaaaaaaggaattttaattaagccttactattttttgttataacattaataaaaattcctcctttatttaacactactttccttttattaattatataaaaca

SEQ ID NO: 128009 - DNA, 845 bp, Glycine max
  unsure (1)..(845): unsure at all n locations
  Clone ID: PAT_MRT3847_86598C.1
aaaaacataaaagactgctcatgtatgaaataaaaaaaaatgtcagttatttttgcagttatcatcatcttcaccatcatcactcgcaacaacctgacggattgcatttgccttcttcaaaattgctgtaactttgtcgtttggggtgggaccagtggtatcatttgagtttcctccttttgtggtttttttttttttttttttaattatgatttttttttcaggaactttttataaacaatcgcctggatttgtgatctcacaatacatagggtcagcctgattcaactaacgaagatataaattcatcatcatacgataatgaaatgaaactgcactacacttaataacagataaacaagatttattcacacatgtgtacatacaacaaagcctcaagcaacttcacttcaagaggctaaaaaacataaaggactactcgtgtatgaaatattttttttctttattaaaaaaaacatgtcatgtatcactccagttatcatcatcttcaccatcatcactcgcaacaacctgacggattgcatttgccttctccaaaattgctgtaactttgacgtttgctgtggaaccagtggtatcatttgactttcctgatactgtgggccttaggttgaatgcctgaaccaataaataaatggcaagtcaatgcaaaagttgactacaattaacatgatttattttaatgttgctagaacatgttctggattgatttttgtcatcaatttgtaatttagaggactaattagatctaaaaaaataactaagtatttaatgaccattntgacgtatttataatttataatgaaatacaaagttgatgacac

SEQ ID NO: 128010 - DNA, 260 bp, Glycine max
  Clone ID: PAT_MRT3847_86599C.1
cccttttattttttttttttggtgaggcattttccgacacaggaggtgctgcctcaggaggagtaggatgtataacgtgtagttgggcacccagcagttggttcaatgcggtttcttcacaggaatcgtgcttctcgttatatgggtgaagtgaatgtgttccccaaggatgaaccgtcctcggcacccgtgctcactgcattcttgggttaccaggccggtatgactgccatgccccgagaggtcgagaagttatgatc

SEQ ID NO: 128011 - DNA, 376 bp, Glycine max
  Clone ID: PAT_MRT3847_8659C.1
aggccgcggtcgctcttttttttttttgatacaacataaagaacaaagattagcatcaagacaaatgaagaggagatattacaagggaatgttaagaaacaaaagcaagtcatgcatatactaacagaattgagagaataaatctattatatctgtaacaactaaaaagacaaaatggatattgaaaaggaaaccggaaaaggacttaaaagaaatcgggaaaagcataattggggaaaccaggatgctagaaggaaactggaacaatccaacaagcagaaagagagaaagccaaggacatactgtggagataataagggtgtatagcagtgacattaaaaatattaggtggaggaatgacacaacaaccaggacc

SEQ ID NO: 128012 - DNA, 570 bp, Glycine max
  Clone ID: PAT_MRT3847_865C.1
cggaattcccggctcgacccacgcgtccgcaaggcctctactctactgcttcaccttctgctactagaaaattcagaggtgatacatggctccggctactgtttctgtacccaaaccacgccctccaggctaatggcaaaggcttgtctgaattctctggcctccgcagctcatccagcttccttcccttttctagagaatctcacgaggatctccattctggcatctgccttccatacctatgcagcgggaagcaccggcggacccaacaatggtgcgacagaggcaaaactgaggggtggcataaacggattagcaaggattggaaggaactgcttgaggtgctggcacggtcgaaaagactcccctcttgatgtcattgccatcaacgacaccggtggcgtgaaacatagcctctcaccttctcacgtacgaatcgagcctcggaaccttggatgctgatgtcaagcctggtgacagcgacatcatctgtgtcgatggaaaggaactagagttgtctctgaccgcaaccctgccaaccttgcttggaaggacttgcggatatacttg

SEQ ID NO: 128013 - DNA, 190 bp, Glycine max
  Clone ID: PAT_MRT3847_86600C.1
atttggtaataattggtcccaactcggaacacatccaaattggagcctgtattataatcatggcttctaagggggttccggtttttgtattaccaataatgttgtttgccatgaactgtacctgccctagtgttggccacatcccttcaaccaaagaggaaggtcccgtttttcaggagtctaaacccaa

SEQ ID NO: 128014 - DNA, 206 bp, Glycine max
  Clone ID: PAT_MRT3847_86601C.1
tgttgcagcgagaaaatgacagatgggggcacacgtgacgtctgtctgatgatgattccgagtatgagtgtgattaatctcacagtcgatgatgtcttccttgcgagaaatttggtagcacgggaatgtcatgcatatgatatattcgctctccaagatgaaacaggtaatgatgcctgtactccaggaagtgaaatacgaaagtt

SEQ ID NO: 128015 - DNA, 347 bp, Glycine max
  Clone ID: PAT_MRT3847_86602C.1
cccaattctttctttttaaagaccaaccaaaaacacatcaaacaatggcgcccaagaccgcagacacgaagcagaccgcctccaaggcccccgccaaggccccggcctcgaaggccccggccaaggcccccgcgaagaagccggccagcggcgacaagaagaagtccaagaagcgtgtcgagtcttacacctcgtacatcttcaaggtcctgaagcaggtgcacccggacactggtgtctcgaacaaggccatgtcgatcatgaactcgttcgtgaacgacatctttgagcgtgtcgccgacgaggcgtcgcgcctggccgcgtacaacaagagatccacgatctcc

SEQ ID NO: 128016 - DNA, 441 bp, Glycine max
  Clone ID: PAT_MRT3847_86603C.1
gatcaacataagttggtaattgggacaattgcttcaatcatacgtattaacttggaggaggcaaaaccatcatggaagaagttatctataggtcaaagggattcatggtttaatatatttgaagaaatcaaattacaatgtttgattaaaaatattcaattttttatattatttttaaaaatgtgtgtaatgtaataatttttttcccattttggtcaaaaccaacgtagtcaaagtttacatggccacctcagtataaggacatggtgcggcacaactttgagaaaaggggttcagctaaaatgactcaattaatgcaagatgttcgaaaaaatttaaatgaaaaaccaacttggatggaagatgatgtgtgggcacaattgaaggcacattgggaaatctcaagtttcaaaaataaatctgaaataaataaaagaaatc

SEQ ID NO: 128017 - DNA, 651 bp, Glycine max
  Clone ID: PAT_MRT3847_86604C.1
ccacgcgtccgtaattttaggttcgagtttcgacgcacgctcttctcttctcttctttcttctcctgagtctgagttgaagaaattactcaactaacgttgataagatgactgtgaaaacacctggaacaccagcttcgaatatagataggactccagtatcaaccccgggaggggcaagagctaaggaagagaagattgtggtcacagtgaggctaaggcctttgaacagaagggagcaattggctaaagatcaggtggcatgggactgcatcaatgattatactattgtgtataaaccaccggcacatgaacgcgcttctcaaccagcatcatttacttttgataaagtttttggtcctgcttcagtaactgaggcagtgtatgaagaaggagtgaagaaaattgcattatctgcattaaccggcattaatgctacagtttttgcttatggacaaactagcagtggaaagacatacacaatgagaggaataacagagaaggctgtcaatgatatctacgagcatattatgaatagccctggaagggatttcactataaaaatatctggactagagatatacaacgagaatgtaagggacttgttaaattcaaaatctggtccgcagtttgaagcttcttgatgatcccg

SEQ ID NO: 128018 - DNA, 347 bp, Glycine max
  Clone ID: PAT_MRT3847_86605C.1
tggcttggaacctttgggctgatttatgtgcttgcatggtcgtgagaagatgatagaagggggagagagcgagcgagacagagagagatgtccggtaaactctaactgaactctagaaaaacgagagaaactactagtacctatacaggctaggttgggacttaggctggaaatcttcgtcgggaatctcatcgttctgaatacggtacttagtttgatggtacaacgttcctcgatcttattcctggcgcagtttatgatgttcctaatattcctcctagtgaaattggactcggtaagtatgctttttgcgtcgctcctgctgattctgaatttattgctactga

SEQ ID NO: 128019 - DNA, 686 bp, Glycine max
  unsure (1)..(686): unsure at all n locations
  Clone ID: PAT_MRT3847_86606C.1
tacccacccaaagctgttgctaagatggccgctgttgctgcactgtgtgtgcaatatgaagctgatttcagaccaaacatgagcattgtagtcaaagctcttcaacctttgttgactgcacgacctggacctgccggtgaaacaccaaattaatctttgtatcactttctctctatatttgtgagtatgtgcacaagtgtgcatgcaaaatataagagactgcttcagaagctggtggtttgctttgcaccggttgtacggtgaggacatggtgtcgttctcctcttctctgttaggtgtttggataaaaaataaacaggaggattctgatttttaattgaaatgatttcaacgtattgagaagccttggaaacaaaatggaattgcaatgacctattctttgtctctctcctttattctacgtttcctatcacttgctcgcaccgccattagtgactagatttgtgaccactgcgaggagaaagatcttctgattcgaaaatggtgtcctcctcgtctatcctcactccccgaacggaaattacatgggaagtttcggcggntggtgtcaaggtggaggaggagacttgcgtggagcgaatctgacaaagaagagagagagagaganatacctttgccatgaaaaattatcaattaaaataaaactggtatcccatgctttgtgt

SEQ ID NO: 128020 - DNA, 1457 bp, Glycine max
  unsure (1)..(1457): unsure at all n locations
  Clone ID: PAT_MRT3847_86607C.1
cccatgtgtagtgaggcccaactggtggtgggggtgntttccagctatctaagaatcttgcctctcagtgtcacggcggctctgttggcactggagtttcacattttcgctcacatcgtaatgaggggcctccggccccggaactggcttcagcagggctactcgatgctccaaagaagtcttatgcatcaattgtgaaagtccaaaaagggagttcagttccaactaaagtctatgtgcctactactacgctcccgcctgggccgggcgggtctcggagcgacgctgtcggggctcgtgggtcttctggtggggctcgggcagccgggcgaaatgattatgtaagccgtggcgagttttctggtagaggtcatggtcatggtcatggagaaggttatcaccaagggagagggagagcggccccgccgttgggactggagcttaaggctgttgccccctgcaagcctggaggcttcctgggcggttgttttgagccccccttctgcggggccgtcgctggcttcctttcccgtggttccatcttgtctccctctcccgcttcgccggtcccgtgtggcgggccccgcgctggcgctgtggtagtgtgtcccgctgcccgggctatgttgttggtggcttggtcatgttcaggtgttggcattctctccacggaatagaaattcagacagccgcttgttctgttggggggcgtcaagctgtagtcgggataaagagaaccactacccgggttggcagtggcattaacagtactggaagacctatgatcccacctggtaggggtgggttacgaaatgactctttcaggggtcgtgggaattatggtgggggtcggggatacggtcgaaatgattatgtaagccgtggcgagttttctggtaggggtcgtggtcatggtcatggagaaggttatcaccaagggagagggagaggtggccggtcaagtggacaaaaacaaaatgctgtttccaactgaaatactggatgatttttgggaggttgttctgagacccccttttttgggtcagttaccccctttcccccccagtattgaatgtcaccctcaaccttctaaaggttctcatgtttctttcactgcatttgcacagttgtagtatttctagttgttattgctatgattttagtgggatggtaatgatcaggaataggtatagtcttttcttttttaaaattgaaacaatgctatgactggaattggcagtaggttaaccatcagttctcttttatttgttgctatggtgcaacatttttatatctaagttgagattttaattttaaaagggttattattggttccaatttttttatatacttggaaaatctaggaatgacttaggtcaactgctggttttatgtttttgctgtgctatctgtttgggaaggcgctgaagaggaagaattaaatggaaactgggtga

SEQ ID NO: 128021 - DNA, 555 bp, Glycine max
  Clone ID: PAT_MRT3847_86608C.1
gagttggcaggggcattaatggtactggaagacctaggatcccatctggtaggggtgggttacgaaatgactctttcaggggtcgtgggaattatgttgggggtcggggatacggtcgaaatgattatgtaagccgtggcgggttttctggtaggggtcgtggtcatggagaaggttatcaccaagggagagggagaggcggccggtcaagtggacaaaaacaaaatgctgtttccaactgaaatactggatgatttttgggaggttgttctgagacccccctttttgggtcagttatgagcatggaattcaaccttctaaagtttctcatgtttctttcactgcatttgcacagttgtagtatttctagttgttattgctatgattttagtgggttggtagtgatcactgatcaggaataggtatagtcttttcttttgaaaaattgaaacatgctatgactggaattagcagtaggttaaccatcagttctcttttatttgttgctatggtgcaacatttttatatctaagttgagattttaattttaaaacc

SEQ ID NO: 128022 - DNA, 409 bp, Glycine max
  Clone ID: PAT_MRT3847_86609C.1
aacaaaactgggatttacccctgccaaaggggatttgaacacaagacaggggtcaagcccaaagggctagaactgactttgaagcaaagccaaaagccaatgcaaaaaaaaacacctttttcaaggccaaattagaggtaaaaagcttggtataaaaaaaacaaacggctttaagggcaacaagagccatgaaaattagtttgcccgaggaaactgaacctaagaacccttccattaaaaaagctttaggggtaggatcaaaaaaaccagcccttgaaaaaaaccccatccccaaaattaaccccattgggggggccacaaaaaaaaagaaacaaatgtaccctggagttccaaaggtaaaaccaccctgggcaaggggtccaccaaaacccaagcctttaaaaatttg

SEQ ID NO: 128023 - DNA, 408 bp, Glycine max
  Clone ID: PAT_MRT3847_8660C.1
ccactcgagccaaatgccgagaaatttgtctagggcattcattactaatatatttgttcatttgtacttgtatattctctcgggactccaaacgtacacaaacacttttgtactaacaagctaatgaacaagaatttccacacttgaagatgtggacataaatgcagctgcagcaactaattctaacaaaaatgctgcagacattgtttcctaaacttaacatcgatgattgaagtctttgagccatttaaaagaggcaaaaatacgcgattgaggtagataatatcaatgcctatagactagttatgtatacaggtgggaagtgccaaaattcctatgttaaccatcagctatattgctcaattggaacccttgaccagaaagttggttgatgagcagagattcaaa

SEQ ID NO: 128024 - DNA, 257 bp, Glycine max
  Clone ID: PAT_MRT3847_86610C.1
ctaggattatctattaaggtggggtaacagacaccatttaatggttggttcccttgttctggacataacataactccactgtacaatgttgtccttgttatcgtattctatcagtaagagtgtctgcaagattgcatgtctttcttggcttcaccaataggaagatataccagtcattttgcatgactaccgaatttcttaaaacaaattttcagataaattattatcggtgtcctttcttctgcatctttctaaac

SEQ ID NO: 128025 - DNA, 592 bp, Glycine max
  Clone ID: PAT_MRT3847_86611C.1
cggacggtgggaataaaaaaaaaaaaaaaaaaaaaaaaaaaaaaaaaaaaaaaaaaaaaaaaaaaaaaaaaaaaaaaaaaggacaaacaatttaaaaaaaaaaaaggttacatactcttgaatacaaaaaacttacctcttttttcgtgctcacctaatattcaattctattggccgcaccttttataacgttcgttgttgggaattccataacgttacccatgttaatccccttgcattacctacttttttcccctggtggcatattaccttttaggcttttaccgttttcccttttaaacattttcgcatcctgtttgtaaaatggtacgccccctgtatcgccattttaacccccccttttgtggtgatttcacccagggtgaccgcttttttacccacagccttaccgctagtttttttggcttcctacccttcctttctttccattttttccgtttttttctgtcaagttttaaatgtttttctccttttaggttaccaagttggcccttttaagggtttcaactcaaaattttttgataagtgagacggttaaacttttgttcctttaacctttaaaaccgttttt

SEQ ID NO: 128026 - DNA, 381 bp, Glycine max
  Clone ID: PAT_MRT3847_86612C.1
ggttagggcaactacactggcttttgatttccaaaatttatttgcttaataaaaaaaagccgaggtgaagccttacattaaattacatccctgaaacattaaaactcaaaatccttaggggatgtgttttagggggggaaaaaatcccagagggggttgatcattttcatggcattttgggtttggggattggggatgtggaaaacatgaacctcgccctccactttaaacaattccggtttaccttgccagccacttttttttacaaccttattttacccaacccccctatcctttattaaaaccttttcagcaacgcaaaccaaaattttaaaacaccccagttcagccaagcttggcgccccaataaccattggattg

SEQ ID NO: 128027 - DNA, 198 bp, Glycine max
  Clone ID: PAT_MRT3847_86613C.1
gacaataattagggtgcgtaaaataaacaattaaaaatatggtctggcgcaactgtaaatacgtagggttacaatcgtcggcgcgtcgcaatctttccactctacaaattcgggcctgagacgtttttcaatttttcgaatgtcagtcatattgcatgcaaaacccccgtttgttccacctccaacgatgtggaatcc

SEQ ID NO: 128028 - DNA, 1671 bp, Glycine max
  Clone ID: PAT_MRT3847_86614C.1
tggagcttcaaagccagaacaaccctttctctattcacttgattaccttctttttgtttctcttgttcctgttattcaaattagttaagaaatcgagttccaacaacaccagcaaattacctccaggaccaaagacactacctctcatagggaacctacaccagcttgttggttcaaagagtcatcactgctttaaaaaattggcagacaagtatggtcctctaatgcacctaaaactgggagaggtatccaacatcatagtcacttcaaaagaattggcacaagagattatgagaactcaggatctcaactttgcagatagaccaaaccttgtatccacaaaaatagtttcctacaacgccaccagcatttccttcgccccacatggagactattggaggcaactgcgaaagttgtgcacagtggagctattaacatcaaagagagtgcaatcttttcggtccataagagaagacgaggtgtctgagcttgttcagaaaatacgtgcaggtgcaagtgaagaagggtccgttttcaatctctctcagcacatttaccctatgacttatgcgattgcggcacgagcttcttttggtaagaagagtaaataccaagaaatgttcatatcgttgattaaggaacagttgagtctcataggagggttctctcttgctgatctctacccttctattggactactccaaatcatggccaaggccaaagttgaaaaagtccacagagaggttgatagggtgttgcaagacatcatcgaccaacacaagaacaggaaaagcaccgaccgtgaagcagtggaagatctggttgatgtccttctcaagtttcggtcggaaaatgaattgcaatatcccctgactgatgacaaccttaaagccgtcatccaggacatgtttattggtggtggtgaaacatcatcttccactgtggaatggtcaatgtcagaaatggtaaggaacccttgggcgatggaaaaagcacaagctgaggtaagaaaggtgtttgatagcaaaggatatgtgaatgaggcagagttgcaccaattgacatacttaaagtgcatcatcagagaagctatgaggttacatccacctgtgccattgttaattcctagagtaaatagagagaggtgcaaaatcaatggatatgagataccagctaagaccagggtctttatcaatgcttgggcaattggaagggatcccaagtattggactgaagctgaaagtttcaaacctgagaggtttcttaatagctctattgattttaagggcacaaactatgaatttatcccatttggtgctggaaggagaatctgcccaggcatttcatttgctacacctaacattgagctgccacttgctcatttgctttaccattttgattggaagcttcccaacaatatgaagaatgaagaacttgacatgactgagtcatatggggctacagcaagaagagcaaaagacctatgcttgattcccattaccgttcgaccttaaaattaaatgtcataaactatttaaattttatcttttactattctcagcatcttgtatggtaatttgggcaaacaagaatatatatctccaatgactttatgcacttcattttcatgttctctttaaataaaatttattttcgttgtttgaacccccc

SEQ ID NO: 128029 - DNA, 395 bp, Glycine max
  Clone ID: PAT_MRT3847_86615C.1
ggggcaatctataaagaatactgatttttgtatatccaaaaatgtccatccggcatccatttaggaaagggggtataattacttttgaaatcaatctgttgatcaaataattacttttacaatgatattcaccgtttgtataattataaacgttaattttgatcttcaccgtttgtattctaaacgaatatagtcatacataattcctattaaaggactagtgtctcttgtttgtgttagaaagatggtattgttcccctgcacaagaagagtgccttgtacatcaatgctgaatagccagtagagaccgtgaattccatgtctagctatagtattctcctttccaatcaatccacctttattttcaagtggagtgattggaaaggtgaattccg

SEQ ID NO: 128030 - DNA, 255 bp, Glycine max
  unsure (1)..(255): unsure at all n locations
  Clone ID: PAT_MRT3847_86616C.1
ctcaattaagattttgtngagagcggatatagaatctgcaaacttccattcttgtagaatcactatattcttcttccgaagaaatgtaaacctatctatatattttagttagttagggatagttacaaggaaaataaacaaattaatgctggttgttaattaattagataaggtaggttgatttttaatgcaatgtttaaatatgcaaatnatgaatgtgaagctttaattganaactaacacangagtattngg

SEQ ID NO: 128031 - DNA, 467 bp, Glycine max
  Clone ID: PAT_MRT3847_86617C.1
ggagaggacggcccaacccaccagcctattgagacgcttgctcacttccgcgctctgcccaacatgatggtctggcgtccagctgacggaaacgagacttctgctgcatactacgtcgctctcacttcggagaagaccccatcgatcctcgcactcacccgccagaacctgccacagctcgagggctcaactatcgagaacggaatcaagggtggttacgttgcagttgaggcagagggcgctcaaatcactctcgtgtctactggttccgaggtgtccctctgtttggaggccgccaagtacctgaaggacaacaagggcgtcactgctcgtgttgtttcgatgccttgcatggaagtcttcgacgcacagcccaaggactacaagctcaaggtcatcccagacggcatcccatctctttctgtcgaggtcatgagcactcttggctgggagaagtactcgcacga

SEQ ID NO: 128032 - DNA, 205 bp, Glycine max
  Clone ID: PAT_MRT3847_86618C.1
gtgatacgtgggaacatgggggagggggaaactgactgcacatgaggggactcccccaagtgttcacataatgccgataaatattcgtggaggagcacaggctaataatgctatggaaatgactctgccaggtgctgtttatcaaatcaggtgatatgtccatggagaacacggcgaataacctaataagatgactgcctcctac

SEQ ID NO: 128033 - DNA, 442 bp, Glycine max
  Clone ID: PAT_MRT3847_86619C.1
ttttttttttgaacctaattcaaagttttataaaaccttagcaaacccaagaaaaaggcatgatgaacccgaaaaaactttttcaaaataaaataaaaatttttatatgcccgtcagggttaaaaaaaattggggattaatatcgttgcttgggcctttacagaagaaggactcttataaagccgtaattgctcctacctagacgcacagagtgaataaatcacctagggagtttgagcgggaacaagggggaattttaattaaaattgtttctttcgggagtgtgagaactgactttgaagggattataaatattgaaacgaatttttttttttcttttagcctgctttaagtccttggttttgtgttttagccatcttaggattgatggtaatgtttcctgaaaatatctttttttttggtctccatcaatggtgtgggt

SEQ ID NO: 128034 - DNA, 207 bp, Glycine max
  Clone ID: PAT_MRT3847_8661C.1
gtggtaaaaggaattttttccacatggctctttaatttttatcacaaaacacaaaaacaaagggcccaaaaacatcttttttaacaacctccaaatatatttttttcccaaaaataaaaaaacaccttgtaaaacaaacctcttggcttaaaaataataaacctatcttgtccacaaaatacatttcctttcatttacaaccactcc

SEQ ID NO: 128035 - DNA, 393 bp, Glycine max
  Clone ID: PAT_MRT3847_86620C.1
tgtttttttaaaataatgagtttatgttcacttttattcacaaaattcaggatccatatgagacatttaacatatgtttttgttttcctctcttttgggagggagagatgatattgaccaaataaggggatgctaatatccccgggaggaaggggtccagggtgtcatgtccatagggtaactccacagcactcgcaggacagacgtgaattgctgcccctctgccaacgcgttctgtgccctaacctgagccatgggggcctgaactgcatacgtttaaccactactcgaagtgcttcgctgatcccacgtatagtgtcgtccaccagcctaatctgacggttgcgatgcggacgtgactcgatcatcgttagactgatgtgacctggtgcc

SEQ ID NO: 128036 - DNA, 366 bp, Glycine max
  Clone ID: PAT_MRT3847_86621C.1
ttcgttttgtgcagattgaaccagacatgaatagtagggttcagcttgtgagtaccactaccaatggcgactttgttcaaggaaaagatatcgcattggataaagttgaatgtgcatgcgctgctgatggcttgacatcaagttacactcacaacttcattgtaaggaatctggtttgcataaagacagagggttaattggggtgatttttggaaggatgattcacattgttgactacgctcaccagacatatgagaaagactggtgggggggaaatggaagctatgatattcaatggcactctagatggggaaatggctactctagaaaagcacaatgtgatagaggaaaatcactaaagtatga

SEQ ID NO: 128037 - DNA, 196 bp, Glycine max
  unsure (1)..(196): unsure at all n locations
  Clone ID: PAT_MRT3847_86622C.1
ggcggttcagtttcagtacacgaataataatagccatcatcatcaagcattgcatntacanngggcgatgggncacgacaacantcaccagggnctgttgggattgggtcatcctcgttaggtgnagttaatgttcgagaaattcaaagtatgtganggctgcacaagagttgctggaagagttttgcngtgttgg

SEQ ID NO: 128038 - DNA, 518 bp, Glycine max
  Clone ID: PAT_MRT3847_86623C.1
gtagtttttattgccttgtcctgtttttgggatggtggcgaagtgaaccatgatcacagctaaggcatttggcaactggaacccagacccgcacatgattaatttttttctgaaccctgctatgagcctaggaactggtgtgatgttcgcccaacatacggccagagatggccatccacatcttttgggccaggaccatttattgtagcatctctcgcagtcttataccatgatttcttattgagagcacttgctgtttatgctataggtctttcagttcacccggtattcgagggatgtgctctaatggcgggggggtgttaatggtaaacaaaaggctttctttgcttaaaaaaaccttctttctgcagtggtactaatcacatgcagctgcttgtgctttgattctctgcagatagaacgatttttttagactacgaatcctttgttttttcctttacacctttccccccttggaagggctatcgtttgaatttgcggggtagaaccggagagct

SEQ ID NO: 128039 - DNA, 318 bp, Glycine max
  Clone ID: PAT_MRT3847_86624C.1
taattctgctcgagctcccaaacagatatttatcctctttctttcattcaaagaaacaagcccctctttataatcattgatccttttctaataaataccatttactcttccaatttcgtcatgcccaaaacctccttcaatcttcatcatcctttataaacaatgcattctttatcttctcccattacatacaaatattctgatataataccttttattaactagaaatctcaaataacctacattccagacatttataataaaaaatacactgtcccttcttattttactttcctccaattaatttattttcctcgc

SEQ ID NO: 128040 - DNA, 1180 bp, Glycine max
  Clone ID: PAT_MRT3847_86625C.1
gatcaaatcattgcctcctgagtacaagtttgctaataatcctaaccccgttcttgtggaaaaacatggagatgttaaattcagacgcaacaatccgattggatcaaatggccttgaaaatggtgcacaggtaggggaggtttctgaagaagttaacggccgtgctggtggcatggatctttctgatgaggactcgccgtatggtgcaaaaggtagatcattaaaagaccggccatctaatgcagatgaagactcagtatctgtttcgttgccccccctcccgcttttgacatcctcaagggaaagcaggtggaatgatacaaatccttatggttcaaaaaagaagcttcaggccgggctgcttccaccaaaccgggggtgggtgctggcgggcaggcccacgcctgctggcgtcctcccggttatttcactgcctaatgggaaagtttttaaggtgaaagaggagagtttggtgccagctaatcctgatattcttgatgggctggatcacctcatgcatctaagttatttacacgaaccatctgttttattcaactctgccatatatgatacaatcataatatgatctatacgaaagctgggcctgttccggttgctgtaaatccctttaagaaagttcctctgcatggcaatgactacattgaagcctacaagtgtaaatcaattgaaagccctcatgtatatgcaattacggacacagccatccgagaaatgatacgggatgaagtgaatcagtctataattataagtggtgagagtggagcagggaagactgagacggcaaaaatagcaatgcagtacttggctgcccttggtggtggaagtggaatagagaatgagatattaaagactaatccaatactagaagcctttggtaatggaaaaacattaagaaatgacaactcaaggtcgttttggaaagctcattgagattcacttcagtgaaactggaaaaatatctggtgctaatattcaaacatttttgctggaaaagtctagagtagtccaatgcaacgaaggggaaaggtcatatcatatattttatcagctatgtgctggagcaccatcatctcttagggagaagctaaatctactaagtgctgaagactataaatatctgaggcagagcaattggtattaattacgggagtgatgatgc

SEQ ID NO: 128041 - DNA, 459 bp, Glycine max
  Clone ID: PAT_MRT3847_86626C.1
gaaaaaggccaaattggtttgggggcaattttgggacaaaggggccattatcccaccaaacccaatttttattttttggggaaaaaaatttttttaaaaaggcaaaattttcccaaaacgggggaaccttttttataaaacgggaccccccaattggaaaaacccccaattggggaaaaaaaaaaaccggccggaccctgaaaaagggcctaaaaaaaaccttttttgggggccattaatttcccgttataagggggggccccccccctgggaaaaaatcctcaaaacacgggggggcggaccccaagttttttttaaaccgggggatgttttaaggaaaagggaaaccaggggcccaaagaaaccccctaaacggggaaaaaattgtttggccaaaaaaacttcccccggggaaatccccacccaaattaggccggaaaaaaagaaaaacccaatttt

SEQ ID NO: 128042 - DNA, 544 bp, Glycine max
  Clone ID: PAT_MRT3847_86627C.1
ggtgggggtcccaaactcactctgatcaagattcagataaaaggagattcaacaggattctttaagttgtgttacaacaatttaaaaaattatttgccagttcaaaatttagagaagatccaaatagtgttcttaccatcaaggggagagacacaagcttcatcatcttccatgtcttgcttgatgtggcaatgttttctcagttatcttacaaatgtgacaatttaaactaaataaacccaaaactgagatgagaaagatagaatcacaaggcaaggctgcttgattctgcttcaagatatttacaaatcctgtccataacctctctacccttgacactattctgaaggaacttttcagcacatcgctgctccaccttttcagccatgggtgccaaagccgacagcggcttaatccggatgcgagtctcctggtggcagattgtgcacccagtcgggttatccgggggaggatcatatcggatcttttcttccacttcattgaacttctggggggtgatgattccgggagggtagttgcatgg

SEQ ID NO: 128043 - DNA, 110 bp, Glycine max
  Clone ID: PAT_MRT3847_86628C.1
cactcccttcctcttcacacatttttcttagcctctctccaacagagaagtcagatggctgtaccctttgaagcggggtacggatttgaaaagacctcagtttaagtctc

SEQ ID NO: 128044 - DNA, 596 bp, Glycine max
  Clone ID: PAT_MRT3847_86629C.1
aaggaaaaaaaaaattggcggcccccggcccctttacatgaaaaaaaccccctcaaaagggcccccgcattggaaggggtccccccgcccttcaaaaaccccaaaataaagcccccctgggggggtaaacccccctaaacaaaagtttttttggggggggccaccccccttttcttaaagggagggcccccccttttttttagcaaactttaaagcccccccaaaagaaaacgggggcccgtttacccaacctttacgggggggggcccctgcccaaaaaaaaaagcctgttttgaatcacattttttggggggggcccttcaaaattttcgggggggggcgaaatgtttccctcaaccccaaacaggttgggggtaacccccgaaagagccgccccccttatttgggccattgccccccttgccctggttgggggttggggggggcccccataaaaataaaagggataacgggctaaccttttttttttaaaaatccccaggagcccctatttagggatataccggctttaaaaatttcccatctcaaaggaagcctccgctgcctctgaaaaaggggcctgatttcccccaaag

SEQ ID NO: 128045 - DNA, 302 bp, Glycine max
  Clone ID: PAT_MRT3847_8662C.1
ccaaactggggagagagcttttgcagcaaaagggtcttgttcaaagcttttggttttcagtttgaaagcataaaaatgattcttttagatttctaatagcacatgtcatggatctggaccgtgggattgttcagaactctgataagaggaaagaatcatggaaaacggtgttaactctggcatatcagagtcttggagtagtgtatggagagattagcacttcaccactctacgtgtacaggaacacatttgctgaagacattggtcactcagagaacaatgaagagatttatggtgttttg

SEQ ID NO: 128046 - DNA, 1648 bp, Glycine max
  unsure (1)..(1648): unsure at all n locations
  Clone ID: PAT_MRT3847_86630C.1
ggctcgaggttatctgacacttctctctgacttccctttcatcattcccatttctctttcctcagccttcccattatttattttcgcatccctctctctctctctctctctctgtaatcttatctccttttagcttgtctctcatcaccacttgatagtgatgaatttttttaaaagtactaataatagtataatactaccccctcttgtgtggtgttcatattcttcaaagtccaaagtagcttctcactgcagattctttcctctttttttatagtacagtactaggtgatacctaaatggtaagctgacctaagcgaaaatttgttccattctttccaatttcttaaaagaagttagctcacagcagatccatacaaacatgatgactccaaacttgaatctggaaccagaaggtggtttaaaagtcctcagccaagtaggtttcgataaatcaatacaagagacatctcatgatcttaccaaggacagcactgctacttcctcctgtcttaccaaggctgatcctgacccaggttctgtttcccttgacttgtccctcaacttcaatcccaatgatgaagagttgaaaggcacaagtgatactaactgtgaagtaggacctgaaacacatgcctcagcatcagcaattcctagagttttctcttgtaatggctcgaggcggaaattctttagctcgcaggcattaggtggccaccagaatgctcataaaagggagaggacaatggcgaagcgtgcaatgcgaatggggatgttcgctgaaaggtacacaagcctagcatctctgcctctccatggttctgcttttcggtcgcttggactcgaagctcatgctgcaatgcaccaagggcatgtgcatcattcaatgagggctcctgatatgagtgctgcagcgaaattcgggaaagactattttcggacaccgatcttcgtggaagatgatgatgttggtctgttttggcctggaagtttcagacagattgatgaaaggggttatgttaatttgaggcatggtgagcatgctcataattcaaatactagttttgtagtagcaactgcacctcaagcacaaacatctgtgtctcctgatctcactctgaggctttgagatttttcatcttaattgaattcaaatactagttttgtggcatgcacaaacatatctgtacaagcctcctcatgttctcaatgtaaagctttaaagctttttcatctttagtttcattctcttcagactttaaattattgatttatggtgattgtactgtacagtgagacttgtattttcaatggcttatttagcttatttgaattttcattattattaaacttttattgggtcttgatgatgctccacagcctaaatcaaaggctcctactaggtggattgtcgtcaagtgtaatagacaaaaaggaactactgagtgcggatattatgtgatgcactggatgtccaccatcattttaagaacttttagaaataattgggaagcgtattttaacgatcctagaccattggagcttgagagattaaaagcattgcggatctagtgggcacagttttatctccgagttggagatcaggcntagganntaggggcaatttttaacaattgtggcatttttg

SEQ ID NO: 128047 - DNA, 348 bp, Glycine max
  Clone ID: PAT_MRT3847_86631C.1
gttattataaagcatgttttataaatcggcaggtacggggggggtatctgaagaccaccctaatttccaagctggggcccgtaacagaccccgaggagtcaacggcattccaaagccaacaggcacaaattgcaaatccccatccaaccttagcagtatcacggccaaaaccctttgcgtgaaacctgggggacgaaaaactacgccttgccttttccatcctgaaatgattgaatgcctttgttgcaattttagaaaccggacctgccttgctgttttaactactcttccaaatcttgaacaagagggctccttacgcttcggtcccccgggggatgtattcttttc

SEQ ID NO: 128048 - DNA, 241 bp, Glycine max
  Clone ID: PAT_MRT3847_86632C.1
atccatcgatcatacacttagttgcttccaattaagatggttgtgctagagaagctctgggatgatgttgtagctggccctcaacctgagcgtggccttggcaagctcagtaaactcaccatcctcaaaactagtgatgaaggatggagtagccagctgcagcagacgttgtggatgccgtggacaccaacaaccccgatgtactccgtagactccaacgacaccgggatgggaccgtaaa

SEQ ID NO: 128049 - DNA, 758 bp, Glycine max
  Clone ID: PAT_MRT3847_86633C.1
ctaggccctattcataaacccgagttgcgtgatgtttgctgctattcttaattgcattgctgaggttgtggtagggtcagccgcatggcttgggcgaggtctgtcttgtgtctgtgtacaaagaagagatagtgatgcttctaacactttcgatttaaccctagcccaggaggaatgcttgcagaggatacagagacgtatagatgttccatatgatagttctataattgagcaccaggatgcccttagggctttgtggaatgctgcatttcctgaagaagaacttcatggcttgatatctgagcagtggaaggaaatgggttggcaagggaaagatccatcaacagattttaggggtggtggttttatatcattggagaattttctcttctttgctaggaatttcccggtatgatttctttattggtttgttcactcttatctgattttgtaacgaatagattacttatgttgaccaaaattaaagtttagaatggaaagccttgtgttatgagtgacagctcatcctaacagccagagaatgtaacagggaaattgtacttgtatttcttccaaaagaagagtccttttagtttctaatattgaaaggaacttctgtagtatagtgttattgtggagtattaatttttggagaatgggtatttctcgctcacagtagtgatttaagaggatgtttaaatggtgatgtaggaaatgaattcttctcaataatttagcaaaatgtccatgcagatctg

SEQ ID NO: 128050 - DNA, 653 bp, Glycine max
  Clone ID: PAT_MRT3847_86634C.1
ccaacgcttccaacggatgcaaaaaaacaacagaagggcaaccaagatctggaaatgttagatcttccagggcaactgaaaattcatcggtacaacctgaagtattgattcggaaaatctgtacttttatacaacagcgaggtggcagttccgattcagccagcatagttcagtatttcaaggcccgtattccctcgaaagatcttgcgctgttcaagaatcttttaaaggaaattgcgactctgcataaaggatcaaatggatcctattgggttctgaaaccagactatcaattctgaaacgagaccatcaatagaagctatttgccaatatatcaattctgactgcacggtgctttaagttgatgaaatattcattatatagtttgaacagtatagactcttgaagcatgtttctttgtgctgacacggtttattttttgtactgatctttagtttattttttgtgggatacaggtgagaagaatgcctgtagagcccattattgggttcttgctcaattttgtatactgagaagggacaaataggtaaacagacgcctctttggtgtgcagtaattagtagttttgtttttgtaaaaaaaaaaaaccaaaaaaaaaaaaaaaaaaaaaaaaaaaaaaaaaaaaaaaaaaa

SEQ ID NO: 128051 - DNA, 472 bp, Glycine max
  Clone ID: PAT_MRT3847_86635C.1
tgaggcttcactgtgatcaagcgagtcgaaaacccaacatgaccatagattgacccccactccttatgtctcacacagacccagggggagggctaatacctcaatgtgtgtgcaaaggtgtaggtgtcatgtgtgcatagaacaaacaaatatttcaaactacgaatgtagtagatagaaacactcacacccaacataataacatagcaaaggttatatacaaatatggaaaaaacaaaggataaaagagaaaaaggaacataaataaagaagaagtcacgataaaacattgcacattgatcgaatggcttgactctttaacaagtccccagtggagtcgccatctgttgcaacctaccctttgacgggagggtgaggcgaaaagtaaaagtgcgtcttctaaaaaagaaaacgcgcgggagtcaccaccaatgtttatttgaagaaaaacgttagaaaaaccaaaaaaaga

SEQ ID NO: 128052 - DNA, 495 bp, Glycine max
  Clone ID: PAT_MRT3847_86636C.1
ttacgatgtgatcactcacatgaactccttccggcagtacaagaagagcagcagccccatgagcgctgttttcacggggcagcaagtgctgatgctcaacaatgaacaagtctcagagttgaaccaagacaagaatgctggggtttatgacatctatgtgaagctctacttcaggattaggttcaggcttggggacgtcatatccaatgactacaagcccaaggtcaaatgtcacctcaaggtcccttttagtaaaaatggcacctttactctgtttccgaccaccaagtgtgatgtcgatttctaaggactacacatttgattagattggttttaatttgaacttttctttctttaatccttattttaaattttaataattcgttatgtaacttttgtgattatttttttcatttttttgactatatgtttgtaatgtatatgttttcttgcaataaatttattttggttactcctgtttatgcagtagtgtat

SEQ ID NO: 128053 - DNA, 623 bp, Glycine max
  Clone ID: PAT_MRT3847_86637C.1
agaaaatgtccattattattttcaaaattttactgcacttttacagagtcatttaggaataatcacaaagaacaaagtatttgctggccctatacattttgcaataatatgtcaaaaaattaaaataccttgggtggcacttgttgcaaacaccttattgaatgaaaatacccttctagcatccttcccttccttaaggggattcataatcattatgtttccattttctcctatataatctacggtagattgtccatttgattgtcccggtaagaatggcctcactctacagtagaccctaatggctcctttgaggtcttgtacttgattgtaaagagagcgattctcctccaaaactttgtggtaggaagaggaggcctcttcaaggctctttatatgattctcaagccttctcaattcttggtcccacttagattgaatgtgtttgacctccaacctcatctcttcatagaagtacttcagtttctcaagctctttttgttgtgcgtcaattatttcaacatggttggcagaataattgacattgtgctgattactatcgcgttttccaccacaagtgcataatttagagaattcatttgatgccaaactatggctttgat

SEQ ID NO: 128054 - DNA, 367 bp, Glycine max
  Clone ID: PAT_MRT3847_86638C.1
acccacgcgtgctggccactcgtcctttgaaccatcgtgagcacctgcttcatgaggaaacaacctattacgacgaagagcgtaaagacattccccaacgctctttttggtctaaaaggtggacgaggtggtcgtgtaacttgcatggcctcgtacaaggtgaaactcataaccccagaaggagaagctgagtttgaatgcccagatgatggtttcattggtgacaatgctgaggaaaaaagcattgaacttccctactcgtgcagggctgattcttgcgttttatgtgttgggaaaattgtgaaacgtgacttttacccccatcaaatggtttcttccttgttgatgaacaaattgcacgtggatt

SEQ ID NO: 128055 - DNA, 160 bp, Glycine max
  Clone ID: PAT_MRT3847_86639C.1
aattttctaacatcctcttattttttctttaataaatccttctagaatctttcggatgggttatattcaatcacaataggccttcaaagaatctatcccattatgccgtatcttcatctattacaggttcccaatacacaatagctactgcacataccat

SEQ ID NO: 128056 - DNA, 588 bp, Glycine max
  Clone ID: PAT_MRT3847_8663C.1
ggctcgaggtggctgcttgtgtggaaacgaaggctaccataatcaacccttctcaaacatttcttgatttgttggagaagggttgttgtggctgctcgcgtggaaacgaaggctaccactgcccttctcaaacaaatcaagaaatgtctcagtctcagaaacattgtgacagcctcagcctcaccaactacactgatttggacacgtcatcatcggacgacattgatcagaatagcactggcggcggactcaaggacaatgactccatggagaagaggagaaagagggtgagtggaagaagttggaaggtgaagataaaggacttcattgactcacagatgaggaagctggtggagaagcatgaggagtggttggataaactcacaaagacactggaacagaaggagacggagagggtgttaagagaagaagagtggaagagacacgaagctgcaaggttggagagggaacacacattttggtgccaagagaaagcatggattgcagcaagggatgctgctctatggaggctttgcacaaattaaccgggaacgggatcatatagagtactcattctactgatggttt

SEQ ID NO: 128057 - DNA, 359 bp, Glycine max
  Clone ID: PAT_MRT3847_86640C.1
gcagtggctctatgctgggcactggtggtggtggcaatactgaatgggggcttctaatggctagcatctcagaaggtacctggtggaagaaacaccattgcagggtcgcttaaatggtggagctactttcattgggattggaggacttactggtgctggtattggcctaattgtgctactggctagatatttctctgggctactaaacccagatgggcagttcaattcacaggaggcaagactaaagggggggatgctatggagggtgcaattaagataataactggggcgggcaccatcggagtgggggcaggaccaggagggctcccattagctggtactttaactctgggctactc

SEQ ID NO: 128058 - DNA, 266 bp, Glycine max
  Clone ID: PAT_MRT3847_86641C.1
aaacgatttccaacggtcatgaatggcggcgctgaagcctccctcatcacaagcgcaaacaccaaacaagttccggcgaccgggcttaaagggtttagggtgccaaccgggcccttggggaaccctcccttttcaaagacttcttgggggcgttgttcattaaattgacccggggttgccccttccaccttgttgccccccctttgattgccggccttgtcccatttggggcttttttttttattggccgggaagtcccccctttt

SEQ ID NO: 128059 - DNA, 411 bp, Glycine max
  Clone ID: PAT_MRT3847_86642C.1
cctgcacgtccggtccgttcgcatttcgacccaggcgtcccttccgttcgcaagaagacaacagagggggatataccagcgattatactgaccatttatgttctttgcgagcgaggcgaatacgatgtcgtttgccttcatatgcgctaacttgtcctagtaagcatggccatgccatggctcaggataccaaactgtccctactgaaatgaaaaccggctattgggagcagtgcttggaccgtaaacggcgcatgttctagacttgctgcgactgcacacacaattccagcctttaaaaccatcgctgaagagtgcgtctaaccatcaaaggactacattaatggctgacaatctagatcagactctaaaacagctaaccaacacgctttcttttatgctagcgaacgcg

SEQ ID NO: 128060 - DNA, 120 bp, Glycine max
  unsure (1)..(120): unsure at all n locations
  Clone ID: PAT_MRT3847_86643C.1
tcggagccgganaagattcccacagattcagtntnattggnactcaaaaattaggtcgcagttcacagntcttcgtttaacttcctaaagcagnttactggattccccaaaatctacaca

SEQ ID NO: 128061 - DNA, 282 bp, Glycine max
  unsure (1)..(282): unsure at all n locations
  Clone ID: PAT_MRT3847_86644C.1
gtttgctgagannaaganaggtngaggtgntggtgactcagaggggangcatanagtggatgctgtgattggttntgcttctggtgatgggtgngtcccagcaggccataacatctccgcggagcaggaagcctcttaaggtgncgatgaggccatgattaggggaattgagaagtacatgcgaagtggaagtncangangganaagaagaagcccgnccnaatgtaactgcttggcataatgttccacgcccggaggngannttaangtnttngtctgctc

SEQ ID NO: 128062 - DNA, 284 bp, Glycine max
  Clone ID: PAT_MRT3847_86645C.1
agagacagagacatagagactatcttgtgctagctatgatggcggtttatgcctataatcttggtacttggaaggactgaaagccaaggacagtgtaggctacaaacaaacagacctttcttggtaactgagaacagagctttccaaggctagccctgtgctgagcctgaggtaaagttgactgagaacagagctttccaaggctagccctgtgctgagcctgaggtaaagttaacttcaaccacatctggtggctgaggactgggaatgatggttctcaaagg

SEQ ID NO: 128063 - DNA, 296 bp, Glycine max
  Clone ID: PAT_MRT3847_86646C.1
ttcgtgataatcctggatcgctctttctctgtggcggagacatgttggacggtcgtacctgcgttggtccgaggctgttatccggaacttgccaggcggataacgaatgcgcttacatgaagagcttgctggagttggacactaagaatggtcaacgccatatggcgattgatgatgacgacttccggcacattcaaacttcttctgcatcattccataactctttgtttaacatcaaacctcaagcctggagaaaatctctgtattactactccccactcttctatcttgccata

SEQ ID NO: 128064 - DNA, 509 bp, Glycine max
  Clone ID: PAT_MRT3847_86647C.1
aaacgatcctcataatgcattctaataccttaaaaataagagcaaaagaagactttagaattaatgtgagagtaatagaattcttacatatttatacataaaactcttccattaatttgtgaccctatgtttataggtattaccgaatcaatcctcataatgtcttctagtaccccaatgcaatgctggctaggaggaagggacctcagggcaacaatgcctgaacgacaggtataatcgcatgtggcatgactgtcttaattatatgaacggaggaggctccgtggtgccatactgctgggctaggagatgatcttagatgcctacaagcatcattgcaaggttgcgaggatccagtaatgaatattgggctactgtgtgaccatatcaaagatgcatggaatactggtatagtagttgaggtgttagtgggaaaaagagcgaaaaaggttcactgcttccattgctacaatacgtgaagagatcaaggcattgtggcatcacccgta

SEQ ID NO: 128065 - DNA, 123 bp, Glycine max
  Clone ID: PAT_MRT3847_86648C.1
tgaaaggggaatggacttaattggcttcaaaggaaggaaatgccagggccaaaaggtggggctggaaccaaatttctttaaggggaaaggcaaaggtgttggccaaaaatgcccggttgaaat

SEQ ID NO: 128066 - DNA, 251 bp, Glycine max
  Clone ID: PAT_MRT3847_86649C.1
catgaatccaaaccgatctgtctgaaacaaacaaaaaaggaagatgcatatgtcgattccagtggcaaatgttgcgttcctctgaatgaatactgacccacaaaaacactaccttggtgccaccccttttcctaccttctccacctttcagggttcctgaataattaaagatgggactggctctgggttgtcttcaagtggagcaatcaacggtagctatcaaagaagtgtttggaaaatttgatgatgtg

SEQ ID NO: 128067 - DNA, 798 bp, Glycine max
  unsure (1)..(798): unsure at all n locations
  Clone ID: PAT_MRT3847_8664C.1
cccgagaatgcccttctgcctgcagggtttcggcagaagaaccagacatcaaagtctgccacgggaccctttgatagagaacggctcctttcttacctagagaagcaagcattggagcacaaagaccgggacgattatgtgccctacactggagagaagaaagggaaaatttttatccccaaacagaagccagcgcagactcttacagaagaaactatatccctcgacccagagttagaagaagctttgacaagtgcttcagacacagagctgtgcgaccttgcagctattcttgggatgcacaatctgattgcagacacaccgttctgtgatgtgctgggaagtagtaacggtgtcaaccaagagcgttttcccaatgtggttaaaggggaaaagattcttccagtgtttgatgagccaccaaatccaaccaacgttgaagagagtttaaagagaattagggaaaacgatgcccgtcttgttgaagttaatttgaataatataaaaaatatcccaattccaactctaaaagattttgcaaagactttggaagccaacacgcatgtgaaacatttcagtctcgcggccaccaggagcaatgaccccgtggctgttgcttttgcagatatgctgaaagtgaacaaaactttgaagagcttaaatatggagtccaacttcatcacaggcgcanggggttttagcactgattgatgctttgagagataatgagaccctgatggagctcaagattgacaatcagagacagcagttgggcacctcagtagaattagaaatggc

SEQ ID NO: 128068 - DNA, 498 bp, Glycine max
  Clone ID: PAT_MRT3847_86650C.1
ggctgcgagaagacgacagaagggaaagttgtgaaaagtttttcgaacacccaaaatggacttggatggatgcatgaattgacaaaagagtatgttttggaaacattgggttgacttgagtaggaaaaatgaatcctgagccctagtgtcacatgaccataaaaacttgatgcttgagtgtccacatgggtgcatgcatgactgattttgcataaaatttctgaatcatcattgttgtgtgtgtatcatggaaataatatgggacattcctttatccctgaaccgctggccaaaccaacaccctgacgtacatcgtgtctggccattctgcaagccttttgtgccaagacctcaaaccaccataaaccttgacaaaggatgagaatttccatccttgtccttggaagaaggaaccatgaggtctcccaaggaaaaaagagtcattcaccattaacctaacacgcttccaaaaaaaaaaaaaaaaaaaaaaaacacaaa

SEQ ID NO: 128069 - DNA, 271 bp, Glycine max
  unsure (1)..(271): unsure at all n locations
  Clone ID: PAT_MRT3847_86651C.1
aaacgccaaaccctaaacagtttcagcaaaattcaccaatggctttctccaaancattgttcctcgccgtcgtaatgtcggtgttcgtacgccgtcatctccgccgctgaanctccggctccgagccctacctctcccgctgacgccgtgtcgccgtcattcgtcgtcggtgttctcgccgccggagccgctactcgagttcggatctacactcccggatctgagcgtactccatgggattttatttgtggattttagtagaagccgagat

SEQ ID NO: 128070 - DNA, 428 bp, Glycine max
  Clone ID: PAT_MRT3847_86652C.1
gggttttggtttttttttttttttttttttttttttttttttttttttttttttttttttgtttttaaaaaagaaacccgtggggcccccaaaagggggccaccttttttataaaaaacaagggtggcttttccccaattatgaaaatccctcgtgatgggggggaaaaaaatggttccaattacatcttctaaaaaaggcccccgggtgagggattttgggaggggtatgacttgggaaatttggataatcccctagacaaaaaaggtttgagagggacaaagtgttttttactacccccaattgtcactggaaaacaaccggttaaaaaaaaccttcaaagcggacccgccaggaaaaattcgcgtggttaaacagagacggccttcccttttggcccggggaaactaggggggttttttcctcct

SEQ ID NO: 128071 - DNA, 493 bp, Glycine max
  Clone ID: PAT_MRT3847_86653C.1
ggccaaattcccaggagaaaagggggtccctttcagttaaaaccctgaacattcgacaaaggggccccttaaaccctaataattaacaaaggccccccaaaaaagatgtttaaaattttttttttacccgggcaacccctttgctggtctggggctaacccccaaaacatttggatggcccttcattcaatctgggggaagttcttcaccaggggggggagcaaatttgacattagcaggccgggccacaacaacggggtcatctgcaaaaagggctttgaagaaagagggggtttttagcggcctaccacccgccatccgaggataaacattttcaaaaaaataatttgcttgaccagcaatcttccccagtggatccccccaagcccttgccccaacgggtccagaaaaccccaagaaaacccatggaaggggggcccccgggaaagtaaaaaacccccggaagctcctgtgaatgaagggattttgtttg

SEQ ID NO: 128072 - DNA, 361 bp, Glycine max
  Clone ID: PAT_MRT3847_86654C.1
aggcaggcatcaattcgttggatcataccgtgctgccatccggttttcactatagattgcacccacaacaaatgatgcacaagcccttggtgtcatccggcaggcaaaggataacttttagattattgacttataatatttcgaaagactgaagaaactcgttctatgtaggggagggtatgaatccatccgtggcatataatatgcttgatgctctgttctccacttgatttcagaactcatgttaccatttgggaaggtctgtatgcactcgcctccttagaaagctgtgatgcgatttacaggtgtacacttcatacatgacactcactcaatagaggatatcgggcgggatgaacgc

SEQ ID NO: 128073 - DNA, 292 bp, Glycine max
  unsure (1)..(292): unsure at all n locations
  Clone ID: PAT_MRT3847_86655C.1
nccactaanangncgcangcacgcgtacgtaagctcggaattcggctcgagcttgcntcagntccnttccanacaacatacnngcacnncnnagggngaanngctncgaaatgggganatgcnnnatnntaantaacnancnncannacnggnngncncanntanannaanngtcnacacgtantctnaaaggacaagnccaccaagananangnggtatannccgagtcaaananaanncacaccnacnatagcantgngaancnnganaaaanatcanngaaanagnnnc

SEQ ID NO: 128074 - DNA, 571 bp, Glycine max
  Clone ID: PAT_MRT3847_86656C.1
ctgggaatagtggcagtggtgatgctagcggaagtgtaagtgccaacagagtagatcaaaacaagacttctcaaagggaagcggccttaactaaatttcgccaaaagagaaaagagagaagggagaggtgctttcataaaaaggttcgatatcagagcagaaagagattagctgaacaacgacctcgatttcgtggacaatttgttcgacagtcctctaacgaaaatgcaagtgaggcaaggctcgagagctgattcagagcatttgccacaatggcataatgatggggatatgcgagaaaaggtcgaggagtctgcatgtagaatttgggaattgttctgtgtgtttgtgttaaaaaggtataatgactctggttattccaacttgttcatttgaaacctgaatcaatttatgtggtgagagattgttatatgctgattgatgctcggataacttatagcgactcaataatttcaattacttgtcgatcttgtgcttgaagaatcaaatgtattagttcaaattctgtatgggctttaaaataatataatatataaaaaaaaatatattt

SEQ ID NO: 128075 - DNA, 4316 bp, Glycine max
  Clone ID: PAT_MRT3847_86657C.1
gttggttgaagggtcgtgatcatgatcaaggtgacaatactttccatggcttggcaccgctacaagggttgcgagtggaaggggatagtaataataatattggctcaaaagaagtgaaaggtgaaggacaaaacaggtttgagtggagcaataataataacaacaacaacaacaatggtggtggtggtcaaacccacatgctccatctgttttagccacattgtgtgtgaaggcccatatccgagcatcaatcagcatataacaatctctcaccacataaattgattcaggtttcaaatgaacaagttggaataaccagagtcattataccttaacaagacgataatgtgaaaaagcatttgattccaagcacaagatcgaggaaaaagtaacttaaattacagtaagttatccgagcatcaatcggcataacaatctctttccacataaattgattcaggttccaaatgaacaagttggaataaccagggtctttatacattaacacaacacacagaataattcccaaattctacatgaagactcctcaaccttttttcgcatatccccatcattatgccattgtggccaatgctctgaatcagctatctgttgttgcctcacttgcattttcgttagaggtctgtcgcacaaattgtccacgaaatcgaggtcgttgttcagctaatctctttctgctctgatatcgaacctttttatgaaagcacctctcccttctctcttttctcttttggcgaaatttagttaaggccacttccctttgagaagtcttgttttgatctactctgttggcacttccacttccactagcatcaccactgccactattcccagtgagtccattgttgctttccgtgtttgtccctccagcattaactgctgtgctgctcccattttgtccattgcttccattgttgctgcctgaaacacttctattgatactgtggtttccaacattaccttcaactagcacttcttccacgtttgatgatccacaatgtggagcagcagtagccattttctttatagattcagcatcatgatcaggtggcagctgatgcttcatgttgtcagcaatacagttatggttttcacaatggagatggaagtccagagctgcagaatctttatgtctgtctagtttaggtggtgccagaattgttgccgacatatcttcagtattatttaagacaacttgttgagaggtacaaacaaggctgttttttacaggctggaaagcagatgtttggtacaaacattttgttgttgatgcccctgctggctcactcataactgcagatttagcataagcattattagtagtggaacccatatcaatgttattgctagcaccatttgagttttggttaggaggattgccgcaagaatgagattgaatatcacgagatgaatctttctttgtaacttctaagctattattataaggagaattgcttccaacacatccagtgggagatttcttagtgttagaggctgcattgtaccttgagaaagcagactgatcagaacgtcttaaaacattccggtcatcctgaattgtaatatcagcatcttcaactcctctaagcctctttaaactgagctcaagagatggcaattcttcatcattattagtacctttattttcaatatctgaggacttgggttttttatttagggcttcaaattctccactatgcatctgagaatcacaagtactagtaatggcatcagacagtgataaacctttgcaccttagcttgctagattgattttcacaattaaggtccagttgtcctctattaatttgctcactgaatttagaggggccgacatcaggtgcattgctatgttgagaacctgcagttttgacaagttgttcattctgttctgcacaatcctttgcagctagaggaaccaccttgttcccacccatttcagcattggagtgaacaacttgagcacaggtactgtcagggcactcagctatttgatcccactgggaaactggtttatgactatcaacttctacagcacgtttggtccatgagctctgagtgccactaccattgtcacttccatccacattattcaggcctatactttcattatcatcttcgtcattgcttccagaattattatcagacttctcaagactctttgattttatagacttctgggtttgtgtgccactttcactgccactcccactagaactgtgacatcttctccaaacatgctgccacaggtttttaagctcattcttccgtatgggtttaactagaaagtcaacagcaccctttgacaaacacttaaagactaaacccatagaatcatgagatgacatcataactactggaatatttttgcgggttttgtggcccataatcttgtatagaagtccaatgcctgataagccaggcattgccacctcagttaaaacaagatcaatatgattggttaaatcctccaatatcttccaagcttgcaatccgtttgctgcttcaataacttcataactacaattgcgaagcagtgcagtgacaacatgacgggtagagtcatcaatctccacaagcaagaccttaagggatctaatatgcaaaaacctctcccaacaaattattgccccttgaggctgtggtatatgctgctggacagaggaggactccacagtccccccctgttcaaccttaacttcttcagcaattccattacatttcacttcctcgcataaaccatgctccccaccagcaatcttcttcccatctcgtaagcgctgattcagttctttcagctctttgctgtctgctatcaacacttatctggacaacgtgaaaatctaaatcgtcaaatcacaaaataactctacacaaaagatcttatcccgaacattaacatagtcaacgtataatatggccttattctaaaatacatcaaagaattataattaatatatccacaggagataataagaaaacgactataatgaaaaccataaaagacaaataatattaaaagaaataaatacaaaaaataaaagtgggaataatataaaattaggttaagtttaattagggtgagtaaaaaaagactggaaagaaaaaaactaaaaatctgcaactaagtgatgtgattaaggcgagaagtgagctcagatgccatgattaacccgtcataaagaaaatgagcacatagaaccaaaatcactagtcaaaaagaaaatagcaagaaataaagtaagacaaacaaatgccctgaccatatatcccactctagcagagtatccctttctaaaaccattcacttcaaatccaaccttagaaattattcaaaactaaccaggatagtgcaaatactaatccctacatgaagtgactttccaaaccctaagtaagctaactggattttacttactgaaaatccaaaacgtcaaagcagtaactgcacacacacaaaagatctttgctcgaacatgaacatccagaaccagaaacgatgcatcgttactttaaatcgctcacaccaaaaaaaaaaaaacacggcgttctagagaaaaagatgaagcatcgttttcaaaaagctacatatgaagaagaagaaagtctctctccctcgtttaattaaggtcatcttttggtccctttaggcttaggttttgtttttattgtttttctgctactttttctttttctttttttcttggggtaagtgggttggttggatttactactagtacttacattgaaaaagaagaaagaaaaccgaaagaagaagaagatacttgatgagatgagagcagtttgggatcggagtgatcatgtcagctgcaagaaatttagttactacacttcagcctgttagttttatgtgtcaaggttgagaaacattggttatatttgcgctgagaggaacctcggatcctcttctctcatcgtgccaccattagtagtgtttgtttcctgtggagatagatcaaaaggagatgaatcctttgatgcaagttctccatagttgagtaagttggtcttttttcattaatgtatataagatgcaatgacatgtcctttttttttctactttctaatgtattgtgattaggtagatgaggtgggaatttaatttcttgttctatgctgagatattgggtttcatttaccttaacttttttctcaacatttgtttgggaatatggcaaagtaggagaattattattgggggtgattaatgatgcagcggttaattgactaagtccgttgtggcacttgccgtggactcttccaccctgaacaact

SEQ ID NO: 128076 - DNA, 389 bp, Glycine max
  Clone ID: PAT_MRT3847_86658C.1
gtttctttgtttgcagcccttggctttcttctctacggtggaagactattcttgatgctgcaacgctttcctgtggaatccaaaggtcgacgcaagaagctacaagaggtctgtattctgttttactaagaaatttttctgtatttatctgctcttcacctcactcctccccttgctttacccagagttaatctacctgatctttctaatgcaagttggctatgtgactaccatatgcttttcatgcttccttatcagatgtgttatgatgtgctttaaagcatttgataaaagccgccgaccttgatgtcttggaccattccattctgaattttatttattaactggttgggggaataatggcttctaacttgggtcctttcattttg

SEQ ID NO: 128077 - DNA, 441 bp, Glycine max
  Clone ID: PAT_MRT3847_86659C.1
gtgccaccgtatcccttatacaagcgcattgcttcagctctgttgaggtgcatggaatctgaaacattttgtaggataggcggcaatttagccatgaccaatgaatttgaagattcttccattcagcagaagcgtaatgagtggcacaaattgattgtagagaaggggtttgaaatagagaatatttgaagaatgttttctttgaacttcatgtgcaagagccttcttttcacagctaaatgatggcctaaaaccaattgaagggaggtgtgccagtgggaaatacaataggattaaatcaggaagtctaattctctttaataagtctgtggtgtttgaagttcacgtaatgctttgtgtggttaataattagtgcttcagtcttaatggctttgctctcttaacttcaccagtatgtcgggagtaagacagtatcctacg

SEQ ID NO: 128078 - DNA, 469 bp, Glycine max
  unsure (1)..(469): unsure at all n locations
  Clone ID: PAT_MRT3847_8665C.1
agataattaagagaaggttcttgnngnggaaaaataatagaagggagtattattnaaaattgggagtccaaaataaattattccccccccttttttacatccaggaaatttttaacttggccatagaactgaaaagggaaaaaaaaaccttgaaaagaaaaagttaaaaacaccccttgcaaaaattcgtaatctataactacttttggagcaccttttttttaggttaaactcattaccccttttgacatccttgaaaaagggggcttttaagatggagggtactttgggggtgggggttttccatatggggggttgaaaaccggagggttttaaacaggggggttgaaaaaaggagggttttccactggggggttgaaaacgggagggtttattactggggggttgaaaaccggagggttttttactggggggttgaacactggagggtttaaaactggggggttga

SEQ ID NO: 128079 - DNA, 283 bp, Glycine max
  Clone ID: PAT_MRT3847_86660C.1
cccatgtagcgcccaagaggatccgatcctgaccggactttatcaacgatacggccaacgatagtggcccctcatcagcctctaccttatcggaatgtactgctagtcttgccgactccgatggaacaatcagctcactctgaaagaggaccaccgatcattttcttcataagacgactacaccataatctcagaccatgcccagtatggtaacaggtgggccactatagacccgattgttactggacagaacgaattaacaccgataaatagccactggaac

SEQ ID NO: 128080 - DNA, 273 bp, Glycine max
  Clone ID: PAT_MRT3847_86661C.1
tttggttgttactagagagttctaatatgaagggtagtttttcattatttaaaaacacatggaaaaatatgagacatatttctaacatacgaactatagtgcctggatacattcttcagcatttggcagttaatctgctgaaaccaaagtaagaactgaatgacagtgacagttgtgttttatagtaatagaatgtgagagttagaatctttggacaaagttaggctttgtcatttgcctattcagacttttaccaagttgtacctcgagatc

SEQ ID NO: 128081 - DNA, 409 bp, Glycine max
  Clone ID: PAT_MRT3847_86662C.1
ccataaaaccttttttttaataaacaggggaaagaggaacaattatttaacaaacaaacccaagcataaaaaaaaacacatcaagtcggcaaaaacagcaggcccaatggcaaaaaaaaaaaaaatttttttttttaaaaggaaaaaagtaatcaagaaaaaacaaacggccaaaaaaaaaaaaaagggggcggcaacgtaacgaacggttctgaacccggacagggaaccccccaaccaggaaaaaagggaaaaccccagcgaactcgggttcggccacctccgacagcacctggaagctctggaaaaccccggccacaagtcttttcatcggaaaaaacgccatttccctccccaaacacaccctgggcccagccggaaaaaccggaaaagaaaaagcacccccccc

SEQ ID NO: 128082 - DNA, 217 bp, Glycine max
  Clone ID: PAT_MRT3847_86663C.1
gttatccaccctgccaaggtttcaaggagttcatcgcagaatgctgcttcagttgctgggatggttttgaccacacaggccatcgtggtggaaaatcctaatcccaaggcacctgtgtctggttccccacatggccttaccgcttaatttttaggatatctaggctactgcttagaacagttttgtgcagaatattgaaagaccctaattgttcgaa

SEQ ID NO: 128083 - DNA, 187 bp, Glycine max
  unsure (1)..(187): unsure at all n locations
  Clone ID: PAT_MRT3847_86664C.1
ttcncaattcctaattgtttaaacctnnttctcanttcnncatcgttccgattcttgctccncctaaagatgnagatctcgcgtgaaaactttgaccggtaagaccntcacccttgaggtggnagtcctccgacaccatcgataacgtgaaagctacgattcaagacaaggannggatcccacctgt

SEQ ID NO: 128084 - DNA, 405 bp, Glycine max
  Clone ID: PAT_MRT3847_86665C.1
atggacttggaagggaaaaccgtcaagctgcagatagtgagtattctcaggaagttcgagattccgtccatgtctcacttgagactctcaatgaacgaaagtagcaagccttcatttaaatggcgaagggttttgctcaaagttagcggagaagcacttgctggagaccactctcagaacattgaccctaagataaccatggccattgcaagggaggtggcagcagtgacacgccttggcattgagagaaaaattcaattgaagaagagattgaaacttaaaccgctgaagcacaaacattttctagcaaaaaatggggaagaagagaaagcagtgagacaactcatgacgaggcacaacccccaaaaggaacaactcatgataagggcacaggccggaaaataa

SEQ ID NO: 128085 - DNA, 331 bp, Glycine max
  Clone ID: PAT_MRT3847_86666C.1
cgtccgcttagcctgtggctttccctggaagtcttttgtggtgctagctggtattcctacgctcggatgttggggccactcggctatcgaccggtggtggattaatcctaccagtggtgggaccgaacttactgatactcctgcttccgagactcctggttacactagggcttacaagatccccatgtccacaaccactactgttactacttcgactgtgacctaggtctccacgattgagatgaacaggtgacgactggcagggaacgcggttgtgtgcccggggctgcttaaatcacgaagctcacatggaggatgtgcccaatctcct

SEQ ID NO: 128086 - DNA, 177 bp, Glycine max
  Clone ID: PAT_MRT3847_86667C.1
agaaaaaagtgtttctttttcactcctctctgtaaaatccgggggccaaaacctaacaaaggggctgcctctgactgagtcgctattaacaccatcaatacattcctgaccagtacctggcgtcgctccatcttaacctattgtgcttggttttataaccttgtataatgaccacca

SEQ ID NO: 128087 - DNA, 654 bp, Glycine max
  Clone ID: PAT_MRT3847_86668C.1
tcattcttcttcagttcttgtttcaccaaaagagaaggaggggatgaaaatggtgctcaacatggtttctgagaacgcccgttatagtgattgcgagaagagggtgttgcatgagccacgtggtgaagcgtttgcttcttggtcttggtgttaaccctgcggtttatgaggcggctcgagaagatgaagagggtgttgccacgcaactggaagcaacaattcgtagtgatgatgggaacacacaacaggggaaggtgcagtttcctacggtttttatagggggtaagttgtttggaggattggataggatcatggctactcatatctctggggaattggttcctatcctcaaaaaagctggggctttatggctatgatgacttgatcttgatacccctttgttattctttagttttgtgacattatattatattgctttttttttaatctaatttttcatttttattccttgatagctagttattagcttgaccgttatatgttgtctgattaatcttcttctttgtaattttcccaagtgttgattaagaatcactttctcgagccttcaatttggctgcctatttcgatgacatacatgatacatgaattctgatgtaaagggcatgggaaagctcaaagaaaatggaaggt

SEQ ID NO: 128088 - DNA, 742 bp, Glycine max
  unsure (1)..(742): unsure at all n locations
  Clone ID: PAT_MRT3847_86669C.1
cgaattcgagctcggtacccggggatcctctagagtcgacctgcaggttcgctctgcaactttggacacctggctcccagagcaggttgcattcattcaatgtaagggaatctaaatggtcatgaccttgtggttatttttagttctgttattatgcattagtcatatagtcttctcattatatttgaatttctccttttggtcctatatagcgatgggaaatgagaaggcaaatagttactgggaagcagaattaccccaacattatgatagagttggaattgaaaatttcattcgtgcaaagtatgtctgttgatgaacatttctaccagactcaattttcttttttccttttaatctttgtatagttagaagtgtatgtttcttattatgtgcacctagtgaagatgattctttgcttttaatcattgcatatatttaaaggtacgaagagaagagatgggctgcaaggaatgagaaaccaaaatcaccttctagtttccgagaagagaaaagtccttcacattggcaaaagcctgaggaaacgaagaaaatccaaccatcaaatgcaattcctgctacaagaattagtgttcctgctcctcccaaagggcctgagctggtaaattctctctctctctctctctctcttgcctatggcaaaagggttgaaaaatgtcatgttgntgcgttatggcagtgctataacgattatttaacatnttttggatttcatgtgctg

SEQ ID NO: 128089 - DNA, 528 bp, Glycine max
  unsure (1)..(528): unsure at all n locations
  Clone ID: PAT_MRT3847_8666C.1
ctttaataaattttgctggtgtgaaatttgccattgcaccctcgatttatcttcttccttttctcactttcgttttgccatgcttttcctccctccctcccttttccttttgcttttcctcctccatcgtccctttgccaatgccctcggctgtatgtccgccgtttgtgccgccggcggtccctccccctcttcccatgccgtcaatcgcatcattcgttgcgcttccgactctttttgtggccattttcgcgctttgcggcgaaatgaccaatttgtcgaggcggtcgacctcagttgtcccgaattcgccgtggtgcgcgctcctttcgatggcgaaatttcggcttatcgtccgatgggagggagccgagcgcaggaggggacaaagggcgaatgtgtgccggatcanggagttcggatcgacggccgaggccaatggcagggctagccaacagtgtcaatgccagggtggggataatggcaggatgggcaccgtgggtcaatcaatgctaattgtcaataatg

SEQ ID NO: 128090 - DNA, 1641 bp, Glycine max
  Clone ID: PAT_MRT3847_86670C.1
aaatcagctcacaaagtggaggcctctcaaaaaacaaacaaaagtgacatcaaaatccccttctccttcctcttattctcttataccccacccccacttcttagcttcatccctctctctctctctccttctcaacaattacttgcaagtcttgagttttctcctccctgttctctggttttggaattgagacaggctttatttataattttaaaaacttgtttccctccctcccttatttttgggttttctcaacttgttcttgtcatcttgtaaaacatgggaactgctatagacatgtacaacagcagcaacatcgtagcggatttcctagatccgtatagtgaagagctgatgaaagcacttaagccttttatgaaaagtgattatttctctgcctcttcttcttcttcactcgaatcacagccttgttctttttcatctaattctctccccacttcgtatccctcttccaaccaaatcaagctcaaccaactcaccccagaccaaattgttcagattcaggcccaaatccacattcagcagcagcagcagcacgtggcccaaacccaaacccacctgggcccaaaacgcgtccccatgaagcacgctggcacggccgcgaaacccacgaagctctaccgcggggtgcggcaacggcattggggcaagtgggtcgctgaaatcagactcccaaagaaccgcacgcgcctctggctaggaacattcgacaccgcagaggaagcagcattagcgtacgacaacgcagcgtttaagctcagaggcgagttcgcgcgtctcaattttcctcatctaagacaccacggagccttcgttttcggcgagttcggagattacaagcctctaccttcttccgtggattccaaactgcaagctatttgcgaaagcttagcgaaacaagaggaaaagccgtgttgctccgtcgaagacgtgaagcccgtgatacacgctgctgagctggcagaggtcgagtctgacgtggcaaaatcgaacgctgaatatgtttatcccgagttcgaggattttaaggtcgagcacgagaacccaatgttttctggtgaatcttcttcgcctgaatccagtgttactttcttggatttctcggacttctcggattctaataatcagtgggatgaaatggagaattttgggttggagaagttcccttctgtggagattgattgggaagctatatgatgactcggtgaattttcgttatgtcaaatggttggtttggttttgctctgcttttgggttttagtatgtacttattatgttttgtaattttttaggtttatgtttcggtagtgtctttggctgcttctgcaatggattttttgacatttgcggatgttttgctgagacacgagggttgcaaattttaggcagtgaaatcagagggtcgtagtgatctttttgtggtctgctcgtgttttttgttacttgcatgaccttgggggcttctacttgtgtcttggctagctacttcttgttcaactgtaattaaagtgcccttccaatatatgaaaaatttacatgttcttgtaaaaaatggactatggagaagaaaaaaaaaaaaaaaaaaaaaaaaaaaaaaaaaaaaaagggcggccgccgact

SEQ ID NO: 128091 - DNA, 256 bp, Glycine max
  Clone ID: PAT_MRT3847_86671C.1
cttttgaattaatatttcaattttcaatttaggctgttgtcggctagatgaattcaacgaaactaacacagcaattccaacttgaagttaacctaggtcatgagttggaattgctgtgttagtttcgttgcggtagtacaaacatgttggatatctaacaaaaacacaataatgcaactctgaatgaatgtgcctactttgtgaaagattttggattttttctatcttaaatgaaataatatgaggggaattcagt

SEQ ID NO: 128092 - DNA, 428 bp, Glycine max
  Clone ID: PAT_MRT3847_86672C.1
ttttttttttttttttttttttttttttttttgttttttttaaatttttttgggttttttaaaccattaaaaggggggggaaaaaaaacaacaccccccccataaaaaaacgcaccaaaaaaaagtcccttcttcaaacccaaaacaactttaaacccacaagactttaataacccaacccaatccaaaattcttcaaattaaacccccttcggaaaccccaccgggttcaaaaacaaaggactaataccccaaccaaaaaacccaataaaaagctcaaccctaaaatcaagaggtccacctttcaacttcataaggaccaaaaagggctgtactcctaaaaactccaacaccggaaaggcttaccccccataacaacccaaagctttaaccaacccactcctttttataaaaaaaatccacctttcc

SEQ ID NO: 128093 - DNA, 467 bp, Glycine max
  Clone ID: PAT_MRT3847_86673C.1
aggattaaaaattaaaagcggagattcaaaattcaaattagccgaactttataccgaagcgacccattccccaaccttaaaaaaaaaaaaaaggaagcccccctgggcttaacccccccatcacaaggccaaaacccttgaacttggggaaaggcaaaacatgacccctttattctaaggggggtgggttaacccaaaacccccgggggcccgaaaaccctcccagacataaaacctaaggttttagccccccattaaaaggttaacattattccaaaaaaagggctatctctggtggaagctgggtctcccaaccccccacttgcaagggcaggggttgcaggaacaatttggcccacatttggagccatgggtttcagggggcccccccatttcagccccctcaaattgagccttaacaggggccactcccatgaccaagggctcgggggggggggacccagggg

SEQ ID NO: 128094 - DNA, 433 bp, Glycine max
  Clone ID: PAT_MRT3847_86674C.1
gtttctttttttctttttttgtctctctttctcttccactatctcacctcatcgtttctttttgttccttctcctatcccagttttcccctcattgtcttttgtctttactgttccaactatcgaagagtgttcatgttcgtgtctatcattttctctatgtctatgtcttgagtctttacattttctcgcctcttttttattatcttaggttcatctatgcagcctgcatctctccctcttcttatcgtttaggattcttcctctttgctgtctttactccttcttagttcagcatgtccttcttgcttgctccctatgatctgtctcttcatatccatctgtctcccttttatgttttgtattggtcttgttcttttgaccatctccctgcctcatgtgattggagtagtagttgtgtcttctctcctctt

SEQ ID NO: 128095 - DNA, 1601 bp, Glycine max
  Clone ID: PAT_MRT3847_86675C.1
ccagcgttatttcttttagtagccagagcagagccttagctattcttctcatatagtaaagtggcagggagcaacagaaattcaaaacgaagaagaagaagaagaagctcgtgtcgtacagtgaaacaaattcaattcccagaaggaaacatgtttactatttgcaacacctcttctctttctctgcaaccgtgtatcgtggctcctattccggtaaaacctatcaaactctcttcgaatctctctgtcaccaactccgcctcttccggcgagagaatcagcagtagcaccaggcgaagaaccatttcacccttcgaatcccgaatctcactcatcttcgccctcgctcctcaagccaactctctctcccagcgacttctctcgcgggtggctagagtaactttaatgattttgtcagtgatatgggttacatcagatagatatagtatgtgataagttagtctggggagtttgtaacatcatcccaacgccatattgtcccgatcctcacagcaactcaatatagtactcccatcaaaggacgtagcagtctgcctgattggagattttgattgaggatgtgacaaccttgcaacaagtacaggaggacttgactgcaattcccattccaaaatcttcccttccctgttacccactgcggctaagccaccttttacagcaaacaaaaactagatgaaccagatatcactctcaagaacagggtatttctgaaggatgaaaattgcaccctaccctggtgtttgttccttcactttcggttcccacaagataatttcattgtcaacactctttgagaggataaaatcacctagccacctattacagtcaacataatttaaatgaactgaagcattgtatacaggaaactggacatattttgtgggaaacttagaaggaagatcagtccatgtaaatgatttttctacatatgtccagaactccttcatagaccatatttttacagtattatccatgccacaactagcaatacgatatatatctgatgggtgaaaatcaacacttaaaacttcattacgatgtcctccagctccggcaaatattaaaatgcatattccagtatgaacattccataaccggacagattcatctttgcttgcagagatcacaagtgatggctttaatgtttgagtcctgatttcatttacggagtctccatggccaacaaagttctacatcgcatgggctgtaaaaaataaattcgagacattgataaacagtaaccctattgccgccaacagtggcgaaaacgttgaagtagcgggagtcgatgaagttgaaaatgacggcgtatagagggcgctttccctcttgaaggcgattggtgactctgtattctctcttcttcgaacaagccaaggatcccaccactgggtcacatcccaaacccaaaccaaccgacttccccgttgccgccgtttcacccaccatctactcttctctgcttcgcttccctacacacatcacaaggaaggaacaagatgccactgtgtcaatgtgtgatagggttccgagattatcgtgtcacaaaacccgtctgtgttgcgttttgttttgaatgg

SEQ ID NO: 128096 - DNA, 547 bp, Glycine max
  unsure (1)..(547): unsure at all n locations
  Clone ID: PAT_MRT3847_86676C.1
gtgtgtttttttntgttttttttgtttatttttttttcttcttttctttttttcttttttttttctttttaaaggaaaaaatccttaaacctcccttttttaaaattcaaaccaatgaattttttggacaagtaggaaacaatgggcctggaatttttttatttcccaagggggggggacaaaagaaaaaaagggggggggggaaccaaactaaaactacgggtttacccaaaaaaaaaacttttgtttccctcaattacccttgcttaaaaagcaggggcaaaaaaaattggttagtcaatatgacccagttttatgaaagccaaggcccttgggagaaaattaacctgggggcccccccaaagaacaattgaaaaaaccggggctttggcactaaaaaaaaaacttcttttgggctttacatggttttcctttaacttttaaaccggtttatttgcattggtgtgggggctaacaaaccctttttgggccctccccctgtgaaactttaacttaaacccaagttttttaaaaccaattccccaag

SEQ ID NO: 128097 - DNA, 154 bp, Glycine max
  Clone ID: PAT_MRT3847_86677C.1
ctcgagccgattagatctcaggcaaattattagcaatatcaactgctgaaagttgaagtgacgttttacggattcggatgttacgggctagcaacactttctcttctgcaagatattatcaattaattcaaagggcgtcccacactcccactga

SEQ ID NO: 128098 - DNA, 429 bp, Glycine max
  Clone ID: PAT_MRT3847_86678C.1
ttctcctgcgagaagacgacagaagggggggtacaacagttgcaaaaatttcaaggcataaaaagcaaaacattccttcttggtagctacaaggtcgatggacatgatgaagaatagcccttgtgatgtctcttcttcttcttacatgcttattgaggccagtggtgactctgaagctgattggaacccctttgctatgggtgaacatgcttatgaaattggcagagcagatgatgatgctcaatcttgcatctatgatgattctgagacttgtaatgctgctgatgaactcaatggatatgatgagtcctggaataatgatgatgatgctgaagacgagaagaaagatgatgttattcatcatggaacttcatattgtgatgatgatgagatgcaacaacaccagaagtcatgtgtgtctgatgattc

SEQ ID NO: 128099 - DNA, 339 bp, Glycine max
  unsure (1)..(339): unsure at all n locations
  Clone ID: PAT_MRT3847_86679C.1
ccacgcgtccgaaagacccattgcttttaaaccattgtcgtcacttttaattgcttgtgtttattgtttttctaattaggatatatcatacttttacttcaattcacaattattattttctgtcaacaaaatgcctaattattgaacaaagcttttccaaataaacaagttccctgtgttcgatactcggatcattccattttaattttaaatacttggcaacccggtgcgcttgccggtatatcacttnccctttgatataagtgnttgtaaatttaggaaaaaggaactgtctggggaggcgaatagnatgcnanaatatgagatgnaaagctacta

SEQ ID NO: 128100 - DNA, 299 bp, Glycine max
  Clone ID: PAT_MRT3847_8667C.1
ccagaagtagtttgtaaattaaaaagcagggatttaaaattaaaataagccgaacttaaaacggaagcgcccaattcccaaacattaaaaaaaaaaaaaaaagggacccccccgggggctgacccccccccccacagggccaaaacacttaacccggccgaggggaaggcgcggcccccttaattcaagggagggggggtaaacacaaaaccccagagggcacgaaaaccaggggcgcgggggccgacccgggaatcccggccgcggccccggggggggcccaggattccccaaaggga

SEQ ID NO: 128101 - DNA, 1664 bp, Glycine max
  Clone ID: PAT_MRT3847_86680C.1
atacgacacaacgggacccccaccccaagtctcacttttttcagcttctctaaattctctgtctacttcaccaagcacttttggttgcagctttggttaatttccaatatggtgtttcctctcctatctatctttgctttactcaatcttgcagtggtggcaacccatgcagaaaccttgccccctgaagtttactggaagtcgaagcttcccaccactccaatgccgaaagccattacagatatccttcacccagatttggcagaagacaaaagcacctctgtggccgtaggaaaggggggcgtaaacgttaacgcagggaaaacaaagccaggaggcacatcagtgaacgtaggaaaaggaggagtgaacgtgaacacagggaaaggaaagcccaacaaaggcacatcagtgaacgtaggcaaaggtggagtgaacgtaaacacaggaccaaagaagggtaagccagtgcacgttggagtgggcccacattctccatttgattacaattacgcagccagcgaaacccagtggcacgatgaccccaacgtggcactcttcttcttggaaaaggacttgcactacggaacaaagttgaaccttcacttcactcgctacttcacctcaagtgttgatgcctcgttcttgcctcgatcagttgctgattccatacccttttcatcaaacaaggtgaatgaagtgttaaacaagttctccatcaaggaagggtcagatgaggctcaaactgtgaagaacaccatcatgtgagtgtgtaagtgccctggcattaagggagaggaaaagcgttgcgtgacttcacttgagtccatggttgatttcgccactaccaagctcgggagcaacgatggttgatgctgtttccacagaagtgacaaaaaaagataatgagttacaacagtatacaatggcaccaggggttaagaggttgggtgaggacaaggctagtgttgtgtgtcacaaggagaattacccttatgcagtgttttattgccacaaatcagaaaccacaaaagcctattctgtcccattggagggtgctgatggaagcagggtcaaagcagttgcagtgtgccatactgacacatcaaagtggaatcccaagcatttggcgtttcaagtgcttaaggttcatccaggaactgttcctatctgccacttcctgcctcaggatcatgttgtctttgttcccaagtagaaatgtttgttccgtcccaaaataattattatagctcatgcttcataccttgattttataataacacttcatatatgtcaacatagttggatctagcaacaatattgtatgtttttaacatggtcaatttaagttgcatgtgcccatgatgcattagcaccatgcatgtatgtttaatttaaacataataatatatgctatattgaggctttctctcaaaaaaaaaaaaaaaaaaaaacggctcgagtttgcattcaagtcctttttccatatatgtccttgaataactagcttcaatagcatcagctacagaactcgatgcatgtatttgctcgtactatatagttctctagatatgtatacttttttgctgtttatttagatgctatgtgtggcttcctataggaataacccataagcctttaataaaagcggactaaggggttgg

SEQ ID NO: 128102 - DNA, 309 bp, Glycine max
  Clone ID: PAT_MRT3847_86681C.1
accagagtagaagagcgggtggaatgaaattttatacaggaccatatccccacaaaaaggagatgaggctgcaagggcctgactggccaaatggtggtgacaccagaaaattagagacgacctgcaaagttaaagaggtgacgcgttttaaggagtagttagctcaaaaaaaaaaaatgtgtataaagcgcaaaagcagagcgatttagtcgaggaggtctgcctggaataggtcctggcttgaatatggaagatgcgtgcctagacagtgcaggcagaacaagactgatactttgaatgagcatgtga

SEQ ID NO: 128103 - DNA, 632 bp, Glycine max
  unsure (1)..(632): unsure at all n locations
  Clone ID: PAT_MRT3847_86682C.1
ccacgcgtccgctcatctctaggcctgatatcacatagcgcgtgaagcatggccttagacggcggtgaataacctaagtggacctaagtacggggtcatggaccttctcagtccgtgtcacaacgccttacgatctgacgctggccgaggtagagatgcccgtccttatggcgctgttggaccaagatgagtccctacgaagcgttaaggtggcccagaattaccaggatctctacactaagaacagacgaaccattcctctgaactatattataagcagcgatatggttgggattttggtgttagctattactagttttagttgaatagaaagttctcactggaaagatgtataatcaagtgaatcgcggttctaattttgggcagagttctgttcctccggtgctgccaccaccgccaccaccacagtatcagctagctccgccacattttcatcaatttccaccaccgacacgaccaccatctaatactggaggtccaccgctgccaccaccacctaccaacattggaggaccaccaccaccacctacgccaactcataatgtgtatttacctggacctccccctncgcctacttcgtattgcgcaggtcccttgaaccttgcggttca

SEQ ID NO: 128104 - DNA, 372 bp, Glycine max
  Clone ID: PAT_MRT3847_86683C.1
gtacaaaacaaaacattattatcataaataaaactcaaacacgagtccgcttttctaatctgtactccaacgtgcgcgaatagctggctacacactgtatgcactaaccacagtgctaacttcattcgcttctcgcattgatattataaggaagcggtgccaaatgtgggaaccacggaattttatgtgaatcttgcatgacctaacaaggatgttattacagtcctcgggatggaaacttctgcccagtgcacattggggcaatgtaaatcacccatattgtaggactatatgcttattacaagatgtgaacaacaccagattcaaaggaactgtgtcgaccggatgcccactttgctctgctcaatccgg

SEQ ID NO: 128105 - DNA, 307 bp, Glycine max
  Clone ID: PAT_MRT3847_86684C.1
ctcacgcgttcgcccacgcgtgcgaaagcttttctacatacgtaacttgtcttgtactgcgaacccttactcatcggacgggccgatttcattgttctactcaatgcttatgctagtgcctatgctgatccctaacttcaaactcatttgacagtaaccacgttttctcataacaacgatgaccacttattcgcctttgtagatgcctcctcgtataagcttcccttatcatatttatacaaccagcaaagtacacctatgtgctatcaaacactgcccacagtttatatctctaccttaagctctt

SEQ ID NO: 128106 - DNA, 225 bp, Glycine max
  Clone ID: PAT_MRT3847_86685C.1
acatcctctacacgcttctttttttttttatttttatttattctatttttaaaaacaacaaaataaactgattattgatggtgacattgggccatatgaaattatattgtatacacaatcatatttacctaatatatagtttgcctaccacaaaaactatggaactagtactaaaaacattcctaaaaatttaaaactactaatggacaataaaccgaaattatg

SEQ ID NO: 128107 - DNA, 134 bp, Glycine max
  Clone ID: PAT_MRT3847_86686C.1
atcagtttatgcttcaatgtcttctgcagactgggagagattagaagaaaacttccttcaacatgttcattctttagttcacaattcagattcagattttaggagaaatggaaggatcaggttcattcaggcag

SEQ ID NO: 128108 - DNA, 274 bp, Glycine max
  unsure (1)..(274): unsure at all n locations
  Clone ID: PAT_MRT3847_86687C.1
agaaaagccaactggacgggaagaagggaagcaaaggcaaaaagagagaggaatggaaagggcagaataaggtgtctctctntctctctcttggactgnttcgcttcaaacgcatctatctcttcctcagctctttctactctactactcttaaggcaaagttggtgtaaagaaaggatgatgatcgtggtgctggtggctctttctcaacggacacgatttnttccatttccattttcttcngattncttctntttntgcncatctcatctca

SEQ ID NO: 128109 - DNA, 769 bp, Glycine max
  unsure (1)..(769): unsure at all n locations
  Clone ID: PAT_MRT3847_86688C.1
cccaaatccaatggcttcagagaagaaactttcgaacccaatgagggagataaaggtgcagaagctcgtcctcaatatctccgttggcgagagtggagatcgtcttaccagagccgctaaggttttggaacagcttagtggccaaacccctgtgttttccaaaggttagttctcaataagtttgtaaatgggtagttcagtaatggacatagatctcaaatctgtgttcattggaagtttatgttttaaaattaatttgatcatttttttctcattctatcattttttttaagagatatagattgctggtgaagtggttttgtagaattctccccccagatttagggtagtctattttaggttttttaattgaagcttcattttttttctttaattacaatgtcaagactcacagggctgatagcagggaagtaatggtagtttgagtttcgtaattttcattaattgcaatattaagcgtgaacctattctgtgggaaaaatcagaatagttgtgggtttattgaatgcatttttaagtttccttcaggaacttgattcataaatctgcggaaaaagtgaaaatgaggactctgatatccttgagtgtatgtcttttatctgcttaatttaatttaaaccatgttttctgagtccaaaagatagaaaaaatagtctattgctctgtgaaatattttaaatagtttgtttactggttagtgtttgtaaaggnttttgtatactggattacgtgtgggctgtttttcact

SEQ ID NO: 128110 - DNA, 391 bp, Glycine max
  Clone ID: PAT_MRT3847_86689C.1
gaaaactcttgagactactcctgtcatgtcgggtctcaaagaaggaatggacagattgaaagctagattatcaaaatactctcctggattttctctgtcaaatataaaagatcgtgaatacaagcaagatgaaagtcgccaaacacctttagaggaaaaactgtttagtttaactccagatagtaacgtgcataaaggcttggttgatagcaatgatcatggaattcagtcatttaaaaatatttgcaaatcaagtcaaaatgaagagactgtggatgccaaaatagatgagaaaaacttaagtttgatttcagctcatgtttcttacaatgatgaaaatcctaaggttgtggaaatgggagcttctccctcacaaatgactcatttaatg

SEQ ID NO: 128111 - DNA, 511 bp, Glycine max
  Clone ID: PAT_MRT3847_8668C.1
tacggctgcgagaagacgacagaagggacaaaaaaaaaaaaaaaaaaaaaaaaaaaaaaaaaaaaaaaaaaaaaaaaaaaaaaaaaaaaaaaaaaaaaaaaaacacaataaaaaaaaaaagaggaaaaaaaaaaaaaaaaaaaaaaaaaaaaagggggcctttttaaaggtacaaactttacacccccgggcttggaacaaattagtttttttttaggcccccctaattccaatttatgggccctggtttaaaaaccccttttcgggaaaaaccctggggttcccaaatttaatccctttggagcaattcccctttttcccagttgggataaaaaaaaaaaggccccccccaatggcccttccaaaaatttggccatcctgaatgcaaaatgggacccccctttattgggccctttaagcgcggggggggggggggttacccccaggggacccgttacctttgccagggccttaacccccgttcttttaatttttttcctttcttttttgg

SEQ ID NO: 128112 - DNA, 1214 bp, Glycine max
  Clone ID: PAT_MRT3847_86690C.1
gcgtttcaagcaactcttcaagtttgttctcaccaggaacaactttggctgaagtgaataacatgtttgggacatcgtcgtcgtcacagggacagtggctgaattaccgataccccccagaagcaatatcatttacacatgccaatgtttctatggctcatgggctgaagctagagcaagaagaaaacaaaggaaacttgtcgcatagcgtgagctctttgtacccaagtcacatggaatctgcaaggatattgagtgataataataattcggccttcgacaactccaactttggcttgttggacccgaacaacatctcaagcacgtccagcaacaacaaccgccacaacaataacgtggttgaaattcgagaaattgttcaggcaaggaaaccagcctgttgagaacttcaaccacatggtgaattcccaagcaagcaccaacattggagatcaagggttttcattgagtagcatgaataagggcttggagcacatggtgatgccgcggattgaagagtgggagagtggagaaccagaaataatgcagaagcaacaactacgttcaagtacttcaaacgctactgaagagcacttaaccaaagatttcatgggtattggaccagtgatcaacctgcaaagccagttccgtggacattactgatcatcgagcgggcgagctaggttcaaaataattaatgaagctataaggttaaggtagtgaagttgtgtgatacataagtacgtgtagcagatgatatctactcaaggttttaaaaatcgatccatgactgtaacttgatcacgattaggatcatattaatcatgcacatttattcataatttgtcaccatatcaacaaatacgataaaatcgcagtccgacaaagccgcaaccttgtatgtacgtacctcaaagtcccgataacaatgagatgattaggggcatgataccgagtcggattcggaagcatgcacagtgcacagggtgatatcacgtgatcataaatatcgatatcataaaccccccccgcgaaggagtgggggccattgcgttttgaaaagccaatatatattccctgcattctatgctgtgcttggtgtattgtatattgttaattaaggttaagaattaatttgcctggtttaaaaaaaaaaaaaaaaaaaaaaaaaacaaaaaaaacaaaggggggggggggggggggggttggcggcc

SEQ ID NO: 128113 - DNA, 346 bp, Glycine max
  Clone ID: PAT_MRT3847_86691C.1
acggttagcagtcactgctctgattaaccgattctggacgtatagatcacaaccaagtattggactctatcattggcacacatggcagctcaaatgagcaagatcagaaagtttgtcgcggtcagattgttcactgccgagctgtactaggatctgacacatgaattgtcagcagacgtacactgcggcgtctatattagggttaccacgatgcgcaccaaaatcatgataagagccaacatatcacaaaccggtctaggtgagaagggaaggtgaattagggaacttaccttactggttcataagaggttcataatccacctaaacaacatactgctatatgctc

SEQ ID NO: 128114 - DNA, 245 bp, Glycine max
  Clone ID: PAT_MRT3847_86692C.1
ggggccgttaaactttatcctacttttaacccttaattaaaaatttccctccaaaggcccctttttggaaaaaaagagttttacaaaaaggggccgcaaatcttttaaaaaaagccccaattttttgcaacttacccacacaaaaaaataccttttctaaagaactcccccattataaggggccccaagggttgaaacttgaaaaccctactgggggcccctttttctcgccctggaagacaaat

SEQ ID NO: 128115 - DNA, 366 bp, Glycine max
  Clone ID: PAT_MRT3847_86693C.1
gccacgaatactacctactaggtgcagaagggacaaattttggacctatactttattatttctggagggcagatgcatatatgaaaaaaggtttggaccgagaacctagccaggacaggcttgtagattttagagaagatgattcatggccccacaatatgatggtttgtacttgggcaggctatgggacactatgtggaacgaactttcactgataatcttgatgactatcaacagctgagttgatagccgccacgcgtgctgtcaacttatgcttcctttgctcgtaagacagattatgcatgtggtacctgttgtgctccttcgggggctccttatgagatttcctgacagtaggatcatgac

SEQ ID NO: 128116 - DNA, 305 bp, Glycine max
  Clone ID: PAT_MRT3847_86694C.1
tactggtccggtaatacccaggccgacgcacgcgttgcgcacaagaccaccgaaaggggcagatggacgagcatacggcatgagcctggccgtgacaaggggactgacaggctacagttgttgaaacctaccacatgcatcctatgtatgctaaaggactattcgaacctttaaatgaatgttgaacattacttttactatacctccatcactttgtctttcttaatgtatgtgtttcaattagatgtatgtactgagctctttaattactaaaccatgttaggtcaacatttgccagagtatca

SEQ ID NO: 128117 - DNA, 383 bp, Glycine max
  Clone ID: PAT_MRT3847_86695C.1
caagactcatactctcaaagcgccgcgccgcgccgcgccgtcgaactcaaatcaccctctgtcaaccggcggcgccgtcgcaggaatcgatgaagttgcctgaagaagcagcgtcgcaatcagttcctcgctcgctagagttttggattcgtgtgtttgaggaggttatttatggccacttgtatggcagcgattcaacgaattattcttgactcgtgaacttggcagaggtagtgtgaatttacgttcgaaaaatgcacggtcagcctcgcaaagcattgaagcaagaagacgaagctgctttatcagccaaagcagaaaaactccgttcactccaagctcagttcctcgccattcaccacaccaccttttccggcagggaa

SEQ ID NO: 128118 - DNA, 387 bp, Glycine max
  Clone ID: PAT_MRT3847_86696C.1
aaaaaaaaacccccccttggccaatgggaagggcctttttttacgggaaaaaaaatttgcgtgctggttacaaaagggaagggggcccttacaccccaaattttggggacttttacccttttaaaaaaagcccctgaacataggggaggggggggaaaaaccaaaaattttttttttacccccaaaaaaaaacccccagaaacttccgggaaaaggaccaccttttaaaaaaaaaaaaatttttttaccttccccaagggggggggaaaactttttgggtatttttgggggggggatgtgaagtgcaaaaattacacaaaagggggggggaaaaccaacccggggcctggcaagtgtgactttttaaaaaggggtttttggggggtt

SEQ ID NO: 128119 - DNA, 475 bp, Glycine max
  Clone ID: PAT_MRT3847_86697C.1
gggggcccaaggggtccctttttacccaaaaaaaaagaccttttttttccccaaaagggaaaaccccctaaaaggaaccaaccccggggggttattatgccatattgattaaggggggcccgaacaacccgaacaggaacgggaccccattttgggtccccccatggaccccatgacccttaggttgaacttttttaattggcctttctatataaacccttttttcaagggggggggggttttttcccgtaattttttcaaacctttgctttaaaggggtaaaaaccctgggctgggcccttccaggagccatttggtttttcccccccctggctgggggctattttttttttttatgtttaaaatcctgccccccatcctttggtttgagttgtttttaccccccttttttaactacccccaaaaaaaaatccccaacagaaactctaaccctggttttcctttgtaccccccc

SEQ ID NO: 128120 - DNA, 259 bp, Glycine max
  Clone ID: PAT_MRT3847_86698C.1
gtcaggcgtacgctacgcgtacggcattgcttgaatccgtagatcatagttttggaaacacacatgggactctcttcaggtttgatctcatagagacatgctgagattaccaagccaattgaataccttgcgaccaaatatgagcttggccaacacaaaaacctcccttactgccatcatggtgtactggcatcactgacagatcagaaggacacagttccaccgctgcaaataccacatcaagctgtaccagctgatg

SEQ ID NO: 128121 - DNA, 195 bp, Glycine max
  Clone ID: PAT_MRT3847_86699C.1
ttttggttttactgagaataccgggatagcctagggctgtgctatgaatagtgcttagagggggcgcgccaattctgatattgttaccagttgttcaaaaaactgttaattatggaattctgctagcacaaaagctatgactatgacatttaacccaaacccgagctatgatgcgtggagtatgggaattctgaa

SEQ ID NO: 128122 - DNA, 746 bp, Glycine max
  Clone ID: PAT_MRT3847_8669C.1
gggtaagggtaagcatgcagaaccttcttgttataaatattgaacaccacatttcagtctccatgttgctgaagccccagagactgatcctgagttttggaagactttgttacctggtagctgtgcacatacattagcacatgtagcaggaacagttagtatgtcaaaagttgcggtatcgttcacacacattatcaagagtggtgaacctgcttttagtgttctgggttcaagatttcttttgggtgagagcttccctgtgcctgtctatctgtctttaattccaatcattggtggatgtgcacttgctgctgtgactgagctcaatttccatatgatcggttttatgggagctatgatatcgaatttggcatttgtattccgtaatatcttttccaaaaagggcatgaagggaaagtctgtcagtggaatgaattactatgcttgtttatctattttgtcccttgcaattctcacacccttcgcaattgctgtggaaggaccacagatgtgggctgctggatggcaaacagctatgtctcaaattggaccccaattcatatggcgaaacaatagagttggggaactaagattcctctagggacttgtttgttactgtttttcatgctcaaccacggacaaggaagttgattttgtaatgtgtcactgctggaattttgtaatactaggatgatctggctgtcagtccatctgtagatataataataagaataatgctgctgagg

SEQ ID NO: 128123 - DNA, 542 bp, Glycine max
  Clone ID: PAT_MRT3847_866C.1
ggctcgaggcaacacgtatcactgtgtttggaaagttgtaaggagcttttaggcaggcatcgtggagcccttttggctctcaatcatgttttgggcagaacaattcaagtagcaatccttttgctcttaagccatttggtagtacaactccatttggctcgccaattgattttggaggttcttccactggagttgctcaactgtcttctccattcgcttcaaatacagcattcagttcttcatcgtcaccagcttcagtagttcagttccctctttttggtcatcttcaactcctgattttggtagttcatcgtcatcatttggtggatcatcagtttttggtcagcagcctgcttttggaggctctgaatctacttctactcaaacaggaccatttggtgccacccagccatcacaactagcatttggaaacagcatatttggtttctcaacatcttttggtgcatcatctcaaccagcatttggggcttcaagaacattgcatttggcacttcaagcactccatttgggacctctagtac

SEQ ID NO: 128124 - DNA, 479 bp, Glycine max
  unsure (1)..(479): unsure at all n locations
  Clone ID: PAT_MRT3847_86700C.1
tcgcgggactatatctcatcagatatctaggttatatatctcattctcatggaaaagaaaggcacgtgggaatgggatcagttcatcgaactaggccagcatgcaaaagaaaaaactcattccctcctagtagaggaagcatcaagaggaaaatattcatcttcatatgtggaaagataaggcaacgcatccttgcttatatggtcagctcaacttagcaagccattaatctctttgtttaaaaccaaagaatgctatacgtatctgcttcatatatattccagttgccatgttgtatctacatacgtgacagtacatatttaactaactacctcttgtgtgtgtctgatcgtaagagtttctcatggaacatgtaatatttctttactaaataaatgaagctatttcttattttcatgcatttcgaattagagtagacgtattcaatactcttattgtatattatttnnnnnnttttt

SEQ ID NO: 128125 - DNA, 474 bp, Glycine max
  unsure (1)..(474): unsure at all n locations
  Clone ID: PAT_MRT3847_86701C.1
tacggctgcgagaagacgacagaagggatctcccttgtagaaagagaaaagttttgaaaatgttgccttgttggttttcttattttcctttttgtgtgattgtgtgaaccttatgttagacggataaatgggatccgcgcaaatcgcaaaatggtcccctatatactcattgttcccatactctatttggttcattctaactgatgcctaccttacatacaacacagacaatatgagaaaaagagagggaaagaaaaaagcatgaaagggtgcatccaaccaaagttttaaaagcccgttgagacatatagaaactctcgctagagtgtccgcatgtggtggcgtgagcgtgatattattaaattcgtttcaacaataggaccacatgcacacacatatcttntctccttggtttacttttcatcatcttctaattcaactgtgaangtaccaaaatggccaattgataataac

SEQ ID NO: 128126 - DNA, 321 bp, Glycine max
  Clone ID: PAT_MRT3847_86702C.1
gatttcaaagggatataatataaagtaagcactctacttccttacccttttgccctgaacatgtatatataatatatatatataatattgtcttaatatttttgctacctttctttgtgcttcatcgtcaaccgtacggtaaagaaactatagccacctggaattctgtctctgacatggtcgatgatgacaagagaaataataatctacgacagctgctagtgatttgtctctgaaagaattaggagcttattttatttctagtgccatgaagagagcaagtgaatgggcttattctcatgagattccaagtgatgtcac

SEQ ID NO: 128127 - DNA, 340 bp, Glycine max
  Clone ID: PAT_MRT3847_86703C.1
atatgtacgatggaatttcccatatggagagcaccagttcatccaatattataaaaaaggacagaaatcaatggtttgaagaccaaaatgagtgattcaagtggctcaactagagatgaaattaaagttgagccagtaataattaaatatatattttaatattatataattaacataaaaatatattacatgtttaaaaataatataaaatttcataatgcatagttgaataataacagttggtttgtacatctcatatataccagcttttatttatttatttataaagaaagagagaaattattcttttttttaaaattggttcacactggtttggtac

SEQ ID NO: 128128 - DNA, 496 bp, Glycine max
  Clone ID: PAT_MRT3847_86704C.1
ctttgataatgaactgcagttagcgtctaaattcattgatcaaatccatgcatctagtctaaacatcaacctgaaggacacctggacttggagagctgaagctaatggagagttcacaactaaatctacttaccaagttcttcaatctgagctggatgatcaaggtcagtatgaggggttccagcaactctgtaatataaaaatccctcctaaggctctttcttttgcctggaggttgttatgagatagactccctaccaaggataacctggtcaagagacaaattcaggttgaaaatgacctctgccctttctgccataatcaacctgaaactgcatctcatctttttttcaaatgtgataagattatgcctatgtggtgggaattcttctcttggatcaaggaagacaaggttatccactgcaggccaatgggtaatttcctccaacattattctgcagcagcttcaaaggcttctaacaaaagatggaaaatg

SEQ ID NO: 128129 - DNA, 1172 bp, Glycine max
  unsure (1)..(1172): unsure at all n locations
  Clone ID: PAT_MRT3847_86705C.1
acgagggattttatctgtgcggatagcacgtgaaaaacctttctgcttgagccttctcctttatccatggagatatgctccaatgtaattggcttacagttacattcatttttggaaaaaattattattttgttgatggcttgctgtttttgccccaaataaggtatagcatttaataatagctttgcttgtattcacattgcctcacaattgattattatatcgctaccttgtcttatttggtgacaatactacttccttcgtcaaaatctctgttgtattgggtatgttctgtctgtcctgtttccttatttttagaaataaagttttgatgacttgaacacttcattgttaaaaaatcgcatacagatcttcgtaggaacctaattttacaaaatcagttcccaggattttatttgtgcggatagcaagtgaaaaacctttctgcttgagccctctcctttatccatggagatatgctccaatgtaattggtttacagcttcatccatttttggaaaaaatgattgatattgtgctttgattttgctgtttttgtgcataatagggcatagaaagcattactaatggtagctttctcattgcttgagattgtttttattttatttatcatagttagcttgttgattcttaatgattgtaccttgaatattgatatcccccaatcaaataatcttgtgattttattaaccgtccatttcctccatttttgttgattgaaacctgttacatttttttttaatggattgtgattggcctacgtaagtttgttaattaatattctattcaatcgtaatgacaacgcagttcagtttatgcttttaagaaacagtaaaaaaaaatctaaaagtaaatgttgattttaaggtaaagatttaaaaataccattgagataattgggcgggacatccggtgttttgttggattgaaatttattcaaaatataccaatttttttccagcttgtgtttcttattagtgctattagtgacttgagagtatctaatgtattataatgatgcccttattttattctatatgatctaattgaccttgaaattgcttgttggttatctttgcaggttctcaggactcgtgnnncgtggagcttgttttgtcagggtatttgataggaatttatattatgtttttc

SEQ ID NO: 128130 - DNA, 188 bp, Glycine max
  Clone ID: PAT_MRT3847_86706C.1
gggtcgcctagctcactcggcgccggacgaacttcttgttttgcgatcgcactaaaaattaagccacccttatttttttgtggtgagcgttaaacatagatgaccttcgcacactaattcgctgagagcattagttataaaaacatacacctaaaacaccatggcacctgattatatggatactaatg

SEQ ID NO: 128131 - DNA, 343 bp, Glycine max
  Clone ID: PAT_MRT3847_86707C.1
caagacaggactcagacgattacatttaattccaaatcagatatgaacatttttgcctccttacttcttgatgaatgtggaattggaattccccgaagaattccgatcacatttcctttggcttcaggataagcctaataataaatcatataattccaattcatatatgaaaatttttgcctccatatttcatgaaaatgtgcaattgggattccccgaggaactcagatctcagttcctttggcttcaggatacgcctaataataacacaaataattccaattcatatatgaacatttttgactccttatctcttgaaaatgtgcaattggaattccacgat

SEQ ID NO: 128132 - DNA, 333 bp, Glycine max
  Clone ID: PAT_MRT3847_86708C.1
gggaccggcccggaaccccccgggccgacccacgcgcgcgtaaaaagccgcccgcaacggccaagcccgggggcaaagcacaagaagaagggcggcaaaaaacccccagcccagaacaacaacaacagcacagccacaacagaacaagcacagccggaaccccccaagacgcgcgcaagacaccccaaagacggcaccacgggcaagggcaaaaggccaagaccccaccaaaaaacccagagacgccacgccgacacagccacgcacaaagacgggccccaaacgaaacaccccaagacccccaaacccaagggcaaccgcagaagaccccgc

SEQ ID NO: 128133 - DNA, 148 bp, Glycine max
  Clone ID: PAT_MRT3847_86709C.1
ctagggagtgatttcctgccatataatggccttggaagagggttttgcatgggttatccaccagccaatacttcgttacacccttattaaactacccccgggggggaatttttttgacataacacaactttggttttgccaacccccc

SEQ ID NO: 128134 - DNA, 2198 bp, Glycine max
  Clone ID: PAT_MRT3847_8670C.1
gctgtgaccctcgtgatcacgtatctgccaccaaaccccacaaacacagtattcccaacttgtttttattatttatacggtaaacaaaacacaacacaccaacatcatttgatcatactcattgctgttcaccattttcaattcattcctgtgttagattccaagtggtttggtttggtttgacataaataaacctttcaagatctcagaggggcagaagatcaaagccaagacaacacactctcatatataaaagagtgtctctgataatttgatctttgtttcttctctttctctcctttgagatttttcagcaccccaccaaggttttgtccgaaaagcttgaatttttcgcctaccctttacaatgatctcttcattgagacaacctgttgtagggatcagtggttctgatcttcttttgaggcaaagacatgcaaccctaattaaggcaaggtcctttttaccctctttgtcaagagaaaagggtcaaagatctcttgtttcagttcaaaagccacttcacattgctgcttctcttggtgttggaaattttgtgtcagtgaagagtgatgatgacaaaaggggtgatttggtgaagtgtgaggcctatgaagcagacagatcagaggttgagggtgcaagcacaccatcagaagctgcaaagaaggtgaaaattgggatatattttgcaacctggtgggctttgaatgtggtgttcaatatttataacaagaaggttttgaatgcttacccttacccttggcttacttcaactctctcacttgcatgtgggtctcttatgatgttgatctcttgggccactgggattgctgaagccccaaagactgatcctgagttttggaagtctttgttccctgttgctgttgcacatacaattggacatgtagcggcaacagttagcatgtcaaaagttgcggtatcattcacacacattatcaagagtggtgaacctgcttttagtgttctggtttcaagatttcttttgggtgagagctttcctgtgccagtctatctgtctttaattccaatcattggtggatgtgcacttgctgctgtgactgagctcaatttcaatatgatcggttttatgggggccatgatatcgaatttggcatttgtattccgtaatatcttttcgaaaaagggcatgaagggaaagtctgttagtggaatgaattactacgcatgtttatctattttatctcttgctattctcacacccttcgcaattgctgtggaaggaccgcaaatgtgggctgctggatggcaaacagccatgtctcaaattggaccccaattcatatggtggctagctgctcaaagtgtattctatcatctatacaatcaagtgtcatacatgtctctggatcagatctctcctttgacgtttagcattggaaacaccatgaaacgtatatctgtcattgtgtcttccattattatcttccacacaccagttcaacccatcaatgctcttggtgccgccattgctatccttggaaccttcttgtattcacaggcgaaactatagagttggggaactaagattcctctagggacttgtttgttacagttcttcatgctcaaccagggacaaggaagttgattttgtaatgtgtcactgctggatttttgtaatactaggatgatctggctatcagtccatctgtagatataataataaaaataatgctgctgaggaaacattatcataatacagatgattaggtaggttttttttttttttttggaatttcagaaatgccaatgatttaaaataaatgcgttttgtttataaatttagtatgagaagaatttctcaaaaacattgtttactataaggagcttgcaataatgtgatgctgtgataaattttatgctcacttgtcatgaaacacataaatatataaatgtttgatgttgttagttagataagagattcaacttggggtttaatattttgggggcattgtttcctttttttaagttatgcttagtgaggtgcagtgtggtcctttcatttgtatatgccctttgaccctttccatgtgatgtgttaggtttgtgtagtgagaaagcgaccctttacttttttttaaggacgtgttcccattgtacgtgtcttcgttcattgttgatatttgcatttaattcatataataattaatttgaga

SEQ ID NO: 128135 - DNA, 280 bp, Glycine max
  Clone ID: PAT_MRT3847_86710C.1
ccaacgcgtccgggggtggggaactaaattttccagggagttggaaacaactttttaaggaagccgttttttttgggggggtgggaacaatgcaatgggatatataaacctgaagttttgaacatatttaatttttgttttccggttgtgaaaaaacttgtttaaatgacaagctttgggggaatcaattaaaaatggggttaattgtgaatggttacattgttaaccgccatttaaaaattgggggaaacaaaaagtgattatttttatcattattttt

SEQ ID NO: 128136 - DNA, 523 bp, Glycine max
  unsure (1)..(523): unsure at all n locations
  Clone ID: PAT_MRT3847_86711C.1
cccacgcgtccgagaacgcaccgttttaacgggcaagagttgtgtcccattgtttccttcgtcctatgtaaggttgaccacatcaatttcatgatctttcaaacgcaacacacagtgaaacgcgccctttccactcaatagaggcttgatcatcgctgcagaacttggacataaattctgataaaactctccaatggattatcagggtcgtcttcttgtttttattttgctctcgttcttattaagaggcgagtcatggnggttggttttcatcatctaaggagactccctctagtgacaagactcataccaccaatgaaggcaattttagaggttcaagtgctgagttctctattgaatccttcaatgaccataagggagtgaagttaatagaaaatgctaagaagaaaatgattagctcaaactcgtgttggcaaaatgcttatcaacatctttttgctggatgttctgaaatcttggctgttgatgaagagaggtctagattggcttggcaccttagtga

SEQ ID NO: 128137 - DNA, 155 bp, Glycine max
  Clone ID: PAT_MRT3847_86712C.1
ggggctctgccctgaaaattcgggtttgcccacgctcattatccgccgggacgaagatgacagaaggggggcctttttaaaaacatattcgcgtcataagcccctgcaaacaaatgagtggtgatacacagacattaagctctccaccattacat

SEQ ID NO: 128138 - DNA, 338 bp, Glycine max
  unsure (1)..(338): unsure at all n locations
  Clone ID: PAT_MRT3847_86713C.1
acgcctgcaggtaccggtgccgcaggtcccggggggacccacccgtcgctagtttccttatctctatatataccccattcctctcgtgcttgttgttccacattcatattttcctttcgtgtcctttcattttccctcactttctcgctccccaaacgcgcctctctctcctccaatgggcgagcaggtcaccgacgaccagatcgccgagtgcaaggaggcgttcagcctcttcgacaaggacggcgatgggtncattactaccaaggagcttgggactgtgatgaggggacttggtcaaaacccaactgaggcagaactgcgggatatgataaacg

SEQ ID NO: 128139 - DNA, 585 bp, Glycine max
  Clone ID: PAT_MRT3847_86714C.1
ggatgtgcgaggagatgggattgtcccggatgaggggggtattcaaattcttgcaaggatgcctgtgaagtcccttttgagggtcaaaaccgtgtgcaaactgtggtataggttagtctttggataaattttttattcaactctacaggtgtctacgaagaaccctatgattctggtggagattacccattccttctaatccgtaactaacttaatctgtaatggtcatttgacgggcttgtgtcaattttcacctgatttcttgaatgatacaggtaacggtcggaccttcctgttatggcttggtgagttgctctagtatcccagataaaggatgcttctatgtgtgccctgcgggaactcgtgattccatgatgcttccaacgagtaaggaaaggcatgtgactcgattttagcctgatggtgactgctcacttggctaacttaccctatgattcagcccatcacagtccaatgttcatctagcaaactaccatcgcatgtttggacatagaccagatgaaactttcatatgtggcgggtttgatatcgagctcaacaatgggatgaattttgatcagatac

SEQ ID NO: 128140 - DNA, 298 bp, Glycine max
  Clone ID: PAT_MRT3847_86715C.1
ccatcgagccgaatcccccccgggccgcgtccgctcgccttaaaaccctcgaaagtcacacgacccgaatgatgcagatgtagcccacccctctgtacagtacaactccctgggggggcatgcctgacccttgtcttcgcaaagcaccctctaaggtggtttccatccctgttcacttcgtgggctcagagcgcaccagaacaaattctgattctgccacagagatccagagggtgctgagaggatttctcgtgacgaacaccttgaggaaaatcgctgccatgacggtggagttgga

SEQ ID NO: 128141 - DNA, 745 bp, Glycine max
  unsure (1)..(745): unsure at all n locations
  Clone ID: PAT_MRT3847_86716C.1
ccgggaaccacaactccactcttttgtgttcttgtaattctttntggctaaaatttcagcttccagaattgaaaaaaaatgatcaaacaagttcttcttcttgttctgctcttcttggcctctggattggccctctcagtctcagagtctgagtctgtttctcttctgcctcacgccgctgattccttcaatgttagctatatccagatgaagaacgctgggacttgctcttactcggtggttataactactagctgttcgtctcctaggtatacaagggatcagatcagtatttcttttggggatgcttatggcaaccagatatatgcgccaagactggatgatccagcttcaggtacattcgagagctgttcttcagatacatttcagataactggcctgttactttctattacaacacatatatccccagagatacgtggtatggatttaatttgtgcaacggtgcttcttcttcttcttcataccaggtatctatgcagaaatggcttatatttatggttctaggatttgttcttagctgttggttgtaagtttatgcaactttcatgttatatttcatataccttgtagccatgaaacttagcaccatttgcagaagtagagacaacggatgtgtaaaacccttgtcaaaagttagtttattacttggcttgctttatgtttcatcagagggagtaaaattgaaatgaactttaatttgaatggaagctatcagagtaag

SEQ ID NO: 128142 - DNA, 303 bp, Glycine max
  Clone ID: PAT_MRT3847_86717C.1
tcgccctttttttttttttttttttttttaatttatgttttcttttttaaactgggaagcggggttggtatttaaaataaaaacttaaacgtctttctttccctgaaacgagctctggccatcgtttggaaacctaatgaacagcagctcttcaaccagagagtgcaggccccagcctaggggggaccctgtacaaccaccttatccatatgggacccctctcttaaagggatttcccgtgctgacccccccgaaagcgaaggacagaatcccaagaggattccctttggatattggattctg

SEQ ID NO: 128143 - DNA, 1093 bp, Glycine max
  Clone ID: PAT_MRT3847_86718C.1
aaatcaactcttactccgatagcttccattcaaattaaagttcatttcaattttactccctcagatgaaacatgaaaggttcagcagatactattgggggcccttcttgttcaaacattaaacacaccataaactgaaaacaaatttaaaaaagaaagccaagtaacttttgacaagggttttacacatccggcgtgtctctacttctgcatatggtgctaagtttcatggctacaaggtatgtgaaatattataaaatgaaaattgcataaacttacaaccaacagctaagaacaaatcctagaaccataaatataagccatttctgcattgatacctgatacgaagaagaagaagcaccattgcacaaattaaatccataccatgtatctctggggatatatgtgttgtaatagaaagtaacagccctgccgttataactattgattttcacactttcaggcttccagccatctaatccagatctatataggtacacataacatatctgatatgcacacggaccagttatctgaaatgtatccgaagaacagctctcaaatgtacctgaagctggatcatccagtcttggtgcatatatctgattgccataagcatccccaaaagaaatactgatctgatcccttgtatacctaggagacgaacagctagtagatataaccaccaagtaagaacaagtcccggcgttcttcatctggatatagctgacattgaaggactcagcggcgtgaggcagaagagaaacagattcagtctctgagactgagagggtcaatccagaggccaagaagagcagaacaagaagaacctgtttgatcattttttttttcaattctgaaagctgaaactttagccaaaagaatttacaagaacataaagagtggagctgttggttggggaaaagaaaaaatgcgtaggtttggggtttggacgccttcgttgaaaattcaaccttttattgttgtgtgcgtaagtcataagacataggcaaaactcgataagggtaaatgtatctttaaggtcccccttctgtcgtcttctcgcagcgtctcgagccgaattccgagcttac

SEQ ID NO: 128144 - DNA, 457 bp, Glycine max
  Clone ID: PAT_MRT3847_86719C.1
ccgatatctgtggcattctccctcgtattctcatcgtttccaggcgaaccgttcgcaaaaacaagttcgttgatttcgttggagaataccaccttgaccttatagtaagctacggtggggtgcccgtgattgtccctcgcgtttccggcgttcacacgttgctcaacagctttgagccaattcatggtgaagatattgaggcatgttggtatgatcacaacgacgatcatgacagtgatggcttggatctttcccaagaggagttggaagaaatcagaaggctttattgcgagtgacaccttcattgacaaagagaaagactcaattgagttgagtctggccaaactctgcctcgaaaggaacattccctacttgggaatctgcaggggctcccaggttctcaatgttgcatgtgggggtaccctttaccaggacatagggaaagagctttcaaaaa

SEQ ID NO: 128145 - DNA, 842 bp, Glycine max
  unsure (1)..(842): unsure at all n locations
  Clone ID: PAT_MRT3847_8671C.1
atcaaacctttttctatgagaggaagtaacaacactgaccctcaccgtcacgtatccgtcaccaaaccccacaaacacagtattcccatcttgtttttattatttatacggtaaacaaaacacaacacaccaaacatcattcgcccacgcacattgctgttcaccattttcaattttctaagtggtttggcttggtttgacatacataaacctttcaagatctcagaggggcagaagatcaaagccaagacatcctctcgtatataaagagtgtctctgatttgatctttgtttcttctctttctctcgtttgagatttttcagtactccaccaaggttttgtcagaaaagcttgaatttttcgcctaccctttacaatgatctcttcgttgagacagcctgttgtagggatcagtggttctgatcttcttttgaggcaaagacatgcaactccaattaaggcaaggtcgtttttaccctctttgtcaagagaaaagggtcaaggatctcttgtttcagttcaaaagccactccacattggtgcttctcttggtgttggaaattttgtgtcagtgaagagtgatgctaaaaggggtgatttggtgaagtgtgaggcctatgaggcagacagatcagaggttgagggtgcaagcacaccgtcagaggctgcaaagaaggtaaaaattgggatatattttgcaacctggtgggctctgaatgtggtgttcaatatttataacaagaaggttctgaatgcctacccttaccctttgcttacttcaactctctcacttgcatgtgggtctcttatgatngttgatctcttggggcactgggattgc

SEQ ID NO: 128146 - DNA, 1017 bp, Glycine max
  Clone ID: PAT_MRT3847_86720C.1
cacatcatatcttcaagtttgagattatttagtgctaaatttttccaacaattgtcagaagaacagcgataaatcaattcttactctgatagcttccattcaaattaaagttcatttcaattttactccctctgatgaaacataaagcaagccaagtaataaactaacttttgacaagggttttacacatccggtgtctctacttctgcaaatggtgctaagtttcatggctacaaggtatatgaaatataacatgaaagttgcataaacttacaaccaacagctaagaacaaatcctagaaccataaatataagccatttctgcatagatacctggtatgaagaagaagaagaagcaccgttgcacaaattaaatccataccacgtatctctggggatatatgtgttgtaatagaaagtaacaggcctgccgttataaccatttattttcacactttcaggcttccagccatctaatccagatctatataggtacacataacatatctgatatgcacacggaccagttatctgaaatgttctgaagaacagctctcgaatgtacctgaagctggatcatccagtcttggcgcatatatctggttgccataagcatccccaaaagaaatactgatctgatcccttgtatacctaggagacgaacagctagtagttataaccaccgagtaagagcaagtcccagcgttcttcatctggatatagctaacattgaaggaatcagcggcgtgaggcagaagagaaacagactcagactctgagactgagagggccaatccagaggccaagaagagcagaacaagaagaagaacttgtttgatcattttttttcaattctggaagctgaaattttagccaaaagaattacaagaacacaaaagagtggagttgttggttggggaaaagaagaaatgagggaggtttggggttttagatgcaggtatccaatgaaattagaatttctccttgtaatttatgctgataattgatgaaaattct

SEQ ID NO: 128147 - DNA, 892 bp, Glycine max
  unsure (1)..(892): unsure at all n locations
  Clone ID: PAT_MRT3847_86721C.1
ttagcaatattgtttggaccatgagcccaacagagtcaaatacccgcaagtcaattaccgaggaagaatttttaaaggatgtgaattatgctttagattatggacatggacctcatcntacatcaagcttatcaggaactcgagacgtgttctcttggtttaaaacggatgcaacactatcaactaatgaattctttgaaattcctccaaaagtaacaaggttggcatctgaaaggatggtgtttcctttgtctttaaggcatgccaattcctatgcattgaaacgtgtggttcttattggggatgcagcccacacagtccatcctcttgctggtcaaggagttaatttgggttttggagatgcattttctctttcaagaattattgcagaggggattgctttgggcactgatattggagaggtaaatatgttaaagaagtatgaagcagagagaaaaacagcaaatattatgatgatggcaatccttgatggcgtccaaaaagcctattctattgattttggaccttttaatattctgcgagctgcagccttccatggggcaaactatatatcaccactcaaaagaagtatcatttcctatgcttcaggggaacataaattacccattttcttctgaatacagaaatgtcatttaggttaagaagtggacctacaaaatgcagggtgagaatatcaactccctaacttatttaatatattcactttactttggagattaattagtctcttgattaactttgaaagtttacatatgttgaattaggggtgttaaaaaaaactggttcgaattgaaccggattgtaaccgaacctaaatcaaattgatttttttcccaaagtagttgaagaaaaaatgagtgcactattttat

SEQ ID NO: 128148 - DNA, 379 bp, Glycine max
  Clone ID: PAT_MRT3847_86722C.1
tgccactgtcactggtgagaagaacgcagttaaaggccttccctccctacaaaagaactcctgttcattcagagttgtagacagtgggggcaagacgatcaagactgacaagcctgatggaattaatggtggtacggctgtgagggaaggaggagacgcatgtggcaggaaaggaatgggaaaggacgatcaccaggttgtacaccaacaccgtgctaatgcagatggtaacagacctatctacgacaccaaggactgggctgcaaacggtgatgactacgctggagtgacgactgacgaggatatcagggctgtgacactacttgatgctcatgatggtggagcactacttggctacagcacaagtgctgaggatcaa

SEQ ID NO: 128149 - DNA, 362 bp, Glycine max
  Clone ID: PAT_MRT3847_86723C.1
ggaggggtttaggtttaaagttgaagaaggagcgagcatggggaaggaaggagatctatgggacgattcatctctcatcaatgccttcgaccaagctatttctactttcaacgttctcttcataaccctatttttcactcttcaaattcggtcttaatctgagaatttcgttattaactaatttacagaaaatgcatagcagcggcaaacacaaaggcgccgccacggctcgagaggcggacacaatcatcggagaaaatggctccaatgttgacactacaagggatgctgatacgaatattccagctactgatgtgcctgattcaggtgaaactggtaatttgtcaaagttggaagaaaat

SEQ ID NO: 128150 - DNA, 368 bp, Glycine max
  Clone ID: PAT_MRT3847_86724C.1
cttggagcacttggctttcaagggtagctttcctttccaaattgagagcttgggtggaagcttcgatgcttacactactcgcgaacattccgccttccttgtccagactttcaacaacaatgttgcccagactgttgatatcttgtccgaagctgttcagaaccccaaccttagcgccattgatgaagctcgtgaggctatcttgaagcagcaacagaaggctgccaacaatggtgagcagattgtctttgatcacttgcacgccactgctttttcaaggtgaaagtcttggtcgttccattgctggtacccccgagtcttgtcaagccatcttttgcgatgacctcttcaactttatttagaacaac

SEQ ID NO: 128151 - DNA, 535 bp, Glycine max
  Clone ID: PAT_MRT3847_86725C.1
ggctcgagaactatgaggtgcatgatgtgtggtaaggtgtctggcaaggtgatgcggttcaccgatcccaaggtggttggtttcatcatccctgacgatggcggcgaggaactcttggttcacccttctccgatcaaatctcaccgttaccgaatgctacctgcaggagattacgctccgttcgctatggaatctcaatctgaccgacccgcgctggctgatgatgctactggcgccgacgagggccagactcctatgaaccagactctgcggtgctggatggccaagatctatctgtacaccaggtggggtcataccgggaatggttcgtcagttgaagctacttgtggaacaagcaagctatggagtctgaaggggatacggttattgagttcaatactctggctgcagctcttactactattcaaacgtataatgacgctattatgccgactggagggcaggatgtcatggtgacttgtacagcttttactgccggtgagaggtcacgtctagatgattctcttgattacac

SEQ ID NO: 128152 - DNA, 515 bp, Glycine max
  Clone ID: PAT_MRT3847_86726C.1
gactctgccctgccccttttcctgtgttaagtacaatgtgggtaacagttgtagctcaaaagattactaaagccagctgtgggcacacacgcctgatcctaccactaaggaaagaccactagagaccagcctaggctaacagtataaaactgccttcaaaacaaaacaaaacaggaaaacacataatttcagatggaggaaaagtagtgccagagagatggaatcagtaggtagagcagggatgaggagcagaacctgcaggcccagaatccaggtcagtcccagcagctatgtggccacctgtagtctcaggacggggcaggcagaagtggtgctgtctggaacagggggctaactagactggctggattgggtacttccagactccgcaagaggtccttcttcaataactagagaacaatcaggaagtcgtggtcagcttcagccctctaggcacacacacacgtatgggcatacataatcctggggttgcctcctccccaacatacatgtgc

SEQ ID NO: 128153 - DNA, 217 bp, Glycine max
  Clone ID: PAT_MRT3847_86727C.1
aacttctgaaactgctgacacacacaaagatgaagatgcgtctgcgattgatgacaaagagaggctcaagaaagttgcttcaatgaagaagaagaaatcaatcaaggacatggatgctgctgctcgagctgctgctaatgaggctgctgcaaggaatgccctgctacctgcttccaaaactaacgaaaacgcacgctacaatcaacaaccaatgcag

SEQ ID NO: 128154 - DNA, 1002 bp, Glycine max
  Clone ID: PAT_MRT3847_86728C.1
ggaatgtatagcccaatgcattccagcaacaagaagaagtcattggccatgttccagcatgattcaaattgtatggcacttctgatggatggaagtgctgcattgggtcttgatttgagttttgttacgcatgtatttctaatggagccaatttgggacagaagtatggaggagcaagtaattagtcgtgctcatcgaatgggtgcttctcgtcctattcatgtggcaacattagcaatgcgtcgtacaatggtagagcaaatgctaggctttttacaggatgctgataactttagaagatcaccaattaaggatgttactgaatctgatgatgatagtgggggacgaggatatagatcattgcatgattttgctgaaagtagttatctactgaaacttagatctgtgtatactaatttggaacgtccagaaggtgtttgattgatcaacatcaagcaagtactgactaatttacttggagcaagtcctgtggattgcatgctcttgaatatggttttactttttggatatatagtcttacaggtgatcatttaatgagagatggtaccatatgcattggagagtggaaactattctttttgtgcaacattagtgggtggagctatttgcagcgtcacttctgtttgccagtgattaatgaaatactggaagtgtccctgcttattcttttgtaaaggatttagtctagttgatttgatgtgatctagtaggcagtttggagtcaagtattcgaattgaaataaaatgttgagttattggaaaacaagtgttctcccacaccctttctcttaacagtaggtaatattgaaaaatcataataacccttgccccctaaaattggtgatatcatgtatgttcttatgactatcgatttcattatatgcagctaatattgtaattattagcaatgatcccagtgcttattagtcaacagaaatttcaagatatattagcaatttgagggagaaaaggtttctgttc

SEQ ID NO: 128155 - DNA, 362 bp, Glycine max
  Clone ID: PAT_MRT3847_86729C.1
attatttccaccatctcaacagtgggtggcttcggtttctcatccttggccagagtggatccaactcatgaagtgcttgttcagcaaggggatactttgtcatgaggaggaaaaaatgttccgcaatgctggagatttcttagataaaggaggctatttcaacaaataatgcatgctgggaaattggagaatcacccatcaagatatgaataaactgggaacctaaaatttcttcggtgcttggtagaacacagagccaaaagctaagtcggttacaagagtctcactattaatattatgagcacagtgagcaaccgtctgtcaaaagttgataactggcaaagaatcagtttcagcccctg

SEQ ID NO: 128156 - DNA, 181 bp, Glycine max
  unsure (1)..(181): unsure at all n locations
  Clone ID: PAT_MRT3847_8672C.1
cacccacgcctcacaagcctctatctactcactatatatacatacttaaactctctattacatcccaanataacccgccccgcaattatacacacactatcctcaaccttcaactaaaaccctacaacaaaacttattaaatctacccctaacataactaaaaacattatatcaacaaccc

SEQ ID NO: 128157 - DNA, 425 bp, Glycine max
  Clone ID: PAT_MRT3847_86730C.1
aaaaaaataacgcccttctctatcacaaattttatctgggggaaatccccttgtcacatccaccactgttggggcagatattttacccgaaaatcacctcaacccctttcacgtataaaaagataatgcgccgccccaaaaattcagagggccaattctccaggtggtgggtgcactaagggaaaatcttgtttattggggaacttttttattccttaaatcgtaaaaaagggggcatcctgggggagcacacacccttgcccatttgcagaataggggcgtggggggctcttgccctagtctcaacctccaaagctttataagcgggattttaaaaaccctgtctaacacagcaataacagtcgtaaacccagttcactccccattgagagatttacccttcacattggcgctcaaaaactttt

SEQ ID NO: 128158 - DNA, 308 bp, Glycine max
  Clone ID: PAT_MRT3847_86731C.1
cctataaaaaaaaaaaaaaaaaaaaaaaaagaaggggaaaaaaaaaaaaaacaaaagcaaaaaaaacaaagaaaaaaaagaaaaaaaaaaaaaaaaaccaacaaaaaagagaacgaaaaacaaaaagggaaaagaaaaaacaacaacataagaagcatggcacacaagactaaagagggggcagccctcttaaacacacccagggtcattcgctgaacactcgcctattagatatatgactagggggccacacaaaaacaactcctggccctttctcagaactgtggggaaggggaagaccaagcggg

SEQ ID NO: 128159 - DNA, 455 bp, Glycine max
  Clone ID: PAT_MRT3847_86732C.1
tttttttttttttttttttttttttttttttttttttttttttttttttttttttttcgggaaaaacatatttcgttttagttttgggggttcaacggtttaacccttgggtaacttttttttttaataaaacccccggggaagttgggggcgtcctttactttccaaatcaacttttaaagggcccccccaaaggtttgggggctaaaatttttaaaatgggctgggacccaaaaacctgaagcaaaaccggctttcccccccccggggttgtttttaaccaaagggctaaaaaatgtggccccggcccctaggaaacctccaaaagccttttaaaaagggaaattccaattccaaattcctggttttggccctttccgtttggaaaaagtttaaaggcctttttttttttctccttaaaaataaggtttttccttggccaaggccttccccac

SEQ ID NO: 128160 - DNA, 670 bp, Glycine max
  unsure (1)..(670): unsure at all n locations
  Clone ID: PAT_MRT3847_86733C.1
ttgactcgtgggaaaagatcgattggaaaaatacatcagtgagatgtctgtggttggtggatggagtcaaaatgctatccaaacaacaaattcatggcttagagaagggttaaagccacgctgtattacgagggatctaaagtggggggttcctgttccacatgaaaaatacagtgacaaggttttctatgtttggtttgatgcacctattggatatgtctcaattacttcgtgctacacacatgaatgggagaaatggtggaaaaacccagagaatgtggagctgtatcagtttatgggcaaggacaatgtgccattccacactgtgatgtttccatctactctacttggaactagtgaaaattggactttaatgaagactattagtgttactgaatacttgaattatgaagcagggaagttttctaagagcaaaggtattggngtttttggtaatgatgcgaaagatactaatattccagttgaagtatggagatattacttgctcacaaataggccggaggtatcagatacgttatttacatggccggacttgcaagctaaactaaatagttggtcaaactctttcatcattttggtcaaactctttatcacagtttttggaacgtggcaaggatatgattccattatcccctctgttcctgataat

SEQ ID NO: 128161 - DNA, 598 bp, Glycine max
  Clone ID: PAT_MRT3847_86734C.1
cctcgtgccgaattcggcacgaggctgtgataagcatagtgtgagaaccaaacgaagtctagcccaactagcaaacacactatccaatggctgacaaggagtaggacccttcacttggaatggattagctacgtgctaggctatcatggaaagatgaacgagacagtcaagcaagggattctggccctttgcctcagaagaagaaggaaaaagaaaggtctgtggcgcgatgattgtgcttggagagcagtgagagtcaaggcatcttgcaggaaaaaaagaaagacgaaaactcaaaacaaaataaatagacaaaagaaaaaaagaaaagaaagttgacagagttgaaagttgaaggaaatgcttccggtgaacaaagatattgaagttcgaaagaaaaaagaaagacaagaaagagacaacgaaaacccttgaaaagaaatgagacaaaagattaaagaaaataaacaagagatgagctaccgaagcaatagtaagcaaccaggaaaagtaaaaagaaaaagtcctcaaaagaaagaaagaaagagagttcaagaatcagtccaaaaaagaaaaagaaagagtctaaaagaaaagt

SEQ ID NO: 128162 - DNA, 387 bp, Glycine max
  Clone ID: PAT_MRT3847_86735C.1
aaaacccataaaaaatcccggaaaagggggccaaaaattaccggttttaaaaccccaccggctaaaggggaaaccagaccaaaagggcaaaaaacccaataatgggccaaaccccaaaggggcccaaaaaaaaataaagggccaggcaaaaactttgggccaaaaacaattaaccttaaaaaaaacccgaaacgataaatccccaacaaggccccggtttaaaacaaacaaaacgaaagtggagccccacaatttccccccccaaatttaccgggacttttttttaggccccaaaggggtaccatgaccccccttttttttacgggggttcacacccccagggggccaaccagcctaacatttgggggaaaaaaatttggcccgggg

SEQ ID NO: 128163 - DNA, 315 bp, Glycine max
  unsure (1)..(315): unsure at all n locations
  Clone ID: PAT_MRT3847_86736C.1
aattcncgtaccgacccacgcctcagcccacgcgtacgtacaggcgtcagtacagcagcgagaggcagacagaaaggaatattccctacaattaaaccggccgcacgatccaatccaagctcacatagggtcgcaggacacatcatgacgcttccaaattggcacctaatgtcagtacattcgccgatcttttacaacatcttaactgagaagtcccaggttttaccgaacttggacaccgtgcatcacatccgcctttcgcaatctggcgtcatagttaaaaggcccaccacgctttacctacctaacatttgc

SEQ ID NO: 128164 - DNA, 204 bp, Glycine max
  Clone ID: PAT_MRT3847_86737C.1
caaccacagagaatggactcgccggctagagtctctcatcatgcatccacttggggtcgcgtgagtactttgtcggtgaggggatcatcatgccaagagacgtagcgctgctactcgcgctggtctcacgatagcactcgcagagtgagctgctcgtagagctaggcgtgattgcttcctagaggttgcgcgtggtgatcgtgg

SEQ ID NO: 128165 - DNA, 255 bp, Glycine max
  Clone ID: PAT_MRT3847_86738C.1
ccatcttcagcacaaggtgtgccttatcctggccctctattaggatgatacacagtgctctttttgttactgatttatcttcttgtttttggacagttctgctcagaaggaaaggtgtatttgtccatgttggaagacactggcttttggttagaaagcaaaattttatcttttattcaagatcaagaagaagactacctgaagcttcatagggtcatttatcagcaaattatccagacctacctgactgtgtgt

SEQ ID NO: 128166 - DNA, 159 bp, Glycine max
  Clone ID: PAT_MRT3847_86739C.1
ttttagaaccgaaattgtgtggttcttaaatataatggttaccaaccaggctggggttgaaattctgggggaaagaaatctttctcccttcaaaggatcataacttacattctgggcagcctgttttaaacgccacggatttattttctatggcaaaaa

SEQ ID NO: 128167 - DNA, 538 bp, Glycine max
  unsure (1)..(538): unsure at all n locations
  Clone ID: PAT_MRT3847_8673C.1
ttggngagggnaggtcacgcccatttccacctnttntacctctagggtttntnactttcttccacgcatccttctaacttattcaattccccttacattcaactctcctatgccgaatctgcaacaattacactaaatgaatngcnaacttttcgcacccctcactaggggggtttgggaagaaagagtgtatgtgtgtgtcaacgtgctaacataaatacaactgcttctctttctctttctctttctctcgatgttttcaacgaaggaaagaagtgggttttgcgtgtggccagatgcgagacaactttgcttagggaaaggtcttctatatggatttatgcgattattttcaataccattaaaaacattgcgtggagctagtcggtcgctgagagtaaatcaattttgcagtgtagggaatctatcagcctcattgcagatagaattggttccatgccttagggacaattatgcatatcttttacacgatgtggatacggggacagttggtgttgatgatccttttgaagctgca

SEQ ID NO: 128168 - DNA, 224 bp, Glycine max
  Clone ID: PAT_MRT3847_86740C.1
aggcccggaatgaccgactcgtcccacacatacacataaatttcaatctaaacgatattcacatcctttctttgtatattctctcagggttctgggcaagtttgggaagctctgaaggatatacaaagaaatttgtttatgtactaaacgctattacaataattaaatgcatctcatcctttaaaaatcatatattttaccattaaaaattattacattcttat

SEQ ID NO: 128169 - DNA, 732 bp, Glycine max
  unsure (1)..(732): unsure at all n locations
  Clone ID: PAT_MRT3847_86741C.1
ccacgcgtccgcccacgcgttcgcttttttctgtttcttcttctcaggggtgccccctctcactctgtgactgtagctggcagctcaagtgttccttgttaagatctgtggtttggttttcgggaggaaacaaaaagaggaaaaatgaatagctacagctactatgggtaccaagagaagaacaccttgacaagctgtgaggagacgaacatggaatcagtgatttgccccaaacctcgccgattgggtctcataaaccactcttccatcaacacgcaaatcagaccctcaaggcaccccatcatcagcttccaatctgaggtggaagattcaggagttggggcagcgcttctggacatgctcctccccaaggaaaattgctatctggaaagatctggaggccaagtggtagcatcatcaccaccatttttctctggatctcctcctagcagggcctctaaccctctaatccaagatgagcaatttggtaatgggaattttagtccatttaccgaggcatcctcttcttcagctcgtggttgtgttccaaagaaatttggtcacacaccagctgcggtaaggatcgaaggttttgactgtcttaacagagataggagaagctgcagcatctctgctgtagcataaaccatttttgaactaanaatatatataaaaaaaaagagaactaatacaggaagcagagaaaagatggtagaggactaaaactcaatc

SEQ ID NO: 128170 - DNA, 1278 bp, Glycine max
  Clone ID: PAT_MRT3847_86742C.1
ggctcgagttcctcttctcctctcggggtgtcccctctcactctgtgactgtcgctggcagctcaggtactctcttctgtctttacaaataaaaaccagctcaggtacccttttttaattcaaatttacttgtaaagtctcaaaatttaaagcctttttgggttttcatctgctgaaaaataaagggcctgagaagaaggtgttccttgttaagatctgtggtttggttttcgggagggaacaagaaaaaaaggaaaagatgaatagctacagctactatgggtaccaagagaagaacaccttgacaagctgtgaggagacgaggatggaatcagtgatttgccccaaacctcgccgattgggtctcataaaccactcttccatcaacacagaagtcggaccctcgaggcaccccatcatcaggaaattctctgttcttttttctttttggtttttcaagcaaatcggttataaaaattatgacttttctgtatttgttcactaaaaataagcagcttccaacctgaggtggaagattcaggagttggggcagcgcttctggacatgctcctccccaaggaaaattgctatctggaaagatccggagaccaagaggtagcatcatcaccaccatttttctctggatctcctcctagcagggcctctaaccctctaatccaagatgagcagtttggtaatgggaattttattccatttaccgaggcatcctcttcttcagctcgtggttgtgttccaaagaaatttggtcacacaccagctgcggtaaggatcgaaggttttgactgtcttaacagagataggagaagctgcagcatctctgctgtagcataaaccatttttgaactaaaaatatatataaaaaaaaagagaactaatacaggaagcagagaaaagatggtagaggactaaaactcaatcaagttcaaatagtactattgtgtatataagtggtctgtgctactctgtttttgagtttggtgttatgtaaaatttcagatgggcaggattttttttttttttttttgtggtttttccttttgatcaataaaagaaaacatggcagggggaaaatgagcaactgtcttgttaggttcgtagagtcttacaattgttatgtgtctgtcactaaggtcctcccgttgtaattgtaatttggaggaaattgaggaaaaatctttggaattttgtaaatcagttttatttattaatttttgtgggtgcccttttttggaggtgttgcctatttgatattatgtt

SEQ ID NO: 128171 - DNA, 245 bp, Glycine max
  Clone ID: PAT_MRT3847_86743C.1
aaagtgcagcagcatcttgaatggaacaacaaggagggttgtgaaagttgatatctcttacagtgacatatatggtaacatattcgaaaatttctctcaactcactgaactcacgcaccttgatatttcttggaactctctctctgggggaattcctgaggatttgacgaggagccaaggtgtgctcagcggaatctggctcataatactcttaagggggagttgaatttgaagggtttgacaaa

SEQ ID NO: 128172 - DNA, 208 bp, Glycine max
  unsure (1)..(208): unsure at all n locations
  Clone ID: PAT_MRT3847_86744C.1
gccctctgctagacatgccttagtcggcaactggaagccgagcaagaatgacactatggagaatcgacttcctggattgggcactacaacgaacattctccacggggatggtgatagtggaccaggagatgtggagtcgatgaacaagatcgcgccccattaccagaaatatcttttttttctaggngncggncgagaacaggggggg

SEQ ID NO: 128173 - DNA, 161 bp, Glycine max
  Clone ID: PAT_MRT3847_86745C.1
gccaaaaagatgtactattagctggtctgaacatttactttctaagcttctagtggcgccaaaaaacatgttttattgctagagcttgatttaaaagagtcccatgtctagcagtcccggaacttgtttaacgcaagcctaaccccctaaagctttttttt

SEQ ID NO: 128174 - DNA, 886 bp, Glycine max
  Clone ID: PAT_MRT3847_86746C.1
ccaacacaagtagacctcatagtcacaattgagaccaaaatgaaaatggttcatggtgcattgtttttgctggcagcagttgccacgttgcacgtgtcatcggaggcagctgcagctccgcccccggcgacggcgctctccgcggcggcgagggagttcttggaggcgcacaaccaggccagggcggcggtgggggtggagccgctgcggtggagcgagcaggtggcgaacgtgacgagcaagctggcgcggtaccagcgggtcaagacggggtgccagttcgcgaacctgaccgcgggcaagtacggcgcgaaccagctcttggcgcgtggcagcgcggcggtgacgccgcgcatggcggtggaggagtgggtgaagcagaagcaattctacaaccacgccgacaactcctgcgcccccaaccaccgctgcggcgtctacacgcaggtcgtgtggaggaagtcggtggagctcggctgcgctcaggccacgtgtgtgaaggagcaggctagcttgaccatttgtttctataaccctcctgggaactacgttggagaaagcccatactaaatacttatcatctcatgcttagagcttgtttggatagaggtagaggtagaagtgctttttgagagcttttcaaagcttattaatgacttgtatccaaacagacctgcatgcttatcatgtttagcttcactatatggatacatgctagaagagtttttgaaagttttattccaaaagaccatgtcttgtgaagttaattatgctaatttaatgagtgaaactgatatctattatgtatgtatcttgagatcattattatgtgaccatgtattgggactaattatgaattgggtcatataaggtttaatctcctgcc

SEQ ID NO: 128175 - DNA, 106 bp, Glycine max
  Clone ID: PAT_MRT3847_86747C.1
cggttgttcatatccccgaagaaccgggatgcgaggtggtgccttgtgaataaaggtatgggcattggaccacctcgcatcccgggcgttcatatccccgaagaac

SEQ ID NO: 128176 - DNA, 273 bp, Glycine max
  Clone ID: PAT_MRT3847_86748C.1
ctcgagccgcgagagccgctctgtgccgttgagaattcttctgtaccgatggggacgtatctgttacctgtgctgatgctgcaccatgagcgaagatcataattcgtatagagtagtaacaaaatgtatccatagatagaaatgatggatgctaacgtactgtaggggggacgatattcctgtcacgcgctggtgtgtttgcgggacatagaggtcctccggactagtgaagaaacattgttctaagagatatacatcgaggatcctgctgta

SEQ ID NO: 128177 - DNA, 948 bp, Glycine max
  Clone ID: PAT_MRT3847_86749C.1
atgaagaacacagaacttctatcaagagtcaatgctgatgacatcatccacaggataagggagtggagaaagggaaatgggctccaatctggaacagtacatactgctcaacaggttcatgatcacaataccagctctaccgttttggcatctcttcccttctacaggacttacaagccaaagccaggatcagggggttcttcaggtgcctttgcagcaaaaggacctgctgaaggagcttcttatgatccctggattggaaggaaagtttggacaagaggatcatcagctagcaaagaacatcaaacagaggtgcaggcacagaacagaggggttcagatagcaagaaaggcaaagagggtcatcacaaggccctctcaccttagtgactacggactacatgctttggtttatgatatgaattcagcaaatgaaacatgggagtgggtcaatcttaaagagatatctccagaagatattcgttgggagggtcaagatcctggaatatctggtaaaggtggccggcccggtccaggtagaggattgaagaagtctatgcctcacggtggtgcagttactggttctggaagaggtaggggaatgatgaaggtgcagcctaagaaagatttcactttgtcacaaaaaggggcaggaagaaggctacaaatgatattgagatactccatacagatacccttatcaaggaggaagatgaacaggctcttgttaatgcaattaccaggctcggagatgtgtctgagggtgaaagtgccagatgtagaacctcccttttcgcaagaccagtcaatggatcaggaaaaacactggaagaaacaacagtataattcgagtggtgttagagtaccagacggttcaaatggtgataaattaccaagagaaactagtgctccatctgagtatccgcacgaagttggcaacaaggcatga

SEQ ID NO: 128178 - DNA, 354 bp, Glycine max
  Clone ID: PAT_MRT3847_8674C.1
gtgaggtttttgtgatggacattgcttgtggggtgtctgatatttgttttgatacagatgctggggcgctttttacattctgttggggactagaaggacggggccaaaaaagttttttttctccacccgctttatcaaatatacccccttaaaaaacgcccacttttgtgccccccaaagaaaaaagaatttggcctccccccaaagagggggctttttgtttaaggcacccaaaaaacccttttttttttgggggggggggccccccctttaaaaagggtgaaacttgaaccggacaactctttcctggacggggaaaaaataagggggggggggaaaccccccccggggggg

SEQ ID NO: 128179 - DNA, 194 bp, Glycine max
  Clone ID: PAT_MRT3847_86750C.1
caatacgactgttgtgtacacgatatgtgagctcatctcatttctatgcgacttctagcatgttcttggctcccagtttgtcagcttgtcgaccatgacgtcggcacccacaaagagcttacaagtttggacgttcaggttgctccgcctcaggccggcgaggtccgcgtccacatggtcttcactgctgtctg

SEQ ID NO: 128180 - DNA, 1695 bp, Glycine max
  Clone ID: PAT_MRT3847_86751C.1
atgaagaacacagaacttctatcaagagtcaatgctgatgacatcatccacaggataagggagtggagaaagggaaatgggctccaatctggaacagtacatactgctcaacaggttcatgatcacaataccagctctaccgttttggcatctcgtaagaaaaaaaagacatcacaatctgtggcttcattatccttgggtgcaccatctcctgcagttcatccatctatgcaaccatcatcatccgcattgaagcatgaacctccatcaggaactaagaccacaaagcaaaaatcattcccttctacaggacttacaagccaaagccaggatcagggggttcttcaggtgcctttgcagcaaaaggacctgctgaaggagcttcttatgatccctggattggaaggaaagtttggacaaggtggcctgaagaccaccacttctatgaagctgcaaagagggtcatcacaaggccctctcaccttagtgactacgtatgaagaaggttcgaatgaaggaatttgctctggaattgctaagcgtggctggtgctggcctcgaatccagtctcataagcttgttcctctaacaacaatgctgctgagggattggcatatagtcaatgtccttttgctatcttggatcatcattcgcattgaagatattcgttgggagggtcaagatcctggaatatctggtaaaggtggccggcccggtccaggtagaggattgaagaagtctatgcctcacggtggtgcagttactggttctggaagaggtaggggaatgatgaaggtgcagcctaagaaagatttcactttgtcacaaaaaggggcaggaagaaggctacaaatgatattgagatactccatacagatacccttatcaaggagaatggaaccaaaacaggttgaaaaggtgtttactgcaagccatcctgatcccatggaaatggagaaagcaaagaaaatgctaaaagaagatgaacaggctcttgttaatgcaattaccaggctcggagatgtgtctgagggtgaaagtgatgtagaacctcccttttcgcaagaccagtcaatggatcaggaaaaacactggaagaaacaacagtataattcgagtggtgttagagtaccagacggttcaaatggtgataaattaccaagagaaactagtgctccatctgagtatccgcacgaagttggcaacaaggcatgagaacttttttatgaaatgcaacgctgtgaataaagcatggacgtttgtggacgttcttttctttgttctttggctaggatataacttccttgatattttagattattgattacaagactctttcatcctttatgttccttgcactctcttgctttaagccagatggagaacctccgttttcgcaagggctgtcaatggatcaggaaaaacgctggaagaaacaacagtataattcgggtggtgttggagtaccagatggttcaaatggtgataaattacaaagagaaactagtgctccatctgagtatccgcatgaagttggcaacaacgcatgactaatgtaatatgctattattattgtataattgtagtttctttttgtatctattaagttgtgcagcgggtagcttcaatctagagagacaaccgatatgttacttgtaaattataaattactaaaaacatggttcttatgcttgt

SEQ ID NO: 128181 - DNA, 501 bp, Glycine max
  Clone ID: PAT_MRT3847_86752C.1
tttttttttttttttttttttaagcactgaaagaagcattgaacacaagaaacacaaccaattagatattacaataattacataagctgtttagtagaaatcccctacaagggtgtttagccagccattacagaagaaaccctaacaataattagattacaaaacctaggtatctctgcaaaagctactcctcttgctgcctccagagctcttttcctgtaacaggcactgtggtgtgctggggaattctatgccctaggtattatataagttgtgtaccctaattctgcataagacatactttaaataggctctgaattcgtgacgttgcgcttagcgcgagtaagtggatttgagcttagcaacagtcgtgcgttgagcctggcttaagacaactgctgcgcttagcgcattgatctcgcgcttagggcgcgaccttgatattgatgctttgccagattcttttgttgtgctaagcgcgctgaagctgcgcttaacgat

SEQ ID NO: 128182 - DNA, 889 bp, Glycine max
  Clone ID: PAT_MRT3847_86753C.1
cttgtttcttaactgtggaatggaatgagaaggttgctgcgccttctcctccaccgccaccatgccggcaacgcctccctcctccgatctgatcctccaccgactcacctcctccgactgcgaaatcaagctcaaagccattcgtgaggtcaagaaccagatcatcggcaaccgcaccaagaagctctcctacatcaagctcggcgccgtccccgccctcgccgccgctctagcccaagctgacgccgattccgcctccggctccaccctcatcgtccagtccgccgccgcactcggcagctttgatgcggcgtcgacgccggtgtccgcgccgtcctcgacgccggagctttccctcatttaatcagactcctctctgccggctcgagcaatgttgtggatgccgctgcacgctctttacgaatgatttatcaatcaaatctagctccaaagtatgacttttttaaagaacaagacatgcaatttcttctttcactattaaaaagtgggaatgaaaatcttactggactaggtgcaagcattgttattcattcttgtgagaaaagagatgaacaaaatatgttatgctgtgctggtgctttagaaacacttattagccttcttgatggttctctaagccaacgagattctagtttagagtctcttgctgcaattcttaaaaacaatccagaagttgtctataaatttgtggaccttcaaaatggaagagttttgagttcggtaattgaattaaccaaggatagatattctcggactaggttattagcctgcttgtgcctgatttgtgtaaagaattcatcttcttgctatctgcaagacataggaatcaaagccaaattgatacatattttacttgagctccttgatg

SEQ ID NO: 128183 - DNA, 382 bp, Glycine max
  Clone ID: PAT_MRT3847_86754C.1
aaaacaagtacactccccattctgctagctatcatgtccacagaaatccatatatgtcaatagagattgtaaagtaataatcatatcacaatatcacatgttatttgctacggcctacgggaaagctcgagcgagcaaacttgcttggggagtaatgctaactgtttgttgaaaacgcccaagtaattcattacatttttacatcacttgacaaggagtttcggatcaatgtcttttgttttgggggaaagcacggatgcaaatcaacttggacactacttcaaaaatcaaaacgggaatgataataaccaaataaataaggggataaactttgcaaatgcagggtgttgcaaattgcatgaagcccaagaactggacttgg

SEQ ID NO: 128184 - DNA, 278 bp, Glycine max
  Clone ID: PAT_MRT3847_86755C.1
atttgaatcgagaattgatacccttgttcctcaaaattattactaattttcattttatatatattttttaatcatgttttgaggtacggttttgtctgttgcaacctgcaacccctttcttcttttagatgtctaatttttcgtgactaagttgactctgttattttggagctcatcatccttgttaccaaagaaatgtttttcctttataaaaaccgttcattttgcatttcatctaacactttggagtgttaacatgcaggatgaacatctgataa

SEQ ID NO: 128185 - DNA, 137 bp, Glycine max
  unsure (1)..(137): unsure at all n locations
  Clone ID: PAT_MRT3847_86756C.1
tcgagcntagtntcaattctcaagcaaacaaagtnggtgatgttgatnagagcggnaaacgtcgtcgtttgagagaaantggacttcgaaggtganaccctggncacattttcgaccaatnnctagattaaaaattg

SEQ ID NO: 128186 - DNA, 151 bp, Glycine max
  unsure (1)..(151): unsure at all n locations
  Clone ID: PAT_MRT3847_86757C.1
tagcataagncacganacatagatagagaggcnanggcnggccnncaaagancngcagngnccnncaggaggcagggnncancaggcnncgnnngggacganaggnncnnacaagaggaanngaacaaagncaaggaagaacacaacaaca

SEQ ID NO: 128187 - DNA, 359 bp, Glycine max
  Clone ID: PAT_MRT3847_86758C.1
agaaaatcacagttaaaaaataaagacacagcttccacgcagatcagtttccgttggctcgagcagagatgctacaaccaatcaatagtcatcatcttcagaaaaaaaaaccacctttttttttctaaaaggaaaaaaaattccgagctcaacgagctacccaaagcgattttgattcgcgggcttttcatttctgtataaatcttcaatcttcgaggaaaataacgctaccccatctgtttataatcatatggggcacaagtgaacgaaaaagaaactgtcgagaaaattgagggttgaagcttgtaagttgtaacgtgtcctagaatattattatgtctttgcttcgacggagaaaa

SEQ ID NO: 128188 - DNA, 223 bp, Glycine max
  Clone ID: PAT_MRT3847_86759C.1
accacaggatattgatgtcagccctaactctgtcttgataactctaaccgttctaattggagcttctgatgatgactccgaaatcaaaaatattgatgctgcttatggtgaaattgccaatgtgtttggttagcccaagaccgactcagactctgatgattacgatggagatggattcagaatgtcgattccatcgtagcgaaaccacactaaagatgtggat

SEQ ID NO: 128189 - DNA, 920 bp, Glycine max
  Clone ID: PAT_MRT3847_8675C.1
gccgaaaaagtagcgaagatggagagggagaagaagagacgtttggtattggttcatggagcctgccatggggcgtggtgttggtacaaggtggctgctttgttgaaatccaatggacaccaagtcacagctctagacatggctgcatcaggcatccatccaaagcaggtacacgacctcaattcaatttcagaatattttgagccattaatgtactttctagggtctttgccaacagaggagcgtgtaatccttgtgggtcacagctttggtggggcatgcatatctgtagctatggaaatgttccctaccaagattgctgctgcggtatttgttgccgcttggatgccttctcctgacctaagcttttccactctcctccaagagttccagtatagtcgtataatggaatctgatttgcactcaaagatcatgtttgatgagaacaccagcaatcatcgaaatggatcaaggatgttcgggcctcaattcttagcatccaaattataccaactatctccacccgaggacctgactctagcaatgtcactgctgagacccactcgcatttatggtgatgtagaactgttgcgtgagaatacaagactcacaaaagacaactatggaaccgtggccaaagcctatatagtgtgcgagcaagacaacgtgttaaggaaagattttcaactgtcaatgattgaacgaaaccctccaaacgaagtgaaagtgattgttggtgctgatcacatgcccatgttctccaaaccacaagagcttttctcttaccttcaagagattgcgaacacctattactagcaattgaatatatgcttgtcgattttattaattatgtgtgacgactataaagagtggaaatcaaaatttatcttcgttaacaaggaaataagtttttgtaaatt

SEQ ID NO: 128190 - DNA, 178 bp, Glycine max
  Clone ID: PAT_MRT3847_86760C.1
atcttcattaaacaaatcctccaacggggaaaaggtttgcttcaacaacctgcactcccctcatccctataaattaaccttccgaataagaccttatatacaaaactcctatcaaactcttactacatgaactatttatttaatatacactgagactgtttcaaaacagcacctgtaa

SEQ ID NO: 128191 - DNA, 206 bp, Glycine max
  Clone ID: PAT_MRT3847_86761C.1
atgcttaaagcctccatccaagctctccgacctcagcatctgcacaaaaataaacaaaaaataaataaaggagaaaaaaaaaacaatgacaaaagaagtgtgaattttctttctgattctccaattttctaagatcgatcgcacctttgattattggaaaaattgctccaatcggttgtagcagtcaaatgtctccttcagtttct

SEQ ID NO: 128192 - DNA, 144 bp, Glycine max
  unsure (1)..(144): unsure at all n locations
  Clone ID: PAT_MRT3847_86762C.1
gngaancnaaccaactanccacctatggcggcctctgtngtnntgtctacctctctgtntgtgtgtttcaactatggntatcatcgtcggccatccatttccgctctctcttgtcattcgaattcnatcannanaacaaaccta

SEQ ID NO: 128193 - DNA, 1667 bp, Glycine max
  Clone ID: PAT_MRT3847_86763C.1
atagtttagggcggtgttactccttctctcgttgattcggttctagagtcttttttcactcttcagttctcgttgttgttcttcgctttcctgaaactagggttttcaatttcgattcattcgttaataattaaagatgtttgggagggcaccgaagaagagcgataatacgaggtactacgaaatcctcggcgtctcgaagaacgcttcgcaggatgatctgaagaaggcttacaagaaagccgccatcaagaatcaccctgacaagggcggtgatcccgagaagtttaaagagctggcacaagcatatgaggttctgagtgaccctgagaagcgtgagatatatgatcagtatggtgaagatgcgcttaaggaaggaatgggtggtggcggtggccatgatccgtttgatatcttttcatctttctttggaggtggaagtagtcgaggtaggaggcagaggcgcggagaagatgtggttcaccctctcaaggtctctctggaggacctttatctcgggacttctaagaagctctccctctccagaaatgtcatatgctccaagtgcactggtaagggttctaagtctggtgcttcgatgaagtgtgctggttgtcaaggaactggtatgaaggtttctataagacatcttggcccgtccatgattcagcagatgcagcatgcttgcaatgaatgcaagggtactggagaaaccatcaacgacagagatcgctgcccacagtgcaagggagaaaaggttgtgcaggagaaaaaagtccttgaagttattgtggaaaagggaatgcagaacgggcagaagattacattccctggcgaagctgatgaagcgccagacacaattactggggatattgtctttgtccttcagcagaaggaacatcccaaattcaaaagaaaggctgaagatctttttgtagagcacattttgtcccttactgaagccttatgtggcttccaatttgtgctgactcacttggatggccgtcagcttcttattaaatcaaatcctggggaagttgtcaagcctgattcatacaaggctataaatgatgagggaatgcccatgtatcagaggtcattcatgaaggggaagctttacattcacttcactgtggagttcccagattccctaaaccctgaccaggttaaggccttggaagctgttctgccaccaaagccttcttcacaattgacagacatggagctggatgaatgtgaggaaacaacactccatgatgtcaacatggaggaggagactaggaggaagcaacaacaagctcaggaggcatatgatgaggatgatgacatgcctggtggtgcacagagggtacagtgtgcccagcagtaatgacttgtgtggaagctagaatcagaattgatgaaaatgatgatgatactgttgatgtttccgtaaccgtagtgtgtgtggactaaagataagtagtgtttgatcaaatgattgtgagaaagtgaacagtgtattgcttgctttcttatgattgtcgaagggataatttccgatctgacgtcctaaatagtagtactttactatatttgtttgttctttttaaactctacgatttggtttatcccattccgttgtttgtgtgcatcgcgtttgctactgagtgaaaaacttctcagaa

SEQ ID NO: 128194 - DNA, 825 bp, Glycine max
  Clone ID: PAT_MRT3847_86764C.1
gtaaatagtaaatataaataccaacgctggagtgatggtagtttagggcggtgttactccttctctcgttgattcggatctagagtcttttttcactcttcagttctcgttgttgttcttcgctttcctgaaactagggttttcaatttcgattcattcgttaataattaaagatgtttgggagggcaccgaagaagagcgataatacgaggtactacgaaatcctcggcgtctcgaagaacgcttcgcaggatgatctgaagaaggcttacaagaaagccgccatcaagaatcaccctgacaagggcggtgatcccgagaagtttaaagagctggcacaagcatatgaggttctgagtgaccctgagaagcgtgagatatatgatcagtatggtgaagatgcgcttaaggaaggaatgggtggtggcggtggccatgatccgtttgatatcttttcatctttctttggaggtgggagtccctttggatcaggtggaagtagtcgaggtaggaggcagaggcgcggagaagatgtggttcaccctctcaaggtctctctggaggacctttatctcgggacttctaagaagctctccctctccagaaatgtcatatgctccaagtgcactggtaagggttctaagtctggtgcttcgatgaagtgtgctggttgtcaaggaactggtatgaaggtttctataagacatcttggcccgtccatgattcagcagatgcagcatgcttgcaatgaatgcaagggtactggagaaaccatcaacgacagagatcgctgcccacagtgcaagggagaaaaggttgtgcagg

SEQ ID NO: 128195 - DNA, 2781 bp, Glycine max
  Clone ID: PAT_MRT3847_86765C.1
tgcaacaaattcaaactatttccaattacataaaaaaagtactctttactcattcggaggtgatgagcttaaaaatctaataattacatgtattggaattcttccagctagttacattattaaaagaaactatcaaatttcttgggagaatatacccctacagactatacagtttatatccctctttgtttttccctgaaagatcaatacatttaggtcaaaaaataaaagaccaatacatttttggggggaaatattcggatatttcccattttaagtcttagtcttacaacaagttttttcgaagttttcattcactagcaaacgatgcacacaagaaagggaaatgataaaaactgtgataaccaaaacggagatgattaaaaagaacaacgaaatatagtaaagtatttaggatgtcagaacggaagttaccccttcgacaataataaaaacgcaagtgatacactgttcactttctcacaatcatttcatcaaacactacttatctttaagccacacactacagttatggaacatcaacagtattatcatcatatcatcatcattttcatcaattctgaatctagcttccacacaaagtcattactgctgggcgcactgtaccctctgtgcaccaccaggcatgtcatcatcctcatcatatgcctcctgagcttgttgctgcttcctcctagtctcctcctccatgttgacatcatggagtgtagtttcctcacattcatccagctccatgtctgtcaattgtgaagaaggctttggtggcagaacagcctccaaggccttaacttgatcagggtttagagaatctggaaactccacagtgaagtgaatgtaaagtttccccttcatgaatggcctctgatacatgggcattccctcatcatttatagccttgtatgaatcaggcttcacaacttccccgggatttgatttaataagaagctgacggctatccaagtgagtcagcacaaattggaagccacacaaggcctcggtaagggacaaagtgtgctctacaaaaagatcttcagcctttcttttgaatttgggatgttccttctgctgaaggacaaagacgatatccccagtaattgtgtccggcgcttcatcagcttcgccagggaatgttatcttctgcccattctgcatccccttttctacaataacttcaaggactttcttctcctgcacaaccttctctcccttgcactgtgggcagcgatctctgtcattgatagtttctccagtacccttacattcattgcaggcatgctgcatctgctgaatcatggatgggccaagatgtcttatagaaaccttcataccagttccttgacaaccagcacacttcatcgaagcaccagacttagaacccttgccactgcacttggagcatataacatttctggagagggagagcttcttggaagttccaagataaaggtcctccaaagagaccttgagagggtgaaccacgtcttctccgcgcctctgcctcctacctcgactacttccacctgatccaaagggactcccaccgccaaagaaagatgaaaagatatcaaatggatcatggccaccgccaccacccattccttccttaagcgcatcttcaccatactgatcatatatctcacgcttctcagggtcactcagaacctcataagcttgcgccagctctttaaacttctcgggatcaccgcccttgtcggggtgattcttaatggcggctttcttgtaagccttcttcagatcatcctgcgaagcgttcttggagacgccgaggatttcgtagtacctcgtattatcgctcttcttcggtgccctcccaaacatcttattaaattaacgaaagaatcgaaattgaaaacaggaaagcgaagaacaacgaggagaaactgaagactctagatccgaacccacgcgtccgcggacgcgtgggcggacgcgtgggcggacgcgtgggcggatctagagtcttcagtttctcctcgttgttcttcgctttcctgttttcaatttcgattctttcgttaatttaataagatgtttgggagggcaccgaagaagagcgataatacgaggtactacgaaatcctcggcgtctccaagaacgcttcgcaggatgatctgaagaaggcttacaagaaagccgccattaagaatcaccccgacaagggcggtgatcccgagaagtttaaagagctggcgcaagcttatgaggttctgagtgaccctgagaagcgtgagatatatgatcagtatggtgaagatgcgcttaaggaaggaatgggtggtggcggtggccatgatccatttgatatcttttcatctttctttggcggtgggagtccctttggatcaggtggaagtagtcgaggtaggaggcagaggcgcggagaagacgtggttcaccctctcaaggtctctttggaggacctttatcttggaacttccaagaagctctccctctccagaaatgttatatgctccaagtgcagtggcaagggttctaagtctggtgcttcgatgaagtgtgctggttgtcaaggaactggtatgaaggtttctataagacatcttggcccatccatgattcagcaaatgcagcatgcctgcaatgaatgtaagggtactggagaaactatcaatgacagagatcgctgcccacagtgcaagggagagaatgttgtgcatgagaatgaagtccttgaggttattgtgagagaagggatgcagaatgggcataagatcaca

SEQ ID NO: 128196 - DNA, 1486 bp, Glycine max
  Clone ID: PAT_MRT3847_86766C.1
tacggctgcgagaagacgacagaaggggacggaattgtgaattatgtgaagtcacaaagtcaaaagcacagtttgacagtatcatgtcatgggcaactggtggtggaggttcaaaggaataacctttttgttgccacctttatttttatttaagcaccttggtttctccgtctttcttggagacacacacacgctctctcatgactctaaccaacttacccaccaactaataatctttttaattccaaaaaaccaaacaatgcctctttttctcacttcacaacttttatttctgtttgagttctccaatggcagctcctgcaccattctctctttcttctgatcccttcgcttccaaatctgccacatcaacgatctttggtcctgccgcgctgaaaaaagggaactttgagcaaacccatttcggaattttcacggctttaaggagaaatcaaggtttcactttaaaggcttcaatggggcctccgggatttacagagaaacttaataacaacaagctaaagactttagctgatgctgaagatgggtgtgatatatttaatgacctgaaagataggtttttaagttttaaaaagaataaatacctgaaaaatattgaacattttgaaaatcttgcaattcaaccaacaccaaagttcatggttattgcttgtgcagattctagagtatgcccttctaatgttttgggatttcaaccaggagaagcattcatgattcgcaatgttgctaatttggttcctacctttgagagtggacccacagaaacgaatgcggctcttgaatttgcggtgaactcccttctggttgagaacatcttagtcattggccacagctgctgtggtggtatacgtgccctgatgggtatgcaagatgatgatgttgaaaaaagttttataaaaagttgggtcattgctgggaagaatgcaagaaaaaaagccaaggctgctgcttctaacctcagctttgatgagcagtgcaagcattgtgagaaggaatcaattaaccattccttgttaaatctacttacttacccctggatagaagaaaaggtggcaaatggagaactctctattcatggtggttactacgactttaccgattgttcatttgagaagtggacattggattaccggggaaccaaattggaggaaaatggcaaaattgctgccaaaaacaaaatattttggtgttgaagtttgtacttatattttcctgtgttcatcgtgttgtttttttcaaaaattcgtaggactttaaaagcataggctgagttatgtatttttgtagaatctataagatgtttaaatcgatcgagttgaataaccccctatcatttcaggtgtatgttgtattattgctttgtgaaaaaacgttaaggctacgggcttgattatatactgctgatgctagcagataggatttcccccctccttttttggtggaaatggaactatctatgtctttt

SEQ ID NO: 128197 - DNA, 408 bp, Glycine max
  Clone ID: PAT_MRT3847_86767C.1
ctttgacagcctcttgacagctatttctcctacatcgtccaggatacccttataaactgatccaaaaccaccttcccctagtttgttgtcaggtgaaaagttattggttgcacaagtaattgtagaccactcaaacatgggtaactctagatcatccttctcgtgctcatatattacacttgcatccctttctagtttgtctttcatctttcctgcactgaccgagagcttacatcttgatcacggatagaggtgatattgttagcatctgagattttccaactgtcatattaaataccccttcaacttttctaattactttttaagcatggttaaaaactacttttgtttaacagctagttgtggggtaatcatgcctacttttagttagtcataattttctttttg

SEQ ID NO: 128198 - DNA, 510 bp, Glycine max
  unsure (1)..(510): unsure at all n locations
  Clone ID: PAT_MRT3847_86768C.1
agcatatgaatatgttatttctttatggtgtttgggttgaaattgtctcctctcccanaaaaggagggaaccaactattcacgggttattggggggggaaaaaaacccaaccgaccctcagggtggggatttgttcccccaaaaccaaacccaatattttttggggtggaggctcttgggtgtaaaattctttaaactaaaaattgttcattctaaacacatttccctcttgtggaaataaaatgaattgttttatgcgcgagaccaatgtgtaataattacacattgttcccccatctcacttaattaatggaaatatgtgacagcgacaacttggacaatcttaaaatatagaaccataccctccatgtgcctccacctatgtaaaataaagatttgcccccgcaaaaaaaaaacacaccctcatagtgaggggggtatcttctaccccccccacaaaaacctacgatatttatgtttgcgtccattaagggggaaaggagacaattt

SEQ ID NO: 128199 - DNA, 118 bp, Glycine max
  Clone ID: PAT_MRT3847_86769C.1
cttctgctacaagacgactacagaataccggggcgggtagactacaacaggagtataccactatcataatcctacataactagtctaatcacaaatagtctcttaattcattccatct

SEQ ID NO: 128200 - DNA, 1746 bp, Glycine max
  Clone ID: PAT_MRT3847_8676C.1
ggaaaagtaatggtaaaagaaaagggaaagtttataactttttaagagtttcttaacttgagaaaagcaaactcataaataagtaaataaaattcattagacagaacaatcaaactcaccctgatcctatcagaccttatcacagtcctcacggtagacacatggacacatatatggcctttcgcggtttccagaaaatcaataatagccattagcaaccatcccatcaaaaaagataaaacattattttctgaagataaaaaagaagtatgtacgtattaataatttcatgtaataattaattattgtgtataaaaagtttataaacttttatttaataatcttaaaagagatatcaatcataatatatgtgactttgtgcggataagtatgtgaaattgattgaaaggtgtcacatgatgatagatggattaacacagtgtttgtatgtggcccacgcgtccgggctcttggtttgtttgtctgtcacgagactcatacattgtgctgccaattatagtaactctctatttctctttccatctctcaagttctgaagaagaaacatgtgtggaggtgctatcatctcagacttcattggtgtgaagcgtggccgcaacctcgccgcgcaggaactatggtctgagcttgaccctttctctgacttccttggcttcgataccaccaattccaaaaaccaaccacccctgcagaaaattccagacaaaaaagtggtgtcatcatgtgagaagaagaagaaaagcgtggtgggtgcagaaaagaagaagagtgatagtgggcgagctcgtaaaaacgtgtacagaggaatcaggcaaaggccatggggcaagtgggccgcggagataagggacccacacaagggtgttcgtgtctggctcggcaccttccccaccgccgaagaagccgcccaagcctacgacgacgccgccatacgcatccgcggcgacaaggccaagctcaacttcccggccaccaccatttccgccgccgccgctccgccaccttccaaaaagcaacgctgcctcagccctgacaccatcactgaacaaagcagcagcagcagctcacaatccaccactggatccaccggcgaacgcagccggaggaaagacgaactcgacctgaaacaaattgaaaggtttctaggtttggagaaagagctaccgaacacaacaacattggtgctgagtgggacaacatggatgacctgtggatgctggacgacgtcgttgtgcccaaccgtcacttaatttactagaagtttaacggtttctagggttggacaacatgggtgctgagtgggacaacatggatgacctgtggatgctggcgacgtcgttgtgcccaaccgtacttatttactagagggagataattaattaattaataaatggcgttttcttaagttatagttttataaaactatgttgaaaactatgttggtgtatgtgttcttagttttctgttttgtcttgtcctctcgctttggtaatttctgttttgtacggtcgaattatttcaaaattaggtgcaacgtatcatgagagggatgattatatgttatcattatgattataaataaaggccaattagggtgtgttagcgtttgggtcgtgcatgtttatatgtagtttatgcgttgtatataatatatttggcatgacattatttggttctacttgttaagcaaatattatatagtatggttctacttgtcgtttttgc

SEQ ID NO: 128201 - DNA, 1890 bp, Glycine max
  Clone ID: PAT_MRT3847_86770C.1
tccacacctcatcggaatattcctttcttttcggtttcaatctctggatccgtcgtgacagacggcatggccactttcaatggcttcgtcgacggcactccctcggaatctgcattgatctttctcggcaccggttgttcgagcatggttcccaacctcatgtgcctccttcagccttccgaccctccctgccccgtctgcgtccagtcattgtccatccctcccgaacgaaaccctaattacaggtgcaatacgtctctcctaattgactacggcgccgccgccgccaacggtggcgatcgcaagtatatattgatcgatgtcggcaagacgttcagggagaccgtgcttaggtggttcgttgcccatcggattcccagaattgattctattattttaactcatgaacatgccgatgcagtccttggattggatgatatacgtgctgtgcaggcttttagtccaacaaatgatattgatcccacacccatatacttgagtcagcattcaatggatagcatagcagagaagtttccttatttggttcagaaaaagagtttggaatgcgcagaaatacgaagggtggctcaaattgactggaacattattgcggatgactgcaataaacattttcttgcgtcgggattaaaattcactcctttaccagttatgcatggagaggattacatctgtttgggctatctttttggtgataaaaacaggattaattccatgagaaatatttcgtgggaaaatcgctttattttttgtattgttaaaaaatgttttttccgagtgttgcatctttttgtgttggattctttatatgggactgggtcacacaatgttcacctttgttttccacagactctagaaactgtgaagaggttgtgtccaaagcaaacactactaattggcatgactcacgagtttgatcaccataaagacaatgagtttttgatggagtggtccagaagggaaggaattccggtgaagcttgctcatgatggtttgagagtccccataaacttatagtaagggaaggttaaagcatgtgacaatgtataccgcatactgttgatcttaattagattggattggagcattaatattctttacagaatatcctcaatttctgctgtagtaaaaagccacatttttgctagaggtcgcatttctggatatgagaagaggataacttactttgatggaaatcccaattcttcttattgaactcgtgaaagcttgtattagaataattttataatcgactccttgatgccggaaaacaaattgagtgggcaatgagttttaagagctaaaaaaatccacatcttaaatttcttctgcaatcactgtgcgttactctacgatgaaactaatctgctggctacaaagttgtattattcaattgtatggtaattgttataaataacaattggtcaacttgacattgagttttactcaaattctttcataaaatgaaaaaatttgaaatgctcttcaactttcaatcgaccattgttgtcagggaatacaaaggcaaaggacaaagagaatgggaccacgaacctggaaatgcacaaatcctgaattgtgagaggtgtaggcacgagagtgtggaacgatgtcggggtgtgggcacggtggtgtgggctcacaacggtggcgcgacaacgtcagtggcatgatgggagcgagcgacaacgtcgtgggaggaagaaatgatataagattgaaaagtgagtgagagacaattagggttggggtcgttatgtttgggaaaatttttaaattccaacggatgcatattccattgaaataattcgctagaaaggtatcaaattttcgacggatctatatccatgggtaaccttttgttgataatta

SEQ ID NO: 128202 - DNA, 974 bp, Glycine max
  Clone ID: PAT_MRT3847_86771C.1
aatactgcacgttttagacagaaaaaaaatataaaaaagaaaaaagaaacactagggggggggtcatttttaaaccggtagataaaatagttataaaatcaacgattcaaattttctttctttctattttcttcttttccaatttcccctaatactcttcactctcaccccacaccctcccttcttcgcctcttccttcggtccactccgccgcctcctaacccaaccacgacggcggattcctctcgaacaaaaactgagcgcaaaaactcttattcgaattcgtgtgcatcgtcacgtgccattcatctctctaaaaccctgctcaagtgcgtgcgacagctgcaaccgcaacacttgtaatctcttccaattcaagaagatttctcagctctctgtgcctatgctacaatgtatgtttgaacactgaagttcagaaacaataactgcttcttcttcttatgctaattgtttgagctgcatataccaattccataaccatgttaatggtgagaagaaccccttcgtattctttagtaaccttttatgtccgccgaagcattgcccaatttcgaaacctcacctcagagaccaaaaatggggatcatgaacatcccaccaaagccctagatgctaaagactgcaactttgtctatgaaatttgtaggattacccgaacaaagccccgttgggaggacacccttctttcccagtacccatctttcaactttaaagacccctctttcttcctcctttatctcaagcaccagaacaatgccttcctttcccttcgtttctttcactggctgtgctcttcttgtggtttctcccccgaccagtcttcttgtaacgtgcttttccaagtgcttgtggatgctggggccggcaaactagcaaaatccttgcttgatagcccgggtttcactcctgagcctgcttccttgggaggttacattcagtgtctcaacggtgct

SEQ ID NO: 128203 - DNA, 646 bp, Glycine max
  unsure (1)..(646): unsure at all n locations
  Clone ID: PAT_MRT3847_86772C.1
gagcaaatgttaagttgaccaattatttataacaattaccatacaattgaataatacaactttgtagccagcagattagtttcatcgtagagtaactcggtgactgcaaaagaaatttaagttgtgaattttttgagctcttaaaactcattgctactcaatttgttttccggcatcaaggagtcgactataaaattattctaatacaagctttcacaagttcaatcagaagaatcgggatttccatcaaaataatgtggctttttactactgcagaaatgcaacctctagcaaaaatgtggctttttactactgcagaagtcgaggatattttgtaaagaatattaatgctccaacccaatctaattaagatcaacagtatgcggtatacattgtcacatgctttaacctgcaataacatgatagcacagttagatttaagtatatatttattgttattttcggagacaaaatacataatcggttatatcaactgcatccaatcaaacgattatagattgctttaacctgcaataacatgaagtatatttcctttccttactataagtttatggggactctcanaccatcatgagcaagctccaccggaattccttcccttttggaccactccatcaaaaactca

SEQ ID NO: 128204 - DNA, 1292 bp, Glycine max
  Clone ID: PAT_MRT3847_86773C.1
gcaccacacagcaacccatcggaatattccctttcttcgttttgaatcactggacggcatggccacttccaatggcttcgtcgacggcacttctccggaatccgcattgatctttctcggcagcggttgttcgagcatggttcccaacgtcatgtgcctccttcagccttctgaccctccctgccccgtctgcgtccagtcattgtctatccctcccgaacgaaaccctaattacaggtcctcttttctcttctttcatttcttttctctttcaagaaatttcctcaagatctcgatttgcaggtgcaatacgtctctcttaattgattactgcggcgacgccaacgctggtgatcgtaagtatatattgatcgacgtcggcaagaccttcagggagaccgtgcttaggtggttcgttgcccatcggattcccagagttgattctgtgagttcacttttcttaatttagagatacttcccttcccttccctactgtgcaaaagctagtgattgatgttttggcacaatgtatggcatcaacgtgtttcctttcagtgtggtgaagggagaagggaagggggagaggtcccgaattcaaatccccctactaacaaaaactaacaatattaacgactaacacactaaactaacaatgtgtgtagtgaatctgaaaatctttattgtatcatggttccttggcctggcctctctaacaaacaagtgtgggtcttgttgtgctagttattgtctacctgttgtaatttaaacaagctttcgtcgcatcgtaactgaagcaaagcagagtggatgagatttctttcttgtatctgattttccgaactatccatgatcctatttttaatgaaattttatcatgtgaatgagaacatttgtttagtggtgctcaacttccaagtatgtatttgaatacatgtttggcttttgggctatagacaatgtcctttcttgaatggtgtcatggatgctttgaacagtgttctctgtttctgtttttctaaaagaactgatttaaaaaagatgaccaacctaggaatatcatgacatactagtctgagtactgggatctctgtttcctttagcttcctctttctggcatgtgtcttccataatcaatttgaatggtgaaaatggagattataaattatgcccctgaaataaaactaatattacttttacttctgcttctgcttcactgtcttattaggagactcacagtctgtcagatgaatgcagaaagttaaaagatcaaggattatcactatccgagataa

SEQ ID NO: 128205 - DNA, 223 bp, Glycine max
  Clone ID: PAT_MRT3847_86774C.1
ctgacgcgcgggccgacgcgctgggatcatttaagcacatacggctagaagaacggccagctcatgggaataggagacagtgtccggccaccacccggcgaactgggcggcggaaaagtgcactgtctatcaaactccgaagtcaattgagccaatgcaacaaggaaaaggggacctacggagaccctacccgtgagacgactaccactgccaaagacaaacg

SEQ ID NO: 128206 - DNA, 559 bp, Glycine max
  Clone ID: PAT_MRT3847_86775C.1
tttgtttttggggtctttttgttttttttaggccccactaaaaatttacttgatttctttaacatacacaatagggagaacatgacaacaagtacccttcactaataacatctaaaaagtatccccctatttgaaagaaggaccttgttatttatctttactgataacttcacctttggacatcatcgcatgaaaaaccataaagagggttatctaagtatataatatgggggaacccatactaacgattactacaaaagggcgcggaacttgagaacgaaaagtttatattcatatatgaacagctggaaagttaatctttgaacacattggggtcttggaaaaagctgatgtctgaatataagcatataatactgggactggttttccccttcccccttgtccttacccgtaacaatgaagaatttacccagaaggggaaggcttggtattaaaaagacacaggagtttattatttttagaacttgggttgacaaggggtaaaacaactttactagggttaccaaccttaaaattgtagcacaccactggttactgc

SEQ ID NO: 128207 - DNA, 515 bp, Glycine max
  Clone ID: PAT_MRT3847_86776C.1
ggcaaaaaaattaaaaaaggggggggcaaccaagggtggaaagccccaaaaaatgggccaaggaattggcctatcccccaaagggggggtttgggaacattcagggggccccaaactggggggtttcatttagcccaggaaaaaaaaaaaggcccaagcaaaattacaatttcggaaaaaaaagtccctttaggaaaaaagggccaaaaaaaaaagattttcggactaagaagctaaaggcccgaaaaaagcttgggggaaggggggcggggggccaaggaaaaaacccttgggtataccatttgcaacccaaggggggggacccccaaaaaaaagaacacgggcccaacttaaaaacggggaaggggtttaaaaaaaaaaaccaaaaacggccttcccgttaaaagcccctaaatccccccccaaagggggggggcattcacaggaaccccccaacaaatttttgtgggacccacaaaacctcctttttggggaaaacaaaaaaggggaaactt

SEQ ID NO: 128208 - DNA, 329 bp, Glycine max
  unsure (1)..(329): unsure at all n locations
  Clone ID: PAT_MRT3847_86777C.1
attcccgnnggtcgacnccanncgcgtccgacgcacacgcttcgtctttgaaattaagacgaatgtactaaaaagatataagggatggtacataagacaataaaataaaatttcgtgtgagcaaaccctgccttagaaaccggaactttagcatctactatacgatgtgatgaactcttatattaaagaactatattatgtgcacaaacattgctaaaaggatatcctgcttgctgtgatgataaaatccaacaacgtgggcttaattaactatgtggagcttaactgctggatggacgaaaaactatatatacacctgctgggctgat

SEQ ID NO: 128209 - DNA, 1700 bp, Glycine max
  Clone ID: PAT_MRT3847_86778C.1
ctttctcttgccactgtctgttaacttgagcaatcactctgttccttccttctctcgttcgttcatggaacttcagaggcgccaagatcagagcctctcccagcggaagggccagaaacggaagctcgacgaggagcagcaccacgaggaccgccagatcttgccggcgccgcccaccgccgatgagcgcgccgcactcctatccgacgtcgccgaacaggtgagcatcctcgagtcgactttcacgtggaacgaagcggacagatccgcggccaagcgcgccactcacgcgctcgccgatctcgcgaagaatgaggatgtggtgaacgtgattgttgaaggaggcgcgattccggcgttggtgaagcatcttcaagcgccgcctctcagtgaccttgtccagcatccgttgccgtttgagcacgaggttgagaaagggagcgctttcgcactaggacttcttgccgtcaagcctgaacatcagcagctgattgttgacagtagtgctttaactcatcttgttgatcttttgaagaggcacaggaatggcttaacttctcgtgctattaatagtctcattcgtagggcagcagatgctattactaatcttgctcatgagaacagcaacattaaaacccgtgtcaggatggaaggtggaattccaccacttgctcatttgcttgattttgctgatgcaaaggtgcaaagagcagctgctggtgctctgcgaaccctggcttttaaaaatgatgaaaataaaaatcagattggtgaatgcaatgctcttacaactttgattctaatgctacgttctgaagatgctggtgttcattatgaagcggtcggtgtgattggtaatttagtccactcttcccctaatataaagaaagaagttcttctcgctggagctttacaaccagttattggattacttagttcctgctgctctgaaagccagagagaagcagcattgttacttggacaatttgcagcaactgattcagactgcaaggttcacattgtacagagaggtgctgtccaacctttgatagagatgcttcagtctcctgatgtacagctaggggaaatgtctgcttttgcattgggaagattggcccaggacccacataaccaggctggtattgcacacaatggtggcttagtgccgttgctcaagcttcttgactcaaaaaatgggtctttgcaacataatgctgcttttgctctatatggccttgcagataatgaggataatgcgtgcgtccgcccacgcgtccgtggagttcagagactgcaggatggagaatttattgttcaagcaactaaagattgtgttgccaaaacattgaaaagattagaggagaagattcatggccgtgtgctgaaccatttgttatatctcatgcgagtttcagaaaagggttgtcaaagacgagttgctttggctcttgcacatctttgctcttcagatgatcagagaataatttttattgatcactatggtcttgagttgcttattgggcttcttggctcatctagctctaagcagcaacttgatggtgctgtggctttatgcaagttggcggataaagcctcgaccttgtctcctgtggatgctgctcctccttctccaacaccacaggtttatttaggagagcagtacgtaaacaatgctacgttgtctgacgttacttttttgg

SEQ ID NO: 128210 - DNA, 437 bp, Glycine max
  unsure (1)..(437): unsure at all n locations
  Clone ID: PAT_MRT3847_86779C.1
tgaattttggctgtgataattggaagctttgttttgttgtgctggatttgctacgtggtagtgggatcgattgtatggagaaggaagattggatgtttcaaagatgtgttctgttgccatgaagacgtggaagttgagacggaagtgtcctattgggttgagtcacaaatatttganaaaggaaaaatgtatgtacaaccattgaaagcaatcttcattcaaagaattcctggacccttttttatgtcagtttagatacatccacccaaataaacagacagaagaaagcttatagcttaatagttttacatagtattggttatgaaactattaaacatttaaaacagtcacttatttgctttgcacatttggcaaatgagagtacaaatagtaaaatccttgtgtttctgttggcccaaaatgtaccaagtttttag

SEQ ID NO: 128211 - DNA, 517 bp, Glycine max
  Clone ID: PAT_MRT3847_8677C.1
aagctcatcttcccggtcactgataggccacctgccaaaaagcgcgtgtgcttcagccttgacgccaccgctgaacaaagcagcagctctcaatcccccactggatccgccggatcgcggccttccaccgccttctacggcggagtagatgaactcgacctgaaacaacttgatcggtttttagggttggacatcatgggtgatgagtgggacaacatggatgacctgtggatgctgaacgacgtcgttgtgcccatccgtcacttaatttactagaagggagataattaattaattaataaatggcgttttcttaagttatagttttataaaactatgttggtgtatgtgttcttagttttctgttttgtcttgtcctctcgctttggtaatttctgttttgtacggtcgaattatttcaaaattaggtgcaacgtatcatgagagggatgattatatgttatcattatgattataaataaaggccaattagggtgtgttagcgtttgggtcgtgc

SEQ ID NO: 128212 - DNA, 243 bp, Glycine max
  Clone ID: PAT_MRT3847_86780C.1
tctggcccccggggcaaactcggactgtccaaggcgaagcccttcgcgtaacaccaaagtttcgaccggcggatcagacgatcgaaatgtgcctggcggagatctccgggtgcagccggagccgggctggccgtcgaggggctggccgctggagcctggggggcgggcgggggagggtttccatcgacttcagcaagctggccgggcaggaacggccgaggcgccgtcccgggacccgcgggc

SEQ ID NO: 128213 - DNA, 283 bp, Glycine max
  Clone ID: PAT_MRT3847_86781C.1
cgacgaccctatactccccatctccgcctaggaggaggggagccctttcgttctttgcctccccgagttcaagttctgaatctcaatcacgaaggcatttggcattgcatttgcgatgactatctttagtgagtttgatgttcctgtgtcctggcctatactcctctggtactgggcggtcctattctcactgacaatgaagagacagatatttaatatgatcaaatacaaacatttaccgtttgcatctcgaaaacagggctatgatggtaagagagcacca

SEQ ID NO: 128214 - DNA, 599 bp, Glycine max
  unsure (1)..(599): unsure at all n locations
  Clone ID: PAT_MRT3847_86782C.1
ttgccgtgctacactgttgtagtaccaccttcttgggggggggggggggggaaaccaaccaaggtaggtttgcggaggcaaaactaaatggcctgaagagagacttggatagtacaagaaacaaaatgcaaaaagaaaatgctgtatctagatagcatttatgagggttgaagaagcgctgacatagaggtaaaaatagaatgctgttgaaaaagagccaattagaactgtatgaataaagttgtttggaaatgcaagctgagagctaaggacgggagagtacatgtgcaatataggttgacgcattgctcgactgggaacaaacgagtaactggcacgccgggccgtagaagagtacttatggcggtggcgcgtttataagctagtagtggcagacggttccttgggcgaacagtgtcaaccaaagcgaagtccatcgtaagagcgggataatcattagctagtatgccaggtggtcaaactggaagactacaatgatgagtataatcaaggatacgactggccgtggctaggggctataagcggtttaatatttggggtaattagagcctgncgatactatagcagctgctattgag

SEQ ID NO: 128215 - DNA, 325 bp, Glycine max
  Clone ID: PAT_MRT3847_86783C.1
aaggattcctgagtccgagcatgacgcagccagccattccgcaaggtctgagcagattcctctatctcaaacatcaccggactggacttcagcacaggagaggagctcgcatgactgacagtgggattaggcctagaatgctggtacccatcgactgagactcatgccatggctgagtggattcataagatcaggcatctagcattgcaagctccatatgctgatattgaagatagttctgaggcaccttactgggctaagatccccgacggacacttcagcaactgaatattgcagcctccagcagtctgcatgaagagagcat

SEQ ID NO: 128216 - DNA, 807 bp, Glycine max
  unsure (1)..(807): unsure at all n locations
  Clone ID: PAT_MRT3847_86784C.1
ttgttttttttttttaagacaaactcaattaagatgagctttatatataaaccaaaccaaaactcactgtactttgaggctacacaaagcaaggattgtaggaagcatgtggtataatcttgttatgtccataaatttggtaaagaaataagcaaaaatggtgaggtaaggttgagttatagactatcttcctactcaaaatctcacatcatcttgattcgtttgcagcttgaagtagaattgcgtatccctctagttgtcacagaatatggagctgatgctgatttcagagaaggggacttgtcgataaatgcgtgtcgttcgttgccattccaaaacaagattatcctatttgtgcatgaatgcgaccaactatctcctagtgcaagggtcaattgaaatgaaccttcaatatgcttggttgttacttgattgaacataacaacagccaaacggaatttttttgcaagcttcatcaacttcaaagccatttcactgagtaatcgagtcctgagagccatatcatcaaagtcttggcggaagtggaaagtaacactgtcaacaatgaggatctttacatctttattctctgtgatgaatttgtccaagtaatttatcaaagcaatttgctcagtgtagctgcaaacacgaaaatagaatatattttctaagatattattagggnncattttaacatcacaagcttgaaaatccttatgaaagtnctggctgtattctnnnntatcttctatgcatgctncagcaatttnnnnnanacgnncaaccataaagcttccttnnnnngcg

SEQ ID NO: 128217 - DNA, 187 bp, Glycine max
  Clone ID: PAT_MRT3847_86785C.1
cactctacccctcgtgcttcttctcctattaaaagagcctccgcttttggtctaggcctctacgaattcacgactgggaccattttgtttcgactacagaaacatgcctatctagagtagcaaggtggatagtcctaacgtggactgcacacagtctgagtaacattccttgtactactatgaaacc

SEQ ID NO: 128218 - DNA, 396 bp, Glycine max
  Clone ID: PAT_MRT3847_86786C.1
gggcaaaacacgccaactattttaaacaaaaactggagtaattacaaatattcatgtgaactacaacacaacaaaataaatacaatgatcaatgggccctgcggggtctttgacgagccctgaccgtcccatcaggagtggggccccctctcgcgatcgggaagcagtcctgcataatggcatataactctgtgcctgcggggactatcctaagggtgagcacacgctccaacctttgggcaatcgcctcatatccgtcggaatcatccacatatgggaggggggggaaatggcggtagaacctgggggctgggcgggtgtatgtagtcctcaagggtctggagcggggtgctccctgtggtgggcaagtgcctgggggcggggcgcatgaaaggg

SEQ ID NO: 128219 - DNA, 403 bp, Glycine max
  Clone ID: PAT_MRT3847_86787C.1
caaggaaccaccatggcccttatttgggaagggaaaattggccccaaatttttaattaatggaagttcctttcccttccctccttttggacctttaactataataccagggagccctcaccctcctaatatttaaccccaaaaaaaaaaaaaacagaagggggggattcacccctaatccttgtttcaagggccacccaatcaaataaaacctggttaatacccaatgccacccatgccaccagccatagttggagtatctttatcatcgttgggaagttaaaacccaccaccttcagttgtggccataaaagataatccactggttgaataaaccaaggctgtcctaatcaccttaaaagggtctatgattccacctttacccatatcaccatattcacctt

SEQ ID NO: 128220 - DNA, 268 bp, Glycine max
  Clone ID: PAT_MRT3847_86788C.1
ataaaaacaagtgccaacgaaaccgccgatttattgtacctttgggttagaaccaacacaaaagggggaagcgcttattatgtttcaaccccttcaaaatgtgtaccactttttccgatccaaaatgttatatggccacccactagagcgtgtaactccttcacaaagactaggctagagaagtaattaaacttcattgtattgtgagctctactgagtgcaacccttacgcttttgggctccataccctgaaaacattggcccttgt

SEQ ID NO: 128221 - DNA, 334 bp, Glycine max
  Clone ID: PAT_MRT3847_86789C.1
gaagagctggaactaagtctcggcctttcgatgaatgggacatctgcggtggaggctacttcgaagaagatggggagaacaacctacgtaccggagtttgtgcgcgacgaggagatgggatatgctgctgctatggggagcacggcgtctctcgagaggacctgttctctttcgactgacactgatgaggtgtggcggaagaggaaggagttgccgactctaccgtgggtggaggcacggacgaagctctgctagaagcatcagagcatgaaagccttgataaccaaccacaaacggccgataggagctatcccttggagccaggggcttgggg

SEQ ID NO: 128222 - DNA, 471 bp, Glycine max
  Clone ID: PAT_MRT3847_8678C.1
gcgatctgtttcacattcctggtaattgagctatccagtatgggagtgtaggtgctaacaatgcgctgtggaatgtggcattgctgagtgggcagatcaaacttaatggcacgttgagcttatctgtattgacactcccaatcagactacagtgtttgacattcaccttgggaatattcccatgatacatgaaacttgctgggaatactatgatgccagctgtgtactgcacacaggctactgccaaatctgcatgaaaatgcggaatcctctattgatctgtaatttgatgaattttacgtgtgcacagctggataatgcaatacacgaaatcaagcatgacccttttgtaacgtgtgctcagtctatgtgaaaaagaacacacgtctattgattgacatagtgatgtgtgaagaggcagctgttttaaggagtgattgggcctcattggtacaagagtttttaacaaac

SEQ ID NO: 128223 - DNA, 720 bp, Glycine max
  unsure (1)..(720): unsure at all n locations
  Clone ID: PAT_MRT3847_86790C.1
tcgagtatacggctgcgagaagacgacagaagggctccacgtaggatataaggctctcaacagtcccacaatgcctgaaacgtgagggcatgacattgatgtgcctgaaactgagttaaatggaatcctgcgtttgtcgaacacttgattggttggtccttgggcttcagtataggccgctgtaactgacacccctggtgcagtgatatcaggctgaatatattggacaaattaagattgttagatatctaacacattacaacaagtttcaagccaaattacacttagtgagtaatgtcacctttaggatctcgggcacgatagtatttggtccttttgatgaaaaggctgccataaacggggctggcttagtatccaactgagtctttggatgtgtaatatatgccactgggaacctagcaatatataaatttcaagtagtcaagttgaaaaactgaaattgatgattatcctttcgggatctttatatagctcaaaagataacaatcacaaaaaactagaattgcttcctctacttatttgaccataaattgtaagtataataacaatagtatagtgcaaaccccaaagtaggcataacttaaggcatagcatgaattggtattaataagtggccgactagactggtaaatatcttacttgnntgagttgatgtaagtaaagacagcactgccatcagtaaaattgatatgagaagca

SEQ ID NO: 128224 - DNA, 236 bp, Glycine max
  Clone ID: PAT_MRT3847_86791C.1
caataaaaattcctttttttttcatagacaagggattagttttaaactttgaaatacaaaaaaagaagttccatcccatactttatctcaccccatggccccacgagcaaatgaccagtttattaaagttagaagagttgccaaattagttttagatattcagagggcacatactttaattaagtttaaaaccttgaccatgatgtcggatgtaatcatttatcggacccgtgggc

SEQ ID NO: 128225 - DNA, 370 bp, Glycine max
  Clone ID: PAT_MRT3847_86792C.1
gtaagacttaatgttttatgtgagaattatctgacttattaaaaattaataaatagttaattaataattatgggtaaaatggtaaatgagatatgtgtataattgaaacagtttttagagataattataatttgaaggaaataatgatttttaagagattaatacttactaagtcgaaacaaaattttctttttgaaataagatataagagtattctttcaatcctagctgtcaccatcatgcaagataaagaataaaagagtcaagagagataaatcttgttttcttcctctctcaagaaaaccaaagcgcgataaagattatgtgaaagtttccttgtgaaaagaggtacatactcttcaattaattg

SEQ ID NO: 128226 - DNA, 1964 bp, Glycine max
  Clone ID: PAT_MRT3847_86793C.1
ctattcggctcgagagccattgagaggatatgttcttgtggcccgtgaaactagtttcgatgcctccgtgttagaatctcctgctctggaaaagccacttaactactcgttaatatggagcctggattcacatgatgagtgtgtttacttttggttgccaaaccctccaacaggttataaagccatgggcatagtagttactagcagtcctaaggaacctgaagttgaagaagttagatgcgtgcgagatgatctcacagaaacttgtgagacttctgatctgttactgactgtaaagtcaaaatatgcaaaagattcatttcaggtttggaacacacaaccctgtgatagaggtatgttagctagaggtgtagatgttgggacattcttctgtggcagtacctattttgattctgagcaagtggtggatatcatgtgcttgaagaatcttgattctctacttgcatgcgaatgccaaagaagaaccagattcatgcacttattcagcattatggtcccactgtatacttccatcctgatgagaagtacttgccatcatcagtgcaatggttttttaagaatggagcagttttgcatgcagcaggcaataagaaaggtatagctatagattatcagggctcaaatttacctagtggaggaacaaatgatggtgcattttggattgatttgcctactgatggagatgcaagaaacaatctaaagaagggaaacatagagagtgctgaactctatgttcatgtgaaacctgcattgggaggagcctttactgatattgtgatgtgggttttttgccccttcaatggacctgccacccttaaagtggcattgatgaacattgagatgagcaagataggagaacacgtaggtgattgggagcactttacccttcgtataagcaacttcaccggagagctatggtctgtttacttctctcagcatagtggaggcggatggatacatgcatttgatctggagtttaataaggggaataagccaattgtttattcatcaaaagatggccatgctagcttccctcatcccgggacgtaccttcagggatcatccaaactaggaattggagtacgcaatgatgcagctcaaagcaaatttattgtggattcgagtgtcaaatatcagattgttgcggccgagtatcttggtgaaggagtcattacagaaccatgttggttgcagtatatgagagagtggggtcctaccgttgtatatgattcacggtctgagatagagaagataataaatctgcttccactatttgttagattttctgtggagaacttatttgaactatttccaactgagctttatggtgaggaggggccaactggtccaaaggagaaggataactggctaggagatgaatattgctagttctgcttcctctctcgttttagcgggaaaggaatgcaaactgattaaggtaatatctttatgtcctggtattagtatgtgttatgtatgtcattgtgggagaggtgaaatggagcaagacatcaacatcatcatcatcaatcaattgtaaagggggtgtaccttacatagtagcaacttatgtcattcttggtgacctgaagaactatagttctctgatgtttgagttgcttaaaacaatatacatagctacacaaaaattgtgagtagaatgatagcaatatacattctaatacactctttgttattagctgagaattatttagactcacaaatgatgtggggctcacttcctattggatgagtttctcttattattttgtgattcttaataaattttaatcaattacaaaaagtgcattagaaagaatgtgttcctagcttaaactataaacttgtatgagctagagttctcggttgtatacacatttctgatctctttgtatgataatcttgttgccagtgtttagtgggaaatatgaattttttttgct

SEQ ID NO: 128227 - DNA, 309 bp, Glycine max
  unsure (1)..(309): unsure at all n locations
  Clone ID: PAT_MRT3847_86794C.1
nctcgcgaccggagccancngggaggaaggttgaagacgctctgctgccagcgcgcgacncacccncgnnncaacaccnaaannngcacacgcngcngcnnncagcagagaaanggcacaagaaaccnnncnanacacaacngaancnngaaacgaggggcaccccgacaagcggngcgaccagagcccngaagcagagcccgacgcgngccaagaacaggaccccgacagcaagggcgccngngagacaagcaccaagaccaacanggncanggncnnnggagagaacacaaccaaggccaacgnaga

SEQ ID NO: 128228 - DNA, 260 bp, Glycine max
  Clone ID: PAT_MRT3847_86795C.1
ggaactttgactctttgaatagtgatggtatgcaagttggtggtgattctagttttcttgttaaattacggtttgaaacagaggtttaactgggtaggtgtgatagaaacaggggagggagagaaagaaattcagtatgcatttgctatataaattcaatgctttttttaatttgttcaaaaggtactaggtatattccaaaattttgttaccaaaaataattggtttatagtctgttttttttttttttttgaaaaggg

SEQ ID NO: 128229 - DNA, 625 bp, Glycine max
  Clone ID: PAT_MRT3847_86796C.1
aaaaatttagaataaagtgtggaaaaaaatgagaaaagtgtcatagatgaggagccaaagattaactacagaggatggaaagtcatgccctttatcattgggaatgaaacttttgagaagctaggaaccattggaaccttagccaacctcttggtctatctcacaaccgtcttcaacttgagcagtcttacagctacaaatattattaacatcttcactggcagcgccagtttatctaccttgcttggggcttttctttgtgacacttattttggccgctacaagacactgggattctgcacaattgcttcttttctggggttgcttgttatacaactaacagcatggattaagaaaatgcatccacctcactgtggaagtgagagcatcacatgcacaggctcaaatggtgtctttgtcactaattgtctacatacagtcaaacgttagctgggcaatagggttgggaattcctgcggctttgatgctaatctcttgcacactctactacacgggaagcaattattacgtgaaagttaaagcaactggtccagctccactaacaagtttagctcaagctgtaagttgtggctataaagaaaagaggactgaatctatcagaata

SEQ ID NO: 128230 - DNA, 275 bp, Glycine max
  Clone ID: PAT_MRT3847_86797C.1
attgaataaccaacatttgttgtttaattaaggggaggggaaaataacaaattaatgggaaacatacataacttcaaaagttaatggttaaattgtgtatactttttgtatattcaaaataccaaccattttttatgaaatcaaatagcccctctttatctcttcctttttactatatcaccaacaaaaatatacttcacaatatccctcaattacaaacttagaccttttttaaaccaaaaaccatcgtttttaatctccacaaataatttttt

SEQ ID NO: 128231 - DNA, 2299 bp, Glycine max
  Clone ID: PAT_MRT3847_86798C.1
gtgccacaataccatttaggtagaacaaattaaagattggtttgatagtgggttggagcaaatcttaaccattatttgttccctctctttacttgagttcattcctagctcgttattcttagctaaagtagcaactcgaatattcaccaggaaccttattgggaaaagaatgacaggagtagaggctatggaaaaaaatgagaaaagtgtgacagatgaggagccaaagattaactacagaggatggaaagtcatgccctttatcattgggaatgaaacttttgagaagctaggaaccattggaaccttggccaacctcttagtctatcttacaaccgtcttcaacttgagcagtcttgcagctacaatattgtcaacatctttaatggcagcgccagtttatctaccttgctcggggcttttctttgtgacacttattttggccgctacaagacactgggattctccacaatggcttcttttctggggttgcttgttatacaactaacagcatggattaagaaaatgcatccacctcactgtggaagagacagcatcacatgcataggcccaaccacagggcaaatgggatttctacttgctggatttggacttctaattgtgggggctgcagggattagaccttgtaacttagcatttggagttgatcagttcaaccccaacactgagtctggaaagaagggaatcaatagcttcttcaattggtacttctttaccttcacatttgctcagatggtgtctttgtcactaattgtctacatacagtcaaacgtgagctgggcaatagggttgggaattcctgcggctttgatgctaatctcttgcacactctactacacgggaagcaattattacgtgaaagttaaagcaactggtccagctccactaacaagtttagctcaagctgtagttgtggctataaagaaaagaagactgaatctatcagaatatccactggattcttcgctctttgcctatgtttctccccagtctattaactccaagcttcttcacacgtctcagttcaggttcctagacaaagctgcaattataaccccacaagacggcataaacccagacgggtctgcatcagatccttggagtctttgcagcatgcaacaagtggaagagctaaaatgcttgctgagagtgatccccatttggttcgcaggaattttcttctacattgcaatagtccaacagaacacaatgctggtcttccaagcccttcaatccgacagacgcattctcagcaccaacttcaagatcctagcagcctcctacaccatcttccagatgctgagcctaaccatatggctacccatctacgaccgaatcctcgtgccgtcgctccaaagggtcaccaaaaaagagggtggcatcacagttcttcaaagaataggctttggcatgttcctctctatactatgcacaatggtgtctggtgtagtggaagaaagaagaaggacattggctttgaccaatcctattggattagagccaagaaaaggtgccatttcttcaatgtcaggtctatggttggttcctcagctaacactggcagggttatctgatgcattcgcgattgtgggacaagttgagtttttctacaaacagtttccagagaacatgaaaagccttgcagcgtctctatttttctgtggcctcgcgggatcaagttatttgagtagtttgctgatttctattatccatagggcgacagctaaatcttcaactgggaattggttacctcaggatctcaataaggggagattggatagattatattacattataactgctctagaagtcgttaatttcggttactttatattgtgtgccaagtggtataaatacaaagggactggttctagcagcagtggtgaccttcaactcgatcaagtatccaaaccatccgaaagaactgttaacactgtctagtggttctcatttaaacctgtggttatattaagtacttagctttaagttttgtggtttataatgatgttattttactgatcgtctttcatacagaatgtctgtaatcttaaacctaaaaaaatggttgagcttacggttcataatgtttctttagaaagaacaaataaggtagtctttctttatttttaggattggattggggaaatagttttattgtaaaccttcttgttttttttagtattgatagcttgcctttagtgaaaccaaaaaaaaaaaaaaaaaaaaaaaaaaaaaaaaaactcgagggggggcccggtacccaattcgccctaagctt

SEQ ID NO: 128232 - DNA, 3433 bp, Glycine max
  Clone ID: PAT_MRT3847_86799C.1
tattttttttttttttttttttttttttttttttttttttttaaaccagaacaaacatgggagatatcaatcacgtaatttcaactattattttgaaagcataggacacgacaaatagtacacaatataaagccagaacaaacattaagccagaacaaacattggagatattatatatatatatatatatatatatatataatcgtacaatttttcattttggaagtccaaatatacagaaaaataaaaaacataaaagcatttcaataagaatatatcaactatgctccctgctttatttctttttctgcactcttttcttaatagattttttcttcttctcttattcacaccaatgaacaatgagaatttttctccctttgcactaggcaatctataaacaacttgtgtgttgtccaattattccttggcagtgctgtttctttgccctgatgatgccattagcacagcaacagccactataaacataaacaacatactccctagcagtatatatgttcttcttgatgatttcctgtactctccaaacagaatcacgccccaaaaagtgcttacaagtggaagtgcctggactgcatctgctgctgcatatcctgctgcttgaccacccataaattgaagaccattcccaaacccacaaagtagaccagccaacaaggcccagactctgccatctgagtctgccaaataagccttaaatgatgacttgggtaggtttaggacagggtggtagaggaaggtgatgtttagaatcatggcaataacaaaacaagatattgaaaaatagaagaatgcagtataaactgtcaaatggggaaccccttttttcaaagtattccattggtcatttgttgctatgttgaatgctggtgagaacatagagaagcaaagtccagcaaagaatgttagagccaatccaatcaaagtgctcttcccaaaaaccttaatagctcttttttcctcaagctccacgagaaaaactgcagttcctgcttcgacattgtctgcagaactacttccgctctcgagatcttttgatttaactatatccccctccttggaagagatatctccatctttataatcaccggtgaaattgcaaaatcttaacaattatttgttccctctctctacttgcagttctttcctcgttatttcttagctaaagtagcaactcgaatattcatcagaaaccttatcattgggaaaagaatgacaggcgtagagacaatgggaaaaaatgagaatcaaagtgtggaaaaaaatgagaaaagtgtcatagatgaggagccaaagattaactacagaggatggaaagtcatgccctttatcattgggaatgaaacttttgagaagctaggaaccattggaaccttagccaacctcttggtctatctcacaaccgtcttcaacttgagcagtcttacagctacaaatattattaacatcttcactggcagcgccagtttatctaccttgcttggggcttttctttgtgacacttattttggccgctacaagacactgggattctgcacaattgcttcttttctggggttgcttgttatacaactaacagcatggattaagaaaatgcatccacctcactgtggaagtgagagcatcacatgcacaggcccaaccacagggcaaatgacatttctgcttgctggatttggacttctaattgtgggagctgcagggatcagaccttgtaacttagcatttggagttgatcagttcaaccccaacactgagtctggaaaaaagggaatcaacagcttcttcaattggtacttctttacctacacatttgctcaaatggtgtctttgtcactaattgtctacatacagtcaaacgttagctgggcaatagggttgggaattcctgcggctttgatgctaatctcttgcacactctactacacgggaagcaattattacgtgaaagttaaagcaactggtccagctccactaacaagtttagctcaagctgtagttgtggctataaagaaaagaagactgaatctatcagaatatccactggattcttcgctctttgcctatgtttctccccagtctattaactccaagcttcttcacacgtctcagttcaggttcctagacaaagctgcaattataaccccacaagacggcataaacccagacgggtctgcatcagatccttggagtctttgcagcatgcaacaagtggaagagctaaaatgcttgctgagagtgatccccatttggttcgcaggaattttcttctacattgcaatagtccaacagaacacaatgcatggtcttccaagcccttcaatccgacagacgcattctcagcaccaacttcaagatcctagcagcctactacaccatcttcccagatcctcgagcctaaccatatggctacccatctacgaccgaatcctcgtgccgtcgcgccaaagggtcaccaaaaaagagggtggccatcgcaattcatcaaagcataggccttggcatgttcctctctatactatgcacaattgtgtctggtgtagtggaagaaagaagaaggacattggctttccaatccctatcccacgaatggaatagcaatgagtaaagcagccaagaaaatggtgattgagtcttcaaggtaggtatgctgaggaagacgaccacgcctatctaacatagtcaaaagagcaggccatgtccccaagaagaaaagagacaagaacatgcatgctatggcacctcctttgctctccaccatatacattttcaacccagtagtgcacaaaatgctctcagatagtgaaggagccaaggaacaaagaccagagaactccttggaagccatagatcataaggggagattggattatttttattacattataactgctctagaagtcgttaatttcggttactttatattgtgtgccaagtggtataaatacaaagggactggttctagcagcagtggtgaccttcaactcgatcaagtatccaaaccatccgaaagaactgttaacactgtctagtggttctcatttaaacctgtggttatattaagtacttagctttaagttttgtggtttataatgatgttattttactgatcgtctttcatacagaatgtctgtaatcttaaacctaaaaaaatggttgagcttacggttcataatgtttctttagaaagaacaaataaggtagtctttctttatttttaggattggattggggaaatagttttattgtaaaccttcttgttttttttagtattgatagcttgcctttagtgaaaccaaaaaaatatatgaatttattgaaatgtactttgatttaaaaaggcgctgtagcagtattggaaggagccagatgttcaaggaatgagatgcactcaaaatattttatttatgtc

SEQ ID NO: 128233 - DNA, 1390 bp, Glycine max
  Clone ID: PAT_MRT3847_8679C.1
cataagtgaagaaaagtcagcagagctttaagacgatgggaccaatgtgtcatcttgacttatccgagagaaattcgtgaagaaagaaagtgtatcattttcctttggattaataagtttggtcttgtggatagaaatgaagggcaaagcacttcaaaataaggctgtttggattgatgtaaaaaggaacaatactatgttctattgtttgaattgtttacaatagaattttacctcgtaaaaaaaaaaaaaaaaaaaaaaaaaaaaaaacctatgaagaaccccaaagacttacgcaccctagggccggtctctcacgtccccacattaatgtgtgtttgtcacgagacccatagtgctgccaaattatagtaactctctttctctatctgaagaagaagaagttctgaagaagcatgtgtggaggtgctatcatctcagacttcattggtgtgaagcgtggccgcaacctcgccgcgcaggaactgtggtccgagcttgaccctttctctgacctccttggcttcgataccaccaccaccaccaccaaccaaccaccccttccagacaaaaaagtggtgtcatcatgtgagaagaagaagaagaaaagtgtgagtgcagaaaagaagagtggtgggcgagctcggaagaacgtgtacagaggaatcaggcaaaggccgtggggcaagtgggccgcggaaataagggacccacataagggcgtccgcgtctggctcggcaccttccccaccgccgaggaagccgcccgagcctacgacgacgccgccaagcgcatccgcggcgacaaggccaagctcaacttcccggccaccgctccgccaccctccaaaaaacaacgctgcctcagccctgacaccaccaccgaacaaagcagcagctcacaatccaccactggatccaccggatcgccgccttccgccgccttccacggcggaggagatgaactcgacctgaaacaacttgaacggtttctagggttggacaacatgggtgctgagtgggacaacatggatgacctgtggatgctggacgacgtcgttgtgcccaaccgtcacttaatttactagaagggagataattaattaattaataaatggcgttttcttaagttatagttttataaaactatgttggtgtatgtgttcttagttttctgttttgtcttgtcctctcgctttggtaatttctgttttgtacggtcgaatgatttcaaaattatgtgcaacgtatcatgagagggatgattatatgttatgattatgattataaataaaggccaattagggtgtgttagcgtttgggtcgtgcatgtttatatgtagtttatgcgttgtatataatatatttggcatgacattatttggttcta

SEQ ID NO: 128234 - DNA, 350 bp, Glycine max
  Clone ID: PAT_MRT3847_867C.1
cccacgcatacagacacacttccaggcgattctaaaatcatccatgactcgcatgatatgctcaatgtaacctatcaactttcactctagacatcaactacaaacgtcgcattctaaccaaaactacacagaccactaccaatatctacatccagaaacgctagatgaacaccctcaatatacataatcatctgtctacaaaacacaaatatcttactttcaaacacactttttcttcttctcacaaaataccttaaccttcttaaaaagtctcactttataagtctaactatcctaccatttcactttaatgaatatattcatccattataaaacacatctaccctcat

SEQ ID NO: 128235 - DNA, 1938 bp, Glycine max
  Clone ID: PAT_MRT3847_86800C.1
aggaatcaacgccttcttcgcccgggactctgctatctacacccgtcccaaaagcctgactttggcgaccgtgggctacatgaaggcagggtggacccggaaggggggggtcccgattcctgccgcttgcaagccaacatcttgcaccacactacaacgcgagaagcaattgtcacatgcaaactccagcaactcaacctattccactgccaagtttagctccacgttgcaggcgcgtcaatacaaaaagaagaagtatgttagtcaaaataattatctcacaaaaagctaaaaagtcactgaatatgacatacgtaagatttagactgtgttcctaatttactttcttggtctacctacacctttttttttctaaacagttgataatttgtctctgattaacatgattcaactttgagaatacttcaacacattattgtatatttttggaatattcctcaacaaagttactactacacatttatcctttgagcacggaattagtcatttcaacacctttcagtctttgctatcgtttcctcttgctcagtattatgatcattttcgatgccctgatgatgccattaatacagcaacagccgcaacaaacataagcaacatgctcccaagtagcacatatgttcttcttgatgatttgcggtactctccaaacaaaacaatgccccaaaaggtactcactagtggaagtgcttgaacagcatctgctgctgcatatcctgcagcttgaccacccataaattggagaccattcccaaacccacaaagtagaccagccaagaaagcccagactctgccatctgagtccgccaaataagccttaaatgatgacttgggtaggtttaggacagggtggtagaggaaggtgatgtttagaatcatggcaataacaaaacaagagactgaaaaatagaagaaggcagtataaactgtcaaatggggaaccccttttctcaacgtattccattggtcatttgttgctatgttgaatgctggtgagaacatagagaagcaaagtccagcaaagaaagttagaaacaatccaatcaaagtgctctttccaaaaaccttaatagctcttttttcctcaagctccatgaggaaaactgcagttcctgcttcaacattgtctgcagaactacttccaccctcgaggtcttttgatttaactatatctccatccttcaaagagtgtctccatttttataatcaccggtgaaattgttgagctttgctttattatcagcagcattagatgaatgaacagcagaacctagaaaaactgcaatcagaaagcaaccaactcctgggaaaaggatctcagctttgttgattttgtcatccaaaaagtaattcaaggttgtgcctatgacaacagttatgcttgccgtgatcacttcagtaaccgatagcccaacaaaagcaaatgcatattggcaggacagattcccaaggctaaggaacaaaccaccccccattgcgaaaagaacggagggccagttatcctgagcaagttgaactaagaaatttggctgatcatgtgtgcccttgcctatcccaccaagtgtaaaagcaatgagtaaagcagccaagaaattggtgattgagtaatcaaggtaggtatgctgaggaagacgaccacgcctctctaacatagtcaaaagagcaggccatgtccccaagaagaaaagagacaagaacatgcatgctatggcacctcctttgctctccagcatatacattttcaacccagtagtgcacaaaatgctctcagatagtgaaggagccaaggagcaaagaccagagaactccttggaagccatagatcagaaaaaaaagaggaggccggcaacgataaaagtcaaaagataaaagccctcgagcccaaaagtggccaaaacttccacgcaaaatggctcg

SEQ ID NO: 128236 - DNA, 2032 bp, Glycine max
  Clone ID: PAT_MRT3847_86801C.1
aagattttaattctgggagccaagagaagaaaagggagattataaaaaaaaggcccccatatattataatttgatgagaagaattatgatttaagttatatataaagtaagatttttttttttgaaacaataaaataaagtcagtaaaaacattggatatatatatgtctatatatatatatatatatatatatatatatatattatggtacaaattttcattttgaaagtccaaatatatacaaaaaacaaaaacataaaagcatttcaataacaatatatcaactatgctccctgcttttatttcttcttcaacacccttttcttaatagcttttttttttcttctcttattcacgccaatgaacaatgagaatttttctccctttgcactaggaaatctataaacaacttggtagtgtgttgtccaattattccttggcagtgctggttctttgccctgatgatgccattagcacagcaacagccacaataaacataaacaacatactccctagcagtatatatgttcttcttgatgattttctgtactccccaaacagaaccacgccccaaaaagtgcttacaagtggaagtgcctggactgcatctgctgctgcatatcctgcagcttgaccacccataaattggagaccattcccaaacccacaaagcaaaccagccaacatggcccagactctgccatctgagtccgccaaataagccttaaatgatgacttgggtaggtttaggacagggtggtagaggaaggtgatgtttaagaatggcaataacaaagcatgagactgaaaagtaaaagaaggcagtgtaaacactcaagtggtgaacccctttcttcaaagtgtgccattggtcatttgttgccaaattgaatgctggagagaatagagagaagcaaactccagcaaagaaagttatagccaatccaatgaaagtgctcttccctaacaccttaatggatctttttttctcaagctctataagaaaagctgcagttcctgctttggctttgtgtgttccatctactagatctttcgactcaacttcacttgtttctttaaaagtggttacactagtgctcttagctgcatctttgtaatcactgagcttggccttattgtcaactgtgttagatgaatgaacagcagaacctagacaaacagcaatcaaaaagcaaccaactcctgggaaaagaatctcggctttgttgatcttgtcatccaaaaagtaattcaatgttgttcctataacaacagttatgcttgatgtgatcacttctacaactgataaaccaacaaaagcccaagcatattgtgttgacaaatttccaacactaaggaccactccaccccccatggcaaacagaacagaaggccagttatcctgagaaagctgagacaagaagttgggttgagcgttgccaatctgaccaaaggtgaaagcaatgataacagcagccatgaggttggtgagggtgtaatcaaggtaggtgtgttgaggaagacgaccgcgcctttctagcagagtcatgacagcaggccatgtcccgaggaagaagagggacaccagcatgcaccctatggcgcccaccttgctctccaccacatacatttcagatgctacgctagcacgcctttctaacatagtcaaaagagcaggccatgtccccaagaagaaaagagacaagaacatgcatgctatggcacctcctttgctctccagcatatacattttcaacccagtagtgcacaaaatgctctcagatagtgaaggagccaaggagcaaagaccagagaactcctcagagcctcaaatagtgaatataaatctacccagttgcttgtagccacacacaaaaagtaacagtgggggccatatgataaacaaatgtttgaaacctttgaagcaccaaagtggccaaaacttccacgcaaaatgatttcaaaatctccaaaaaactgttggtgtggagaagatttctacctctgctgctcgagccgattcggctcgag

SEQ ID NO: 128237 - DNA, 359 bp, Glycine max
  Clone ID: PAT_MRT3847_86802C.1
tattcttaatagcatgtcatggtagttgctttgaaatcgttgtgtagcataagaggtatacgcataatacaaagaataattgacgagtgaaataatatactactatcctagtcacaatttcagaagggacttaaaaggggcataaaaaagaattcatattaatggcactgaggtttctatacaaaaaaatgactaacgatatctaactgtttcatcaatggccatcaggcactgaccacaatcaatacttggtattgggcaggtacaaacacaccatattattcagagctcagataatcaggaaaagcagctaaaatgctctttcttcaccagcagattctttcaatacgggataatat

SEQ ID NO: 128238 - DNA, 295 bp, Glycine max
  Clone ID: PAT_MRT3847_86803C.1
tggctgcgagaagacgacagatggggtcctacacattgcaagtcattatgaaatgattttttatgcaatctatcatttgcacctttggttttgagctctcattataacttggactaagatgtatttatttgttataatctcttcttgttaatgtttcagattttcatgtgaaaagtattgaattaaaaaaataatcatatatttgatatttttaaaatataaaatgttcaatattttttcttgcgcaatatctcatcgagtttgatcttttatttaggttgggttggtttttctg

SEQ ID NO: 128239 - DNA, 1405 bp, Glycine max
  Clone ID: PAT_MRT3847_86804C.1
gtgcgaggaagaagccagcaacattagcagctgaagcaaaagctctatcccttgcgttaatggtggattgtcagatgggattcgattttggaaacaggggatcgatccatcaatccgctgtgaacagtatttaatggagtttgagttggatgcatatcgagggcgtggtctgttgtctgaagaagcaagcaacattagcaacggaaataaaagctgaatctcatgcattaatggtggattgtcagatttaattcgattttggaaacaacgaaagcaatgccacaatctttggttttagtccaaagaagcatgtaccatttgaaagcatgacccacaaaagaaaacaaactcaaccacatgaatttaacatacatgatatatataatagtttgcattcattttacttctccatgtaggacacaaaaaaaaagtctcataacaatcacagagtatagatcctttagaaacttttcccataattaaaaaccagcccatccagctggttgagaagttgacttgtttgcctcaccaaaagcctgagactttgttcctgcactgctaggtctttgcatgtgtgggctgccagcaggtacagcactgaagctatctgatccaaaaccccatgaatcaaaatcagtagctagaggaacaggttgcttgttctgctgaccatttttcaccctgacagatttggaggtattttcagctgaaagagacttttgttgttgcggttcctctggaaaagcttgccatgacttattcgaagatgcagatgcagatgcagacgatgtaactgcgggagagattttcaaaccctctctacttggtgaaggagtcctagctgcgagtgcttgcttgagatcctgcaattcttgcctttgtgatcggcagatagcagaaagcttttcgtactttgatgttatttcagctttttccaaattagcttccttcagcttctctttgagtttctccacctcagcctctaatgcttgttccctttcgggtttgttactaagtccagagttgagattagtagtatcaaattcagcaacaaaagtgttaaaagcctggttttgaaagttagttgtactctcacgtacgcgatctttatccttaaacaaatttatttcaaaatccttggagggtacagtatcaggcttgtgtaattttccatgtgtaccgcattcccgaattaccaaaatacacttcacctgtcacggacttgataagagaaatgctccaagctagaccagatgacagaccagtatcacgcaggcaagcgctcgacttttttttgaatttaacatacaggatatatataataggtggcattcattttacttctgcgtgtaggacacaaaaaaaagtctcagaacaatcacacagtatagatccttcagaaact

SEQ ID NO: 128240 - DNA, 1023 bp, Glycine max
  Clone ID: PAT_MRT3847_86805C.1
gcgtacgtgagagtacaactaactttcaaaaccaggcttttaacacttttgttgctgaattcgatgccactaagctcaaccctggacttaataacaaacccgaaagggaacaagcattagaggctgaggtggagatactcaaagagaagctgaaggaagctaatttggaaaaagctgaaataacatcaaagtacgaaaagctttctgctatctgccgatcacaaaggcaagaattgcaggatctcaagcaagcactcgcagctaggactccttcaccaagtagagagggtttgaaaatctctcccgcagttacatcgtctgcatctgcatctgcatcttcggtaataagcattttgtagtttcagttgtcttgctgattttgtgtaggttgtgtttctgacacaaggttgtgtttcattgcaactgcaggataagtcatggcaagcttttccagaggaaccgcaacaacaaaggttctttcaggagaatacctctgtcagggttccaaatctgtcagggtgaaaaatggtcagcagaacaagcaacctgttcctctagctactgattttgattcatggggttttggaacagatagcttcagtgctgtacctgcaggcagcccacagatgcaaagacctagcagtgcaggaacaaagtctcaggcttttggtgaggcaaacaagtcaacttctcaaccagctggatgggctggtttttaactgagggaaaagtttctgaaggatctatactgtgtgattgttctgagacttttttttgtgtcctacatggagaagtaaaatgaatgcaaactattatatatatcctgtatgttaaattcatgttgttgagtttgttttcttttgtgggtcatgctttcaaatggtacatgcttctttggactaaaaccaaagattgtggcattgctttcaaatcgttttcttttgtgggtcgtgctttcaaatggtacatgttgttgagtgacggtattcatttccattttgcaagattgtggcattgcttttt

SEQ ID NO: 128241 - DNA, 479 bp, Glycine max
  unsure (1)..(479): unsure at all n locations
  Clone ID: PAT_MRT3847_86806C.1
ctcgagccgaatcggctcgagtacggctgcgagaagacgacagaaggggcatgagacatatcacaaaattcatctttctggtcaagagaataatgtagtttagccaacgaattttccactgccaagggacaatatgcaagtttttaaaagcagcaacaaccaaacttgaaatcacattccagtcataagttgcaccagccacaactagcagctatttcgattgacttcattgctgccaagagctctgcaaagagagctgtagtgctaccaatatgccatgaaatactgccccgataatcccccaagatacctccacaagccacattacctggtgctcctctagcggcaccatcagaattacatttaatccatccacaaagaggagaccaagtgactggtttaacagtaggagctntattcggatggataggaactntaaaattcttaagaaatggaaaatcgatgatcgaattatacat

SEQ ID NO: 128242 - DNA, 460 bp, Glycine max
  Clone ID: PAT_MRT3847_86807C.1
atcgccattagtgactgctgtgaggagaggatcttctgattcaaaattggtgtcctcctcgtctaccctcactccagaaaccaaaactaccatggaagacaaaggccgtggtgctggtgaaagtcgaggtggagtgaatctgacaaagaagagagaattcaccatattcgtagactatagagatagataaacgttcgctaaacccaaagtagatagttgagatcccagcccaacccaatagcgcgaaagccccaaaccttcgcctttctttttccttcccgccattcattcagtcttttgcttccttccttccacactgattgcctcgtaattcgcgtcgttttcttcttcatcactcactccattcgttacttatttcaattcaattctgagttctatctatggtttcccacactcttcatcaacccaccgcaggcatcgtcaagcaacttcgactcga

SEQ ID NO: 128243 - DNA, 210 bp, Glycine max
  Clone ID: PAT_MRT3847_86808C.1
gtcgtttaaggcgaaaaggaaaaaaagttggcagagaggaacgcgaagacgtgaaataacgcataggcggcagtgcgtttgattacattgagtagcagggctgatgtatgtatgttgaacattataagcgaaacgcaaaacatctattgacaagcctggagacatggttgaatgatctggctacaccagagcctctaatgtgtgccgcag

SEQ ID NO: 128244 - DNA, 486 bp, Glycine max
  Clone ID: PAT_MRT3847_8680C.1
ataatattattttttttttttcccgagcccaagccaaatatatggaaaaacccgccacattggaagaatggcccttggacccaaaaagaggcccccatatccggagggagaaaaacattaataaaccatcatgggaatggcccgctaagaaaggaaggattttaaaggaatgggaacaatagctctcggtccagatggagggaattttgacactagaaggagggctaccctcccaatacataaaaaagaaaagccccgcattataaaggagccggagagactagagatagtttataaaaatttaattcccttaacctataaaggcattaatgaaaaacaaaagggggaagacccaggagagtcaaagcgaataattcctaaaaggaaataagccaaacaatttaaggaactggaggtgggaacggtttctctccatcaagggctggaaatctaagagatgaaaagccaggccatgcccaggaataa

SEQ ID NO: 128245 - DNA, 216 bp, Glycine max
  Clone ID: PAT_MRT3847_86810C.1
gcgcttcacgcaagagtaaacttttacgctccattccgttctttcacgatgggaaaccaaaaggggctgggcgtctccaactatcgcgaaacccgccgggctttgtacgctgtgagctccagaggacttacatgctatgccgcgactgtctagacctacactttgttctatgaacattgctgatgctcatgatgatacgatttcatccgaagctag

SEQ ID NO: 128246 - DNA, 185 bp, Glycine max
  Clone ID: PAT_MRT3847_86811C.1
caagtttatatgtagttctaaaataataactttgtaaaagttttcattctactatctgcatatagaccacattatctctttagtagtggaacagtgattatagaacgacagcattaagatcataggctgcatgatgtcttcgttgcactgaacgggtctctaggaattatgaatattcaacccat

SEQ ID NO: 128247 - DNA, 819 bp, Glycine max
  Clone ID: PAT_MRT3847_86812C.1
catagcttgcatgcctgcagtatctcttataatagattacctactgcttctcttactattggtgtcctatatactgttttgttcaagcaaccaccagattacagtttttttaaaacctttggttgttcctgctactgttttctccgaccatacaataaacataaactagaattcaggtctcatgaatgcctattcttaggctactcaacctcacataaaggttacaaatgtctttcgccaactggcagactttttatcgatgtggtctttaatgaatttaagtttctctacactgaattgttcttgctctcacctaaacccaacacttcccctccatttcctctctccattttgcctcaatacccattgtgtcacctatacaggtttcacaaactttatccccacaggtcactacctccagttcttacacttccaatgattcacctcagctgttcctcattcccctttggcatctcagtctccaattttggcacatgccatctgcttctctgcatacttctgttactgttcctgctgagtgtggtacttttcctgaacctgcaacaacttttggttctattcctcagcctacccccgaatctaactcagacccccctcctgattgccctaacattcattttatgcaaaccagatctaaatctggtattcctcaaaacagaatccatccctctgtaactgattgtgaaccaaaaagtgtgaaccaagcactgtttgatcctaaatggcattcagctttgcaacaagagtatgcagccttgatgaggaatcacacatggggatttagtacccatactacaa

SEQ ID NO: 128248 - DNA, 684 bp, Glycine max
  Clone ID: PAT_MRT3847_86813C.1
tacggctgcgagaagacgacagaaggggacacaaacaccttattagactctctctgactttcctcgaacacaacacacaacaacatagttagccttagccttaataaccttagcagcgtcgacaatggccggcgacgacctcgccggagaccacacgccggagcttctgtgcctggtccacgaaatcgccggaatgtgctcggcggggtcctcctccggcgccgacgccatgttccgcaaggactgcaccgatctggttcgccggatctccctcctcacccacctcttcgaggagattaaggaactcaaaaacaacaacgatgtcggtggttccgcttcttcttcttcttcttactcgtcctcttcttcctcggcgtcttcaaagtggtcttctgatctggtcctcgcgcttcactccgctagacgcttgctttccgtcgctagaaacttccgttcctattgctcctctgatggagctgcaaagaccattgtcttccaatttcagtgtgtgacatggaaattggagaaactgttgagcaatttgccgtatgacgatttggacatctcagaggaagtcaaggagcaggtggatttggtgagaacacaattgagacgagccacggataaatatgggtttatgatttcaaagatgccatctcatgaattatcccagccactggctga

SEQ ID NO: 128249 - DNA, 465 bp, Glycine max
  unsure (1)..(465): unsure at all n locations
  Clone ID: PAT_MRT3847_86814C.1
ggcttggaacctttgggctgatttatgtgcttgcatggtcgtgagaagatgatagaagggggcagaaacgggagacgtccctctcctaaatacgggaataaaacctccagacagactgcacagaagccacggaataaaacaagacaaaaacgatcggagccgcgaccacgacaacgaccagggcgagccccctaccgggcgaccataactacttacccgactaaaccggattaaactacgcgctcgataaatctagacgcgccgattcccgcaaaacagaacgcgtgttcccatcaacattcttcggtggcggctcctcacacacacaccgcgccaaaaagcgcgcggtcggccgcggtccgagtaaacttaccgacgtctgctacaccgtggttaatagagtaagccttcgtgcgtaaagacgctaaaaataaacaacaccccgncataaaaaacgccagaaaa

SEQ ID NO: 128250 - DNA, 2091 bp, Glycine max
  Clone ID: PAT_MRT3847_86815C.1
tctcttcacacaaacaccttattagactctctctgactttcctcttcctcgaacacaacacaacacgttagccttaaaagtttaaaccttagcagcgtcgacaatggccggcgaggagctcgccggagaccacacgccggagctgctgtgtctggtccatgacatcgccggaatgtgctcggcgttatcctcctccgccggctccgccggcgccatgttccgcaaggactgcaccgatctggttcgccggatctccctcctcacccacctcttcgaggagattaaggaactcagcaacaacgttgtcggtggttcttcttcttctccttctccttcttcctcggcttcttcaaagtggtcttctgatctggtcctcgcgcttcactccgcaagacgcttgctttccgtcgctagaaacttccgctccaattgctcctctgatggagctgcaaagaccattgtcttccaatttcagtgtgtgacatggaaattggagaaactgttgagcaatttgccatatgacgatttggacatctcggaggaagtcaaggagcaggtggatttggtgagaacacaattgagacgagccacggataaatatgggtttatgatttcaaagatgccatctcatgaattatcccagccactggctgaagaaattagtcaggttcttggcaaatttgataggaacttgacagacaacatatcaaccatgaagggaaatgctgcctagacagtcctgccagctcctgcttggagaaaacatgcagcagcaatccttttcgctggtcacttgcaatgagaacaagataattattgagcataccgactttagtggaatttctcagtggtgtatagagcacaacattgagcagccaacaggactaaccaatggaaaattaaagaaaagtgatggatcgttcagagatgttacaggtgacatagcagcaatcgaagctctggtccggaagctctctgccgatctgttgaggagcgtagagcagctgttactgaacttcgatcgctatccaaacgaagtactgataatagaatactaattgctgaagctggagcaattccagttctagtcaaccttctaacatcagaagatgtattgacacaagacaatgcagttacttcaattctcaacctttccatatatgaaaacaacaagggacttataatgcttgctggtgccattccatccatggtcctgctgctccggcccgttccagcgtggcacgtgcagtgccgcacgacccttttctgcgcgcccctgcagctgtgcccgcgttgtggatttgctccaaaacgggagtcctagaggaaagaaggatgcagcaacagcattgttcaatttatgcatttatcaagggaacaagggcagggccattagggcaggtatcatcacagcattgttgaagatgcttacagattcaagcaaatcgatgttgaaaatgcttacagattcaagcaaatcaatggtcgacgaagccctaacaataatgtcagttcttgccagccaccaagaggcaaaagttgccatagtaaaagccagcactataccagttttgatagatcttttgaggaccggattgcctcgcaataaagagaatgcagctgctattcttcttgccttgtgcaagagggatgcagataatcttgcttgtataagtagacttggtgttgtcatacctctctctgaacttgctcgaaatggcacagagagggccaaacggaaggctacttcattattggaacatattcgtaagttgcagcaactttgaatggtatagttctacaaagaactttaagtttattctgttctctcatcatttgacataattttccacactgcggtttgcaaactggtcatacgaggtgaaataagaaaatcagcctcattgattcagttattcttttcttgttttgttctttgttaacccctgtatgagcgtgtaaagaaatcaattgatatattgtttccttatgaaattcttacagaagtttccgttcttttcggttgaaaaaaaagggcgggccgcagctaagaaggattccaaagctttacggtacggcggtgcagtgcga

SEQ ID NO: 128251 - DNA, 372 bp, Glycine max
  Clone ID: PAT_MRT3847_86816C.1
gacgacgacagaaggggagaggaaaaatgttgatacgccgatagccttggactgccataccttctgccgcaccacttcccatctgttacggcgctactaatggactttccatccccaagcaacttacctattgaatctgctccttcttacgctccagctccggcgtcaatcttcctctacaaccaggttacgaaacggatactcgacatttgcagtctctgaaacccggtcttaacctcgacggaacgacgatcggtaatctctaagatattacactgagggctattttcgtgctaaaacaatctgactgcaaacagtgagagtacactacacactttgggaagatgctactacactacaacattaaaacac

SEQ ID NO: 128252 - DNA, 909 bp, Glycine max
  Clone ID: PAT_MRT3847_86817C.1
gagacaaataccatgtgatgtaaatagcaagacccaattgtaacaagtgtaagaaaaacatgtttggattgaatgaaaaacagcaaagaatataaattgtaacaagtgtggaactaaaaagaagctagtgatagtgcaaattaaattagactagagaaggaacaaccagtgtcccaaaatacatgacaaactacagaatcaaacaacaaaaagggaactaaaacacgctttagaaccctacactaaggaacatgacaaattaacaacggaccacatgcacatcatgcctgttctgtccctctcttcctacaaatcaataacagaaacaaaccatgccaaaacccaaaccaacactccattttcagcaacctcaacgacacataggacactgaatcaatccattctcattacactggccacacctcagagtctatttgtgattctcatgatccaaaaccttacaacttccattacactccacgcacattacaaacctcacaccaccacacccttcacactcccccaaagccttgtggggaatcccttcaaagagaacacccaattttccctcttcttccaacttcacaatttcctcagcacccccaaccaaccttcctttcacgaacacaaccggaaccttaacttgtttggtccccatcagcttccgcaactcctccttaaaccccgaatccattgacacgtcacgctccaccacgtgcacgcaataggactcgacaatggaccttaccttgttgcactcctcaaacgtttttctgatcccccgtaacgtggtggtgtaaatgacaacgcagttttctcctccagggggcaatttttcctcaaacgtcttaatgaaagtttgtgaatccaaagattttctgactcttcgggtcttgggggtggcccaca

SEQ ID NO: 128253 - DNA, 272 bp, Glycine max
  Clone ID: PAT_MRT3847_86818C.1
gtactgctcacgatgttgtactatgtgagtggaaacactagtattctgcatggagcaacagcatcctggaagacatgctctcagtgcaagcggacctttgacatgagccacttgcactgtgacgcgtgcactatggcgctgcaaccaagcatggtacatcgaacgttgagggtaacgtgacggttaacgttactctcttttgtgatgagatacatctatatgtaccacaggatagacctcgagggcatcctacaggatatgctacaaggaac

SEQ ID NO: 128254 - DNA, 304 bp, Glycine max
  Clone ID: PAT_MRT3847_86819C.1
cacgtcgccggtttactctcagagatccaaaccctaagaattgggctcgtgagacgaaaccgtagagatcctctgacaaagcactatgaactggcgcattgtcgggatgctgcgtacagagcacagatgccgaccattcttatttgcgaacgcaccgaacgggaagagattctgtagaatgctcaaatgcgcacaaatgcttgacagacgctgctgacacggctcgcgttgcccatggactagagagagagatgaaaccactaaggccgagctcgaagtgttcgacgacgtcggcgtctccgtt

SEQ ID NO: 128255 - DNA, 1135 bp, Glycine max
  Clone ID: PAT_MRT3847_8681C.1
gtttgtttgtctgtcacgagactcatacattgtgctgccaattatagtaactctctatttctctttccatctctcaagttctgaagaagaaacatgtgtggaggtgctatcatctcagacttcattggtgtgaagcgtggccgcaacctcgccgcgcaggaactatggtctgagcttgaccctttctctgacttccttggcttcgataccaccaattccaaaaaccaaccacccctgcagaaaattccagacaaaaaagtggtgtcatcatgtgagaagaagaagaaaagcgtggtgggtgcagaaaagaagaagagtgatagtgggcgagctcgtaaaaacgtgtacagaggaatcaggcaaaggccatggggcaagtgggccgcggagataagggacccacacaagggtgttcgtgtctggctcggcaccttccccaccgccgaagaagccgcccaagcctacgacgacgccgccatacgcatccgcggcgacaaggccaagctcaacttcccggccaccaccatttccgccgccgccgccgttccgccaccctccaaaaagcaacgctgcctcagccctgacatcatcactgaagaaagcagcagcagcagctcacattccaccactggatccaccggcgaaagcggcggaggaaacgacgaactcgacctgaaacaaattgaatggtttctaggtttggagaatgagctgcctgttagcaacaacattggtgctgagtgggacaacatggatgacctgtggatgctggacgacgtcgttgtgcccaaccgtcacttaatttactagaaggctaataattaataaatggcgttttcttaagttttagttttactttataaattgtagtataaaactatgttggtatttgtgttcttagttttcttctgctgttttgtctcttctctggctttggtaatttctgttttggacggttgaatgatttcaaaattaggtacttgattccaccttttctgttttgtcttgaccactcgctttggtaatttttgttttgtacggtcgaattatttcaaaattaggtgcaacgtttcatgagagggatgattatatgttatcactatgattataaataaaggccaattagggtgtgttt

SEQ ID NO: 128256 - DNA, 371 bp, Glycine max
  Clone ID: PAT_MRT3847_86820C.1
caataacctatttttcaagcctgacatggaatcttttctaccaaaggtatatgatacatatatcttaaatacatttaatcaatcttaaacacttatgaattgttacttatattcttctcacacataatatatctatttcttacaatattttttttaatattcaaacctttcttcattttgtctttaataatcttttcttaccatactttatcccattttattttaatctatcctaataatatattttactcttttaattattaaatctatttctataaatatttctttatatttcaaatatattacttcttcttagtttataataatttatataataaaacattctaatacattttattactttattaatt

SEQ ID NO: 128257 - DNA, 700 bp, Glycine max
  Clone ID: PAT_MRT3847_86821C.1
aattcggctcgagctttctgatacgagttaccttgtccttctaacatgcacactctggcaccacaaattcctgcaaagcttctggcagcacctggtgaaaatttggcatatcttgtttcattagatttattgttattatttttactaaagtgtttaaaagaatttccctaaacgttgtttttatttttgtcttttagctcccctgctctctactacttacacccagaaaagcaagaacaaaaacatgtttattagagaaacactatgcagaagcagtgatggtcagtccttgtcaatgagtttgcacatttagttttcatcatctgctgaaaaatataatgcagcggttaaacagtttgtttcacctgctttcaatggtgacactggtgccatgtattttatattctcttttaattgagttttgttaactgtagcgcattgattgaagaatttcttttttctggtttataaattgaccaactgttaattcatagttgggaagtattgatgccaatatcatctcatgtggctttagttgctattgtttgactgtgctaattttaaatctaagcttaattggcactcttctattatagctttccttattctggtgtattcttttttatgtcacaagattttaaacaaattgaaaattcttttgctttgtagtatttgttgaacctgtctgtgtatgtagctc

SEQ ID NO: 128258 - DNA, 161 bp, Glycine max
  Clone ID: PAT_MRT3847_86822C.1
ggactgagcatatatcacgacggttccaaatcgagtgactctgatatcaccgtggagtgcagcctagaggattatgcagtcggggttgtccacgcggctcattgtgtgtgcgaccgaaagtgcgcgaaacacccatttgtctgctgcgagcgtgggagagc

SEQ ID NO: 128259 - DNA, 758 bp, Glycine max
  Clone ID: PAT_MRT3847_86823C.1
ccacgcgtccgggcaaccttctcggcgtgcaccaaaaacgttattccgcgcccacaaaccagactcggatgaaagcatttctgacgacgacgttttccccaacaatgcgccttcattacaccccaccaacaagctagaattgccacttccgtgcggctggacattctaaaagaagctgcttgaagatgaggttgaaatgcctgacttcaacgggggagaggtggttgccaattcgacggatgaagaaaacaattctgcagatggggataacactgtactatcaaccagacagctccaaaagtacggtccaagatctgtcagaaatgaacaagttagaaatagaaaaagaatttctgaagcactgttacattccaaagaaagtgcctcagcatcccatgctacatgctccaaagcaaatacatctgggatttggaaagctaagccaagattttcattggcatcagtgttacgtaaaagtggggacattggtcattcaatctccaatattgagagcttgcctgaaattgtaaaagctgttgatcctagagcttctgcaaatttagatggaaatcatctagaagatgatgacagaattgaaataaattcagatattgcgcctgctgaaacagaagcttttcctcatggatttaatctggccccaatggctgatcttttttacaatctccaagataaggctgatcaggagacagtcattaacagtgaagattcccctgaacctgtggatagtggatcatcaa

SEQ ID NO: 128260 - DNA, 1067 bp, Glycine max
  unsure (1)..(1067): unsure at all n locations
  Clone ID: PAT_MRT3847_86824C.1
tacggctgcgagaagacgacagaagggggaggaagaaaagtagaaagaattaacaaaatgggagtggcagaatgagaatgatgaacctcccatccatattcatgatttgaaacttgaaactgaaacgactacgttcagataaggaggcaatggcaaccttctcggcgtgcaccaaaaacgttattccgcgcccacaaaccagactcggatgaaagcatttctgacgacgacgttttccccaacaatgcgccttcattacaccccaccaacaagctagaattgccacttccgtgcggctggacattctaaaagaaatgcaagtaaattatgttgttatcattgctatttgttgcaatcagaagctgcttgaagatgaggttgaaatgcctgacttcaacgggggagaggtggttgccaattcgacggatgaagaaaacaattctgcagatggggataacactgtactatcaaccagacagctccaaaagtacggtccaagatctgtcagaaatgaacaagttagaaatagaaaaagaatttctgaagcactgttacattccaaagaaagtgcctcagcatcccatgctacatgctccaaagcaaatacatctggngatttggaaagctaagccaagattttcattggcatcagtgttacgtaaaagtggggacattggtcattcaatctccaatattgagagcttgcctgaaattgtaaaagctgttgatcctagagcttctgcaaatttagatggaaatcatctagaagatgatgacagaattgaaataaattcagatattgcgcctgctgaaacagaagcttttcctcatggatttaatctggccccaatggctgatcttttttacaatctccaagataaggctgatcaggtgggtggataactacaaatgcttcccgtactctttgacctatctatttactgctttcctgtatgagatctttcttgcttccatattccaatattttccacataatcgtcaaaaaaaggtaatgtggtgcagctttttcagaaacatagtagatcccatgttaggatataaagaga

SEQ ID NO: 128261 - DNA, 217 bp, Glycine max
  Clone ID: PAT_MRT3847_86825C.1
gtgtagtaagctataatcttcgtttgttctcatagctcccactcactttctcgcagaaacgtattgtttttctctctttccgcggcctagatctgagcagtttggaaaccctaactgctcttaccaacgacatcaccactctctccgatcaactaccttttttgtcgccctaagtcatggttggaattgcacccgtgggatcacagtttgatgctcg

SEQ ID NO: 128262 - DNA, 166 bp, Glycine max
  Clone ID: PAT_MRT3847_86826C.1
acgtgagaactgctggtgttggttactgaatggactccaagttgcaaaaggatggcattcgaaacatggtaacggagctttctatgcgattgaaacatttccaatggcatagaaagcttcatgagtaggcggacctaccgccgtctgctctgcagcaccaacgata

SEQ ID NO: 128263 - DNA, 118 bp, Glycine max
  Clone ID: PAT_MRT3847_86827C.1
agatttttatttactatgtagtagtctttttctgctttgctcatattttgcttgtttggcttcgcgactagagttgcattgtcagagtccgaggaaaaagacgtcaaggccaatctat

SEQ ID NO: 128264 - DNA, 603 bp, Glycine max
  Clone ID: PAT_MRT3847_86828C.1
ggctcgaggatgagacgacgtatgaggataagaaaaactagacaagcttatggtaaaaatgaagacaacgaggactggattagtgagagagaagttgatggtgaaactgaggacgatggggacatgatcagtgagaggaaaagaaacattagagaagttgatgctgaaaatgaagacaacggagataggatcggtaaaaggaaaagaaacattagagaagttgatgctgaaaatgaacacaatggagacagaatcagtgagaggaaaaaaaacatcgctagagaagttgatggtgaaaatgaagaccacaggccagacaggatcagtgccttgcctgatagccttctgttccacatgataaattttatggacacaaaatctgctgttcaaacttgtgtcctgtctaaaagatggaacgacctttccaaatgtctcactaatctcacatttaattctgatctcccaagcgaaggcctggatagaagttttaagaaatttgagtcttgggttttgtctagtcgcgatgactcatatcccctacttaatcttaccattgagagttggatcgatgctgatgttcaagatagggtcataaaatatgct

SEQ ID NO: 128265 - DNA, 250 bp, Glycine max
  unsure (1)..(250): unsure at all n locations
  Clone ID: PAT_MRT3847_86829C.1
tcgcangcacgcgtacgtaagctcggaattcggctcgagcttcttagtaaacagaatggtcattaacttatctggaaaaaaaaaaaaaaaaaaaaggcggggcngccgacaantnaccncgncnnccnggnantaantccngnaccgnnncctgnnggngnacnannttccccnaaantaagncnnataanngcttggggaaannanggnnaaancngttccctgngnaaaattgtaacccnccnaaaat

SEQ ID NO: 128266 - DNA, 2149 bp, Glycine max
  Clone ID: PAT_MRT3847_8682C.1
gattctgtagagaagaagagcaatggtcacaatccttactcattttctttctgcttcgtcgttcacttcagaatccaaaaacagtctaaaaaagaataataataaacagcgaagttacgaagattctgtagagaagaagagcaatggcgtccaacgattccgattcgcagatgaagatcgtacatggcgatgctggttacatacttgaagacgttcctcacttcgccgactatattccaaatcttcctacatatccgaatccgcttcgatccaatcctgcttactcggttgttaagcagtatttcgtgcacatggacgacactgttcctcagaaggttgttgttcacaaggatagtccaagaggtgtacattttcgacgtgcagggcctcggcaaaaggtatactttaaatcggatgaagtgcatgcatgcattgtcacgtgtggtggactctgccctggcctcaacactgtcataagggaaattgtctgtggtctttcctacatgtatggtgttaacaaagtccttggcatagatggtggttatagaggcttttattccaaaaacaccattactttaacacctaaggtggtcaatgatatccataagcgtgggggtacgattcttgggacatcacgaggggggcatgatactggcaagatagttgacagcatccaggatcgaggaattaatcaggtttatattattggaggagatggaacacagagaggagcgactgtgatttacgaggaagttagacggcggggtctgaaagtagcaattgctggaattcctaaaaccatagacaatgacatcccggttattgacaaatcttttggttttgatactgcggttgaggaggctcaacgtgccattaatgcagctcatgttgaagctgaaagtattgagaatggcattggtgttgtaaagctaatgggacgttacagtggttttattgcaatgtatgccactcttgctagcagagatgtggactgttgcttgattccagagtcacccttctaccttgaaggaaagggtggactttttgaatttattgagaaaaggctgaaagaaaatggacatatggtcatagtcatagccgagggagcaggacaagatcttcttacagaaagcatgcaagccatggatcagaaggatgcttctggaaacaaattacttcaagatgttggtttatggatatctcacaagattaaggatcactttgcaaggaaggataaaatgcccatcaatcttaaatatatagatccaacttacatgattcgggcaattccaagcaatgcatcagacaatgtctactgtacacttcttgctcagagtgcagtccatggtgcaatggcagggtatactggatttacagttggactggtcaatggcagacagacttatattccattcattagaatcaatgagaggcagaacaaggttgtgattactgacagaatgtgggcaagactcctttcttcaaccaaccagcctagctttttgagccctaaagatttagaagaagccaagaaagcagaatctccgacacaattgttggaagagaacaattgcaatgatgttggtgatgccgagaaagaacaacctcccaaagatgaacaagaatcaggaaaccacacagacaatggtatcaagacacaaaattagatttagacttgttcatctacaactgtatttggggacatgttttatctttttgactcaagccctacaacctccaaagcctggagtattgggagctgttctttttgtccttttccatgttttgcaagttggtacgtctttctttataaagacctactaccgtcttgcgtgattgttgtactcagaagattgctgaattttaacctgggtcattaagaatggaacggaattatttatgacgtgcttgaaggtactgtatctggttattgttgttctgtgttttggtagtgacttgagtttttatacgcagttttgctggaacgaggtataaataaacaattttctagtttccttttttcttccctttaatctcacttcttcaaaagtggttctcaaatagtctacattatgcagcgtgtgtgatcattttcccaatatattcctcttcaaaaaaaaaaaaaaaaaaaaaaaaaaaaaaaataaaa

SEQ ID NO: 128267 - DNA, 248 bp, Glycine max
  unsure (1)..(248): unsure at all n locations
  Clone ID: PAT_MRT3847_86830C.1
ctcgagcttgtctcctcgatagataaagattatattagattcgatttcacccgcgtatcaagggggaaggttggcggacggagctgcggtcgtttgcgcggcggcagcgtgtgctgcacctatctttaaaaaataaccccctctttttncccttgaccttctctttaaataacccccccaaaaggttgctctataaaggggggtcattccacatggccccctttctccacttaaaaaataaccttttt

SEQ ID NO: 128268 - DNA, 395 bp, Glycine max
  Clone ID: PAT_MRT3847_86831C.1
ctctcatatccattgtaggacacccctacaatatattgacactataccactgcgtgttctatcgacgctaggacaccacatgtgctatgaactgggaaaccttgtttacgtttatagatacgacgattcaccaccttcatatatacatctacaagctggccacttttaatatattacaatgcatagtgacactgcctgatcgaagaacttatatgagaaagtggagagcttgggaaaatgaaaccaacactattgaatatcaattttataacgaaactgacatggtcaggatcgcaatggacacaacattacgaagaatgcacttgaactattgaagccagacaacaattgcgatatccatagttaacttgttgcgacaatgattatgatctgac

SEQ ID NO: 128269 - DNA, 709 bp, Glycine max
  Clone ID: PAT_MRT3847_86832C.1
aggcaagcaggacagagatatcatgcgggttcttgtggagtgttgctgccaagagaaagtttttaccaagtattatacagtgctggcttccaagttatgcgagcatgacaaaaatcataagtttactctacagttttgcctgtgggaccagtttaaggacctggagtcaatgccgctaatgaggtcaatgcatcttgcaaaatttgtggctgaaatggtttcctctttcactctctccctttctgttttgaagactgtggatctgaatgatatcaccctattgacaccaaaaaggatcatgcatttccgcattctgtttgagtccattttagagtatcctgaaaacctggtatggaatatcttcacacgtgcagcagtgacccctgaacttgaaagttttaggcaaggccttgagtttttcataaaggagtatattgtgaaaaccaataaagatctaagtcaaaagtttaagttagcaaaaagggccctcaataatgtggaaggaattttaatgtgaaagtaaattttggattcttcccaattttgtagcttaaaatttgtatccatttttatggcaagtacaggttggcacattaatgatgtctctagagaggaactgttaagctttagcggataatttggaaaatttcgattattaaatcctgaaaagtattttttgaatgaaagtggagttcaaagcttgtcaagt

SEQ ID NO: 128270 - DNA, 1129 bp, Glycine max
  Clone ID: PAT_MRT3847_86833C.1
ctgattgatcacacaagaagtggagaaccacttgttattggattagtccctcgttctcatttagtggtgttgcggctgtcgatggtggttttccagcggagccctttacccgctgttccgagacgtgggggctgtgcagctgggcttgaggctcgtctgtgtccgtggcctgctgcttgtacagggtttggcggtgttgagatccatctaggttcagatgaggcagcaatgtacagcggtgatggatcacacaagaagtggagaaccacttgttattggattagtgcttcgtagtcatttattggtaattctgcagtcaaaggttgatttccagcatagccctttaccctctgatccaagaggtgggggcagatcaattaggcatgattctggtgaatttgcaaagcctgtttctagtaaaggaatatgtattgatgatatacatctaagttcagatgacttagaaatgtacattgatcttgctccatttttgaatccctcaccatatattgtaccagaagatatgtctttgacaaaggtatacaatcttttccgtcaacttggtcttaggcatttatttgttgttcctcgcccatcatgtgtggttggtttgataacaagaaaagatttgttgattgaggacaaagaaaatgtgaatacgttagagcttcagtcaactagtgtaagaattccgcaacagaataaaagattgatgacaagaaatatagatgtggagcgccctttgctaaacggactgcttcaaaatcagatacctgactaacactgcatgtagcatactcaaagtccttcccgcttccaattttccttgaagatcattctttattatttcttgtatccatgttcaaataggttagataaaccaatcttagggaatggggttgtagacagaacgccctagaattttgtatattagccactaggaaaagagaggaagacttcattataatgatagttgaattcagtgtaatctattaaagatctgaatcttcattccgtttttttgttcgaggtcattgcttttagtttggaatattatattataaaattcattcaaagcatcaaatatcatattttataagataattattaccctaaaaaaaaaaggctg

SEQ ID NO: 128271 - DNA, 969 bp, Glycine max
  Clone ID: PAT_MRT3847_86834C.1
ttcactcgtcccccctcgtgttgttaaggtttcagacgtagtttccattctgcggagcaacaaacacaatggttttccagtatgtataacttttgtattaatcttgacttgagcattattccttgtgttttctaagttgtatttcacaatttactatgcaaggtgattgatcacacaagaagtggagaaccacttgttattggattagtgcttcgtagtcatttattggtaattctgcagtcaaaggttgatttccagcatagccctttaccctctgatcctagaggtgggggcagatcaattaggtaaggtttcttgagatttgagagtttggcattttacatctgtattcagtatttttattaaccccttaacttccaggcatgattttggtgaatttgcaaagcctgtttctagtaaaggaatatgtattgatgatatacatctaagttcagatgacttagaaatgtcattgatcttgctccatttttgaatccctcaccatatattgtaccagaagatatgtctttgacaaaggtgtgccctttaaaatcctctaaacaatttttttcatttctattctccatttttgttgtcagatgatcatgatgccttactgatcacaggtatacaatcttttccgtcaacttggtcttaggcatttatttgttgttcctcgcccatcatgtgtggttggtttgataacaagaaaagatttgttgattgaggacaaagaaaatgtgaatacgttagagcttcagtcaactagtaattccgcaacagaataaaagattgatgacaagaaatatagatgtggagcgccctttgctaaacggactgcttcaaaatcagatacctgactaacactgcatgtagcatactcaaagtccttcccgcttccaattttccttgaagatcattctttattatttcttgtatccatgttgaaataggttagatgaaccaatc

SEQ ID NO: 128272 - DNA, 552 bp, Glycine max
  unsure (1)..(552): unsure at all n locations
  Clone ID: PAT_MRT3847_86835C.1
ggctcgaggtgaattgaatgaaggatgctcgaatttgagttattgatatggcttttgaggtgctgaatttagtaattaggatgctttttatttcatcactttaatgagctgctttgggtttataaggttgtcttttgagttattgagtttccttacattatggtagttaatgtcttgcaatcatggcttattaatagtgggcaattgcaagagttcgtttcgttataattcctgcattcactttcattctccaagccttttgtgctttcactttcaagcttctgtcataaatcctagcgagttaagcttgtattaagtcatgtacagaaatttcttgcaataatgagctatgttggatcagcatattctatgcaacttcttgattataaaatggatttttttttctctatatggagaggtttgttggatgtggtacagttacggttttaatgtttnttatggttggatgttgcagtcgcactatgttttgttgctctgttccttcaagaacaattgcagcagcatgtccgggtccatgcaatggaagcagta

SEQ ID NO: 128273 - DNA, 573 bp, Glycine max
  Clone ID: PAT_MRT3847_86836C.1
acgagctctgacgaactctcggaaccagaacaggacctgaagaaccttaaagaacaactaaatgaagatttccctgtagggccattgattaagaagtgttgcacattggaccagggaaaagctgttgtgacatttctggatgtaattttggacaagacacttcgtagtactgttgctttattggctgctcgtggtcgtgggaaatcagctgctcttggtttatcagttgctggagccatagctgttgggtattcaaatatctttgtgactgcacccagccctgagaatttgaaaaccttgtttgactttatatgcaagggttatgatgctcttaactacaaggaacatattgatgatgatgtggtgaaaagtgcgaatcccgagttcaagagaggtactgtaaggatcaatatgtacaagcaccacagacagacaattcagtatatactgccacatgagcatgataagctgtcacgaattgaactgatggttgttgatgaagcagctgctatagcagtgccaatggtgaagtagttgctgaggcgatatctggtcttcctgtgttgtactgta

SEQ ID NO: 128274 - DNA, 1464 bp, Glycine max
  unsure (1)..(1464): unsure at all n locations
  Clone ID: PAT_MRT3847_86837C.1
aaccgcgtccgcacacctgagcacttgtccactactcccaagtcctaaccccctctgccaatttcaacggcgaactccctcattcctccgctgccatctccgttcgacgctctatctgattagcggatagcgaaaatcctaagcaaaatattataccgtgttctttagcgtgacccaccttcgtaaataaaaaccctatgcaactgcactattctcgtgttcgctttaaatcaaaccgctcattctcttcaatcatacctcgattttgtgctccgcttggaagggatctggaacgacagttttttctgggggctgtgacaagcaggtcaagatgtggcctcttatgtctggtgggcagccaatgactgttgcgatgcacgatgctccagtgaaagacattgcatggataccagaaatgaatcttttagccacgggaagttgggacaagaccctgaagtattgggatactcggcagtcaaatccagtgcatactcaacaacttcctgatcgttgttatgcaataacagtgaaacatcctctgatggtagtgggaactgctgatagaaatctgattgtcttcaacctgcaaaatcctcagactgaatacaagagaatcgtatctcccctgaaatatcagaccagatctgttgctgcttttccagatcaacaaggttttttggttggctcaatagaaggaagggttggggtacatcacctggatgatgcgcagcaaaacaagaactttacttttaaatgccacagagagaacaatgagatatattcagtcaactccttaaatttccatccggtacatcacacttttgcaactgctggatctgatggtgcttttaatttctgggataaggacagtaaacagagactcaaggctatgcaaaggtgtagtcagcccataccttgcagtacatttaataatgatggctccatatttgcttatgcggtttgttatgattggagcaaaggtgcagaaaatcacaatccagctacagcaaagaactacatatatttgcacttaccacaggagtctgaggttaaaggcaagccacgagctggagcaacaggtagaaagtgaaatttagtgctgaaggtccattttgttttggtgcacatagattttgaaactggaatcaaaagatcggtcatttaatgtttttttagaggaacagctaaaatgagaagattgtaattcttacttttattttttttattctaaaattttatcttaagtttacccaattttctattaggctgttgctcatttatcacatggaccgctattcagatgaagctgatatcttttatagttcgtgctgaagatccattttgttttggtgcagagagattttgaaactggaattaaaagatcggtcatttaatgttttttttatagaacagctataatgagaagatnnnnaattcttactttgatttttttattctaaaatt

SEQ ID NO: 128275 - DNA, 747 bp, Glycine max
  Clone ID: PAT_MRT3847_86838C.1
aaccctaaacggtctactgagcattggtccactactcccaagtcctaaccccctctgccaatttcaacggcgaactccctcattcctccgctgccatctccgttcgacgctctatctgattagcggatagcgaaaatcctaagcaaaatattataccgtgttctttagcgtgacccaccttcgtaaataaaaaccctatgcaactgcactattctcgtgttcgctttaaatcaaaccgctcattctcctcaatcatacctcaatctctctctctttctctttctgatcacaatgtcgacctttggcgccgcggcgaatacgaatcccaacaaatcctacgaggtagcccaaccaccctctgattctatttcgagtctttgtttcagtcccaaggccaatttcctcgtcgctacttcatgggacaaccaggtgcggtgttgggagataacaaggaatgggactgttgtcaacagcactcccaaggcttcgatttctcatgaacaaccggttttgtgctccgcttggaaggatgatggaacaacagttttttctgggggctgtgacaagcaggtcaagatgtggccactaacatctggtgggcagccaatgactgttgcgatgcatgatgctcctgtgaaagatattgcgtggataccggagatgaatcttttagcttctggaagctgggacaagacccttgaaaaaggatttagtaaggggagaggacttggaactaaaagggactac

SEQ ID NO: 128276 - DNA, 325 bp, Glycine max
  Clone ID: PAT_MRT3847_86839C.1
catttcactgtatatcattgcacgacagatccatttagtacctttttctgagttaaactacttcaaacattgctgaagactacaaccagttgaggactaattgaagcgggtcaagacatagcatttgcaaagatttagttcattctcatcactctgcattattcgggttctctactatgtgtaatctcatatcaagattaatgagtatcgtgatcgtattcttttgaatcctatcaacccatatggcaaggcaaagaatttgacagtggacatcattctagattttacaaatcaaaggagcaaccagacatggctgtcatgatct

SEQ ID NO: 128277 - DNA, 442 bp, Glycine max
  Clone ID: PAT_MRT3847_8683C.1
tcgcccacgcgtccgcccacgcgtccgcgaagattctgtagagaagaagagcaatggcgtccaacgattccgattcgcagatgaagatcgtacatggcgatgctggttacatacttgaagacgttcctcacttcgccgactatattccaaatcttcctacatatccgaatccgcttcgatccaatcctgcttactcggttgttaagcagtatttcgtgcacatggacgacactgttcctcagaagggcctcggcaaaaggtatactttaaatcggatgaagtgcatgcatgcattgtcacgtgtggtggactctgccctggcctcaacactgtcataagggaaattgtctgtggtctttcctacatgtatggtgttaacaaagtccttggcatagatggtggttatagaggcttttattccaaaaacaccattactttaaca

SEQ ID NO: 128278 - DNA, 258 bp, Glycine max
  Clone ID: PAT_MRT3847_86840C.1
caagaaaaaaatcgaaacgtgtgaggggataacaagtctctttttccacttacacaaagccccaaccataaaaagggaagcggggtcatgcttgcacctaatagccggtcgcgaattttatcatgatttgcttccatcgcatcaaccgatatatgttaacaaagaaaatatggcgccatttaatcttaccccacccaaaattgcatctaaccggcggatacatctcaggcgaagaaatgcgcagccatataaatggaa

SEQ ID NO: 128279 - DNA, 309 bp, Glycine max
  unsure (1)..(309): unsure at all n locations
  Clone ID: PAT_MRT3847_86841C.1
ggggggtttgttggcttatacatttttccccaacaaaaaaaacaaacacaaaccacaaacccattccacagtccccaaaaaacaaccaaggaagcaatcatggncacaatttacacccatacacatggaataacacaaaggcaaaaagtttttggggggggggggaaatcaaaaaaaccccacacacaagagaggcacccaatgggggcgggcccatacaaaaacaggggcccaagcccttgccttaaaagggacggcccggccgcacattctggagacacacagcagcaagggccgctccaaggaaag

SEQ ID NO: 128280 - DNA, 762 bp, Glycine max
  Clone ID: PAT_MRT3847_86842C.1
cttgactgaaccacgccaacatggcgttattttggccgcacgtgctgcagttccgttctcaaccttcgctcggacatgctaactgcgtgttcttctccgatctcactgaatcccgctctgtagaactttcatgcactgattccttcactctggttcgccggtgcaagatctccggtccggctccggcggcgctgaaaccggtgaaatgcctcggcagatctacgggggagaagcaatggagtgacgccgaaactgccgtatccgacaccgacgaagttgctgatgaaccgaatgaccggaaccaaacttctgttccgacaaatggtcgcgttgagtcgcagaggattgccaccacgtcttccggcgactctctctctctcggaattcgagaaccggtttatgaagttgttgaagtgaggtccaatgggaaagtatcaactagaaaaatcaacaggagacaattgttgaagtcaagtggtcttcgtccacgggacattcgaagtgtggatccttcattgtttatgacaaattcaatgcctgctttgctggtccgggagtatgctatacttctaaatctgggttcactacgagcaatagcaatgcaagattgtgtacttatatttgacaataatcgtataggagggaaagcttttctggagacattgctacctcgattgaaccccaagaacacaatggagggccatcaatgccatttgaacttgaggttgttgaagcagcattgctttcaagaatacagcgatt

SEQ ID NO: 128281 - DNA, 421 bp, Glycine max
  Clone ID: PAT_MRT3847_86843C.1
gatagatatcttaattagcttgatttagtcatgctgcattgtatacatatatcaaaacatcacattgtaccccataaatatacacaactataatttgtcaatttaaaaaaagcctacaaaatgaagctcagcattaaaagatttaaaaaggacatgacagcctcaattacctgtgatacaacttcaaaagatctaacatctaatacgtatgaaattgggtttcaggagttgcagaggaaaatatttaaagaaataatggccaaaaatatctgaatttcatgaaaattataaaccaacagagatccaagcagtccaatgaaacccaagaagtataaacagaaagaatgacacaagaagaaatataaaaatcaaattaatgaaatcagggttgaagagaacatctgaaaaacatctagggata

SEQ ID NO: 128282 - DNA, 203 bp, Glycine max
  Clone ID: PAT_MRT3847_86844C.1
gccaggcgttcgtgaataacgtgtcaatgaacagagggcttaaaagaatatcttcgctaaactctcctacacactacatctttaggatgcacaagccttaaccttctatgacgacgatgggggtcccttggcccagaatgcttataaataaagataaaattttctgtcaaaactctaaggatgcaccaagctttattttcttg

SEQ ID NO: 128283 - DNA, 991 bp, Glycine max
  Clone ID: PAT_MRT3847_86845C.1
ttgcgacttgcgaatacatcaacaaatgggtactttggttcgtaatggtgctcttgcagttcatgctttgctgctcgcataaaataaaatgagagagatcgggtaatccaacaagttgcagttaagctagtttttgacgaatccaacgatgcttgctggaaccattgctacaacaacgaggaggatatcaacttctcctcctttctctcggagattaaaacaaacaggttctactcactcgctaaaataaaatgagattgtccaaatgcttcgcttgcctgattcccatgaaggaaatcaccataacattcccatgaaaggaggacaagcgttgaggagggagccttactctcggacattggatgagagattcattaggattttgaaaatattcaaatggggacctgatgcagaaaaggctgcgagattcttaagataggtgttgaggtcagtgttaaggttcagttttttaagtgggccgggaagaggaggaattttgaacatgactcgaccacttatatggccctgattcgctgcttggatgaacataggatgtttggtgaagtgtggaagacaatacaagacatggtcaacagggcattatctgtcttttaccaggttaagggtcgcaagggcagacctacggtgagcacttacaactctgtgatgcaagaggggcatcatgaaaaggtccatgagctgtacaatgaaatgtgtagtgaagggcattgtttcccagacactgttacatatagtgcacttacatcagcatttgcaaaactaaaccgtgatgactctgctattagattgtttgctgagatgaaggagaatggattgcagcccactgctaaagtttatacaaccttaatggaaatatactttaaggtggggtgtagggtcgaagaagcttttggcctagtcgaggagatgagagcatggcggtgtcttccaactgtttttactcatacagaatttataggggggatgggaa

SEQ ID NO: 128284 - DNA, 1913 bp, Glycine max
  Clone ID: PAT_MRT3847_86846C.1
agagaagaaaagaagttaaatttggcctttggtaacgaacaaaaaaggcattttttctccaatctgacacttgtcacactgacacatgaggcttggtccatgtcttagcttcatcttctacatttctaatttcctcccctctaactatgaatcacttttacaatacttcatgcccttaagttctttcatcacgttgcctgtttttgaagctgtgcttgggcctccagcaatgctcgctttacttcctcatcttctggtgtctcttttagtaaaatttcatagtcctggattgaagcttcccatctttccaacttagcattacaatcggctcttctcaacctggccttgctgtaagatgggcgtaagttaagggcagtattgcaatcatctattgctttatcaaattggcctagttttgatctacaagcagctctgttgcatagtaaaacggagttgtatggatcataatcaaggccttctccataggcaatgcaagcctcatgaaattttgatgccttgaaaagctcatttccctttgcacgagcacttgtgacagctcgagcctttctcatcaccttatttgcctccttactattagaatccaacctagttgctttttgtgctgcctccaaagcatcttcaaatctgccagcaactaaatcaacttgagcctgtgtaaccaacaaatttgcattaccaataggtccaaagaacttggtacactcatcaacatcaaatttagggcaccttgacattactttgtctgcatcttgatgtctacgaagttttagcaaggcttcggcttgtaatgcatatatttgtggagcagagtctgcaccagatgatatagcattgttggttgtggttataagtgtgatccaatcaccgaacctacgagcctcggtgcatttgtttagatatacttggagagtctttgctttagcaatctcatctggatcagcatctggtcctgcttgtttataatgatacaaagctttatctgtttctcctaatcttaagtgcaaatttcccaaccgatgatgggctctttggtaatgagactcaattcgaatagcttctctacattcaaaaacagcctccaaaagcctaccaagagcagttaatgcagcacttctgttgctcctataagaagccttattcgggtcaattgcgatggcggcatcatacaaagccaatgcctctgcaaaccttccattcttgtaatcctcattgcccattatcttcaattgttcgggatccattcgagtagacacagccctacacagtgaacctgattgttccttgcttggtttagcttctttgccataactaattttatcgtattcacgtcccatggtttgatttgtgtatcctccactagcaacattattactaacacagtaatccatttcactgtaagcattgtaatttggtcctgctccttgcctaaggttacctaaattgccaagggtactacttcctttggactttaggtgttcattgatcatgctttcaagttcaccagagattccaacagcttcttttggtacccttttgccttggttgacatagccctgagtaggtgaaggtgaagggcctcttcccattgtttcattacgattttgtggcttcctttggcttacaacatgggttggcttttgaggattggagacagaataacaagatgagtagtttgtaacatcattgttatatgaagattctctaattgaaacaaaatcattagagcctctatgtctccgttttgaatcttgaatgtttggtggtttttcaaaattgttggctacgggagaagaacctgcagagactgattttcgtgaccatggattatttcgcccaaatactgctgtcatcaagccacaaccaggtttcctctctggtgaattgcctcccat

SEQ ID NO: 128285 - DNA, 305 bp, Glycine max
  Clone ID: PAT_MRT3847_86847C.1
gtctatttaccggaattagatctcctactagcatgtactatccgccgtggagtacacgaacatcacattcaccagcggtaggtcgaagatgtgactgtggaggttggttgtaatgtcatatgataatcatcggccactcctcatgcatcttcggtgaacttggtagctgcggatgactctgctgacgcctagcatgtgatgcctgaggcggcggctgactcataactttctctcatgcactctgtagaataggagattgcggttgcaactagtgtctgacgcaagggtttctgtctgacctgaac

SEQ ID NO: 128286 - DNA, 638 bp, Glycine max
  Clone ID: PAT_MRT3847_86848C.1
tggtttcctctagacggccgctttttttttttttttttttttttttttttggatgttatgaatgaactatttattcaataataattggaaaccatcgcatctagttttacactttcagtaggcctctagcaatcatttctcggaggaatttctctgccttatcattttcatctttttcaagtagggcacaaataattgttttaaaagttatagcattgggcatgcaacctttgccttccatttttgacttcaaatccatcacatcaccaaacaggcccgctttacaaagcccattgatcataacattatatgtccgaacattcagatgatagcctttaaccaaaagatgctggaaaaactgctttgcattctcaagtcttccacccttgcacagtgcatcaagaagtattgtgtatgagtatacatttggctgaattccctgctctttcattttcttgcataatgcaattgccctctccagatgatgattttcgcacagaccatcaataagagaggtataagtcacaatatcaggaatcatatttttgtgcttcatttcttcaaagagactcatagcttcatccaccatttttttcttacataacccattaatcatgttattataaccctgcccatta

SEQ ID NO: 128287 - DNA, 3888 bp, Glycine max
  Clone ID: PAT_MRT3847_86849C.1
ttaagactctggtgctgaatcattgcattattatgatgaaaattttggcatgcaccctatctcatatgcttgtggggataaaagttctttgaaaagtatgtatattccagtgcttggttaccttgacaaagtgaaggagaaattaagaaatcctgaggcttaccaggtatttttggagtgacaaaaaatctacagcaagcaattaatagcatgacattagttgcaatctttggtgggcactttactgggaaaacatgcagatcttatggaaggatttgatgaatttttggttcaatgaaagaagaacgaaggattccttgctggtctccggaaaaaaagacacggacaaaaatcccttatggtagaggacagggatttatttcgtgaatgcgaagatgggatataagaaacgaactataattggagataaatgaaatgatttattgcaattggtaacaatgatgtttaaacttgttaaacagctctatgctcttgccgctgttggtatggataccaagcttttactactatatgcattatgaaaaatcgagaaaacccggaaaatttgttgacttggtttatcatgaaaatgcccgtgttcttctccatgatgagaacatatatcgtattgaatgttcacctggaccaatgaaactgtctattcaactgatggactctggacatgataaacctgaagtgactgctgtgtcaatggaccctaatttttcaacctatctacacaatgacttcctatctgtcgtccctgacaaaaaagagaagtcaggaattttcttgaagaggaataaacgtagatatgctggtaatgatgaattttcaagccaggctatggaaggactacaaattattaatggtctggagtgtaagatagcttgcagttcatctaaggtctcatatgtttttgataccgaagactttttgtttcggataagaaggaaaaaaagtgttttgaatccaaagaatgcaggcgcccaataacaggcacagttgtacaaagagtttaaacagagtacaacgattccgacatttgatgtactataacagaagactttacattatgagtttggcatttaacaataagcaaatataaagattgacctagacagtcttatgaatacagcttcttataatacaaaatttgagaatgattgtcgagcttttattggtattcattcatatttcttattcacattagacaagctgatatataaacttgttaaacagcttcaagctgttgcagctgatgatatggataataagcttttacacctatatggaaatgtgaaaaactgaaaagctggataaagtgttgaaaatttttataacaataatgcacccgatgttcgctattactagtacatatatagtattgaatattaaagaagatgaatgcaagtctaatatgaatagttcggctaaggccatgataaaccttgggtgagtgcattgtagatggaccctaaattttcaacctatctacactatgacttcctgtctgtcgtctctgacaaaaaacagaacatacaccaattaaccatgaaaaagaataagcgttaataagcctaataatgatgaatatttaggtttggatctcgcaggactacaaattattaatggtctggagtgtcagatagctggcagttcatcttagatgtcatatgtactgaataccgaacactttctgattcggataagaaggaaaagaaaagccttgtgaatgctaatttctcgtggaccttaacaggcaaactaattaaacatttgttcaagcagagtacaacgattccgcaatttgttttccattacatgaaaggtgtccattttgagctggggcatgtaacattagtcaaatgtgaacattctgattctacaagaccagttacatccacaaatgcgggccatcaatgaggacactaaagttcacagatatcatgaagaagttggacacttcaaaagtgaaagagaagagggtgagttatcacctaatggtggagactttgaagaggataactgtgaagtttatggacatgctggtttggaggcagttcataaaggaaaagatggtaccatttgtcgacaataccaaaatagacatggggaagaagttcgtggtgaagctggaggagaaaatgatgctgatgacgaaggcgaagaaagtccccatagatcaatggaggacagtgaaaatgcttctgaaaatggtgatgtttctggtactgagtctgccgatggtgaggagtgttctcgagaacatgaggagaatggagatcatgaacatgataacaaggctgagagtgaaggtgaagcagaaggaatgactgatgccaatgatgttgaaggagatggtgcctcattgccatattcagagcgctttcttgtcactgtaaagcctctggcaaaacatgttcctccagtgttgcatgacaaacaaaggactgttcgagtcttttatggaaatgattccttttatgtgctgtttagacttcatcagacattgtatgagaggatccaatctgcaaaggttaactcatcatctgctgaaaagaagtggagggcttctaatgatacaggctctagtgatcaatatggcaggtttatggatgccctttacaatttactggatggttcttctgatagtacaaaatttgaggatgagtgtcgagctattattggaactcagtcatatgtcttattcacattagacaagctgatatataaacttgttaaacagcttcaggttgttgccaccgaagagatggataacaagctgcttcaactatatacatatgaaaattcaagaaaacctggaagattcgttgatttagtttatcacgaaaatgcccgtgttcttctccatgatgagaacatatatcgtattgaatgttctcctgcacctacccaattgtcgtctattcaactgatggactatggatatgataagcctgaaatgactgcagtgtcaatggaccctaatttttcagcctatctgcacaatgacttcctatctgttgtccctgacaaaaaggagaagtcgggaatttacctgaagaggaataagcgcaagtatgccattagtgatgaatattcaagccagaccttggatggactacaaattatcaatggtctagagtgtaagatagcttgcagttcatctaaggtttcatacgttttagatactgaagattttttacatcaaacaagaagaaaaaggagaaccttgtatcagagcagttcatgccatggacaggaaaagtccccaatcatttgttcaagcagagcacaacggtcctgcaaattattttcaatttgaagatggtattcattttgagcccgagatgtgtttttggtcatgcatcaatggcaggcagaggtgccagatggaaatggcatcccgtccaagaagttgagcaaaggatgttttaatgaaattcatttttcttgcattcctcgcatcttctataccaacaaccaaataaggcaacacagaagggagatggggcacagagattgtagtataatactttgacatggtgactgatgagtttcaatcatgtaaatagaggtaatttgtgacaaaaccaaaggacattttctttccattcatcaatagttgttatcgtaataagttttattatttttctcttaattttgctggctacttttacgaggttattgattttatgaaaaattaggtggctgtaattggcccccatattctaattcgtagtgcatggaccagtttccctttaaaccgatatttacccccttgcccccgttttccttatctcgtgtaacaacttagcttggaatggaatgttgggggaatgatgttggggcatgtataatctatatgatgactcttttcatttg

SEQ ID NO: 128288 - DNA, 905 bp, Glycine max
  Clone ID: PAT_MRT3847_8684C.1
ctcgagccgctttttcgtcgttcacttcagaatcctaaaacaaagtctataaaagggaaaaaaaataaataataaacagcgaagttacgaagattctgtagagaaaaagagcaatggcgtccaacgattccgattcgcagatgaagatcgtacatggcgatgctggttacatacttgaagacgttcctcacttcgccgactatattccaaatcttcctacatatccgaatccgcttcgatccaatcctgcttactcggttgttaagcagtatttcgtgcacatggacgacactgttcctcagaaggttctatgtgtttctacttacgctagtgacctgtttgtgtatttagttctccagttcatcaatctcaaacgcttttgctatgtattcttttgcgtttacccgatctattaagtgtctacgacgactttgctattgaatttctgtattatcgatttgttcgatttgcgggggaacttgaagcacttttttatgatttctgatacttaattgattctcagtgatgggaataataaactgagatcttgtttactgtcctaaaaaatagttgttctgttttttctaaaatttgtttgacccttaaatacatttgaaagtgtttgttctctgaacacatttccgatttctaaatgcttgttccctgaacacttgaatatagcacttgaagaaaacagaagagtataagaaaacatctaccagctgttcctattttttttggattttaaaacaccttctcttttaacaatttacaaaattattcattttgaataaaaaaagttgtttttggaaacaatttacaaaattaatagattttggattaaaaataaaaattaagtgtcgagctgtgtaaatttgtctcacataacagttttgaaaacaaag

SEQ ID NO: 128289 - DNA, 1298 bp, Glycine max
  Clone ID: PAT_MRT3847_86850C.1
tgaaaattcaagaaaacctggaagatttgttgatttagtttatcacgaaaatgcccgtgttcttctccatgatgagaacatatatcgtattgaatgttctcctgcacctacccaattgtcatctattcaactgatggactatggatatgataagcctgaattgactgctgtgtcaatggaccctaatttttcagcctatctgcacaatgacttcctatctgttgtccctgacaaaatggagaagtctggaatttacctgaagaggaataagcgcaagtatgctattagtgatgaatattcaagccagaccttggatggactagaaattatcaatggtctagagtgtaagatagtttgcaattcatctaaggtttcatacgttttaaatactgaataatttttcaacctatctacactatgacttcctgtctgtcatctctgccaaaaaacagaagtcaggaattttcttgaagaggaataaacgtagatatgccagtaatgatgaattttcaagccaggctatggaaggactacaaattattaatggtctggagtgtaagatagcttgcagttcatctaaggtctcatatgttttagataccgaagactttttgtttcggataagaaggaaaagaagagccttgcgtctgaagagttcaggtgctcacgaacaggcacagtcttcaaacatttgttcaagcagagtacaacgattccgcaatttgttttccattacatgaaagtgtccattttgagctgggcatggtatgcaaaattctttatattgataaatatgtttatttgggcttgacgtcatacagatgcacagaacacatactcccatcggagtaacatttgtcaaatgtaaacattggcagaggcgcctgacgaaaacgccatcctatccaagaagttgttgatcaagggatgtttttctgaaattatttttgcacattttctttgagcaacctaataaatcttacagaaaaattagctggtgcggcatggcgaggaggatttggttgtatactgtaatttgatggctaacgatggctaacaatcatgtaaataaatagagttgttgttcgatttaacttttggactatttatttcagcaaatttttctttgagcaacctaataaatcttacggaatgggtggcaggctcggcgtaaagagaagaagattgttgtatactgtaatttaatggctaacgatggctcacaataatgtaaataaatagaggtaatttgtgatgtaactaaaggactctttatttcattcatccatatttttgtt

SEQ ID NO: 128290 - DNA, 517 bp, Glycine max
  Clone ID: PAT_MRT3847_86851C.1
gtttaagcatctcattcgtaggacacggtattgccagcatacaagctcttgaataagcattgtgttccatcattggatttggataaaaataccattggaagatctagttcacgacttaaggacaatgtatcaacgacaaatgtgcacaagaaatatgaggagtttggtattaaatactgtgcagataccatggacacaacagattcacaatcggagacttttaagtcatactgcgcaaaaagtcaagttgtatctttcatatgggctgtttctaggagtatacttccttctgaattattaggtactcctcctactagtagaataatttacggaaatattagaaagtccctacactgatatggatttaagaaattccatgatgccgtccattgtgtcaaacaaaagcttctggtgaagtggatcttctggtatttctcttttctggttgtacctttggtgcaatcaaacttctatgttactgaaagtgagtaagggaaacagaattcaaaattggaat

SEQ ID NO: 128291 - DNA, 293 bp, Glycine max
  Clone ID: PAT_MRT3847_86852C.1
tttttactaaacaacaccaccatttaaatacatactctcaaacaacatcccagagagtgaaccactttaatacagcactatcaaacattataaaacaacatattcacattttaataccatcattaatcatccatcaaactttcaactatttgcatacgcactactcatttttccaacgtacaatctataacaaaaaatatactataatatgctcatacgacgacaatttctcataccctaaaaagtaatttatattattatccaattaccttgtcttttccttaccaatttta

SEQ ID NO: 128292 - DNA, 1024 bp, Glycine max
  Clone ID: PAT_MRT3847_86853C.1
gatctctctaccttctttcaaagtatttgcttttattttttggtgaaaaagtgttttgcttttgctgttgtacaagatgagtgatgagaatggcgaagaacctcgagaaaaccgtccggttccacgcttgaatgaaaggattctttcatctctgtctaggagatcagttgctgctcacccttggcatgatcttgaaattggacctggagcgcctatgattttcaattgtgttgtggagatcactaagggaagcaaggtcaaatacgaacttgacaaaaagactggattaattaaggttgatcggattctgtactcatcagttgtttatcctcataactatggcttcattccaagaactctatgtgaagacaatgatccaattgatgtcttggttctcatgcaggagcctgttcttcccggttgtttcctgcgagccagggccattggattgatgcctatgattgaccagggggagaaggatgataaaattattgcggtatgtgctgatgatccagaatttaagcactatactgacttaacagaacttccacctcatcgcctcatggagatccgccgcttctttgaagattacaagaagaatgagaacaaggaggtagcagttaatgattttctacctgcatccactgctgttgaatccatccagtactcaatggatctttatgcggagtatattttgcataccttgaggcgatagacaagaataatatactaatactattctcctcaaatcagaattagctgcagcattatagatggtttttgaatacattttgatgaaactttatattgtattttgtattgagttggataatatataacagttgtttgttttactaagtgaagaaaaatccataaactgtaatgcttcatgtagaatcccagttgattgatatttattcttatataataatataatttcagttttcaattaatagtttctaatactaagtgaagaaaaatccataaactgtaatgcttcatgattgatatttattcttatata

SEQ ID NO: 128293 - DNA, 1092 bp, Glycine max
  Clone ID: PAT_MRT3847_86854C.1
aaggccagcgccggttccgacatcttccccataataattgattgcacctccactcctatctgttaggactttcttttgatagaaatgaggagacttataagttataatacattattaatttattattgaattaaaccttaaaatcacatatgttatgatacaaataaaattattattattactattcatataaaaaaaactcagatttagggaaatttctgatttccccgccgccgccttactctgcaagaaaaagccctttctgatatataattctccttcattcaaacatcactcacttccaacacaactcattacaaacggagttagttagttatagtttagttcgttactttgaagaatctcaaactttcctttcgaatctcagaagaaaccctagctagctctagctccccttctgtcgtcttctcgcagccgtttaaatcattggtgctccatgtcttctggttgttcaagtatacctcaaaagatttccaaggcctaatcatgcatcgcctggccaaaaccaaagatgtatataagagaatttggatgcaaatatactgtacatagtcaagtcaggctattgtgctgaatattgctccatgtattacagggcttgtatcaatgaagattcagcccgtacacattttatttactatgatacaaaggaaagaattgtggacacgcaaaaatgtgtcagagagtatattgctacattctgccaaaagaaaataattgtttttccattaaaattattatgtaagaacagattgaaagtaataaaatatcctttgaatgcaaacatgcgccggctgcgcgaaatcgaatgtaaataaaagaaattggctgcaaatgtagtacatagtcagattattctgctgattattactccatacactagggggctttcaataatgaagcattgagcagcccctcatacacattttttttctataaaagaatagttggacacgagaaaggtgtcagataactacaccattattctaccagaaaataaatgttatttttctattgaaatttttatataagaacaaattgaaagtaataaatagattattttaagtggcc

SEQ ID NO: 128294 - DNA, 250 bp, Glycine max
  Clone ID: PAT_MRT3847_86855C.1
aaccacattctctctaccaggcgctttttagagaagggactcccaacaaattctgactgccaagatatatggaggaacatcaattctaagaaacattaaaaaacaacatgaaacccacggcctcttttattacagggggtggtaccaccacaactccacctcataaatgacaatctgcctcaataggtggtagctggggggtgcactctggaggtagctcaccctgctggccatcaccctgtggcgctcc

SEQ ID NO: 128295 - DNA, 499 bp, Glycine max
  Clone ID: PAT_MRT3847_86856C.1
ggaggtccgaaaggaccggaccaccaccctaaaggggaaaaaaaatccgggggcaaaaggcagtttatgggcctttccaccccacaaacaagggtttaaatttttagggccccaacctaaaggaaaagaggggggaaaccctgggataccaaaaaccaaaccccaattccaaaccgccaaggaaaatagagcccccctccaaaacccgggggggaaacaaataaattgggttgggaacagcctttaacaaaaccccaaaattcccttcattggaacttttgcccagggggcgctttgaccccaagttaaaaattttgtgggaaaaacaaaaaggaacccgacttggggtggaaccttgggtttaagtggggggaagaaaagtttgttgccccttgaacagtttgggggagcccacctttttgcaaccataagaaaaaccagttgagggcctctttggggttgaaaaacctgggtggcctttctttggggcctgggaacc

SEQ ID NO: 128296 - DNA, 291 bp, Glycine max
  Clone ID: PAT_MRT3847_86857C.1
cccacgcgttctcggactcgtgggcttacatggaattttcatattagaaattgtaatcgtacggcaccgtgatcttttcccacgttcgacaaaaaaaaaaaaaaaaaaaaaaaaaaaaaaaaaaaaaaaaaaaaaaaaaaaaaaaaaaaaaaaaaaaaaaaaaaaaaaaaaaaaaaagggggggggcttttaaaaggaccaaattttacagcccggggtgggaaaaaaaaaaattttttaaaggggccccaaaaaaaaaatcattggcgattttgttacaaatcaacctgg

SEQ ID NO: 128297 - DNA, 435 bp, Glycine max
  Clone ID: PAT_MRT3847_86858C.1
tttagcaatgcaacatccgaatagtgaattagcattttccctcctttctctcaataaaattgccaacacaagacaagacatctttaatcttaaaacgtaagtcgctgataccagaacgtctacatggaaaagaaatgaaaataacctaaatcactttagagccacgatacatgtgatgtggacccaaaggattcccaatattatagtaacatatgcaaagcttgaagtatgtccagcaagtattattttatttgtccataaatttatcgtatatgtcctgtgatttaggcctcatttcagaaagcatatcagtctgaaggaactgagaatctcggaagattcctaaacagccatcttcatttctatcttctggtgaggaacatatcctatgagcttgaaatcagaagccacaaaagaatctatatctttcttctt

SEQ ID NO: 128298 - DNA, 660 bp, Glycine max
  Clone ID: PAT_MRT3847_86859C.1
tacatacatatattattgttattattactgcagaatgccagaatgatcacatcacatacaagttcaccatccctgaattggagtctggagatatgacaagaaacaaggcaaggacaccaaaaagaaagaaaggaaaaaaaagaaacaagagaaaaacatctttggagatgtacgtatttacaaaagcaaattttgcgagcaacaagtcccacaaggaaacaaatgaactccaacgttgtaacaaacaagcacttgaaacggaaaacatgccattagcttctgggaaagcaaaaccagaaccttgaaaccgagaaagaaagaaacgtgctttcgaaacctacagaaaaataaagcactctaatgacacgtgtgggttttctagtgactccttcactgaaacggtgtcgttttcctccacaacacccttagccttagccggaggaactcgccggctaatccctcccggcggcctgagctgactccgaccgccacgcgacggagacctcgactgccggacagtcccctcgccagaatgacggcggacatggtcggactccctcccgcgaagtggccgtgaccttgccggaatttccggctttctcgccggagatttgggcctccggtctctgccgtcgacggcgtaagaacgcttccgctcgt

SEQ ID NO: 128299 - DNA, 909 bp, Glycine max
  unsure (1)..(909): unsure at all n locations
  Clone ID: PAT_MRT3847_8685C.1
gggtacaataattttctattcttgttttatatcaaggggtggtcgacttaaaagtagtacaagcttaattccccccaagtaagatcttgaatttgatctgtatgggaaaaaaaatataggacgagctagtcccaccatactgtgaatgttctgatctcgtataggattttctcccctatggataatacctacagtctaggaaaaaaatgcagagacatttgctacttagctactatcattttgagggaagaatgatatttttaccatatgtacatgaagtttgttttttgcttcaccgcaccccgtgcatatgaacatgcctatttattttttattgcttctccaattttatattgatggtttgtattttcccaagatcagaattgttcttcacaattgagaatttatgttcaaattttgatacccagagaatcaatgagaggcagaacaaggttgtgattactgacagaatgtgggcaagactcctttcttcaaccaanccagcctagctttttgagccctaaagatttagaagaagccaagaaagcagaatctccgacacaattgttggaagagaacaattgcaatgatgttggtgatgccgagaaagaacaacctcccaaagatgaccaagaatcaggaaaccacacagacaatggtatcaagacacaaaattagatttagacttgttcatctacaactgtatttggggacatgttttatctttttgactcaagccctacaacctccaaagcctggagtattgggagctgttctttttgtccttttccatgttttgcaagttggtacgtctttctttataaagacctactaccgtcttgcgtgattgttgtactcagaagattgctgaattttaacctgggtcattaagaatggaacggaattttt

SEQ ID NO: 128300 - DNA, 409 bp, Glycine max
  Clone ID: PAT_MRT3847_86860C.1
ggcatgacagaagactctctctctctcttgctcttatccatcgcattgtaaaagcagcaccatcaccacccccaccttttaccccttctttcataaatatgcgcgtatgcaacaacatgttcaccaccacctacttgtgcttcacattatcctcataatattcttaactcagatgactctaagttcctccctctattcttacggatggagcccatggcacatggtcggaaaggccatggaagacgctgatactgactaaagcgacattgacgaaaattgttaaagagatgatgcccccacacgtgcgtgaggaaagtaaatgcacaggatttatatgaccgattgacgtgacaagtttataaacccgggatcgtgacagtccaatgaatcctggaaaaaacaagaaaga

SEQ ID NO: 128301 - DNA, 821 bp, Glycine max
  Clone ID: PAT_MRT3847_86861C.1
cttgcatgcctgcaggattatgttgatacttgaatttggtgaggtcgtatgttagtattttggctgaatcgaccatggcaaacggttgttgaatatgttcctgtagaaccacattttttttaaaggaagaataaacaaaagcacaagcttcttctctacacagtacgtatcacaacactctttctcttccgtttctgtataggaaaatgacaagtgatgagaaattgttctctcccaaactggagtcactgatcttaataattctggaagcttgtctcgtggaacgtggtccacggtgctgtcacgggactcataagtcgtgcctcaatttttaagttgtagattccatactttgtcttttagtttagttagaaatttcacatcgaatggccattggggaatattctcacccttttatccacttgaaaaaggtgtttgtctttgtccccttattctacttgcaggcttcagttccttcagattgcaaagagtagtcccctcatggctcaggccatgtgttttaagaatctttccacgatttacgtagaaaaattgatccacgaaaagtttagaggaagaggatgatttctcaattcaagacaagaaaaagtctaagaactcaaataatacttgctaaaaaaacttacattgattcataaaactatgaggtatgtgaattaactcatgtgtgattatttaaattcaatcagaagttttatattttgagtccttacattaattgaatcaatgtaagtccttccacttacattggccatctctatcttttgaatatatatcccaatttcaattaatatatcata

SEQ ID NO: 128302 - DNA, 441 bp, Glycine max
  Clone ID: PAT_MRT3847_86862C.1
aacaaaaaaaattgggtatcaaccctttcattaaaagcaaacccggggggggaatagcataatccaaaggaaaccccccgcatagggggcctttaaaaagagcgggccaaggcccaacacaaccctaaaaaaggggccgcctgccctaaaaaaaaaaacgagtttttggtggctcaaaaacttaaccagatttaacaaacttttacgggaaaactaacataaggaaatcgcccaaaccaaaaaccaagggcttatttaacaaaaacccctttctaaaatgcccttaaagaaaggttttaacttaatcttatttccccaaaagagggggggggaactttttggagcccccaaaagtttccttggacactttatcctaaaggggaacactgttttttttggagaaaagctctttgagggccttaaaaaccttttaagcccttg

SEQ ID NO: 128303 - DNA, 344 bp, Glycine max
  Clone ID: PAT_MRT3847_86863C.1
aagggctattatcatatattattgcaaaccagaatcaacatatgtaaaacgaaaccgacgattgttcactacggaatatgattattacatggtactttgtatgacgaagacaagttctggaacaaatttccagcggaattcgggaacccactcccggggcaatagctgatgaaggtaggctatgctgctatctttaatccactctgaatatctaataaagcccccagtgatggggaaggagatgatctttgggacagggtcaccacgattagctgagaccagggtgggcaacaccttcagaaggtggaggctggccttgatcttcccaagtgagctaactgatg

SEQ ID NO: 128304 - DNA, 456 bp, Glycine max
  Clone ID: PAT_MRT3847_86864C.1
gtacaactattctcgtgtgtgttcagtttgaacggtttaggcgaattgttcaccattctagggatctagtcttactaggtctcaaggagagaaagatcatgagcactttgtttgtcgaggaggtacaatgttttggttttcttcatcatcttttttccaagtttttctctgttgtctaaactgaaattatgggttgatgaacttcatgcataacaaatacaagcagcgggtttgtattcgtggaagtcgacctgaggaagaggagatatttcaacttacaatggttcatgtttgatcataatttcttctactacttcatagttcatatcatagtcatacttgtcatgccatttaatatgtgtttgtttgtgtcagattatttgcaaaaaattatgccttttttatttgtttggaaaataattaacaattatatgttgttatcgcaaaatgtgaact

SEQ ID NO: 128305 - DNA, 183 bp, Glycine max
  Clone ID: PAT_MRT3847_86865C.1
tttatgcgtccttaaaccgtgatcacaggttgccgtaccttaaatccggaaacaaatgcaattgatacttgattttaagaatttctcaattatttcctacattctttgtgtacgaattgttaaggagaatgaaaatcacgtctcgtgtgcttggccatatactttcgttgaattattttattt

SEQ ID NO: 128306 - DNA, 447 bp, Glycine max
  Clone ID: PAT_MRT3847_86866C.1
atatttttttttttttttttttttttttttttgttttttttaaattttttttggtgttttacaaaacaatcatcaaaacatggggcccttttatttgcccatgaaaaacacttattaatgggggggggcttttaaaggcttcccctgaaaaagcttgggttacatagggggaataaatacaaatctaattgggagcctagcccccggattgaaatgaaatgttagaagttgaactaatgaacactctgaaatagtacaaatgaagggaggggggatctccctggtaaaaccctttaaaaagaaagaagaatggtcccagccattacttattaaagcgcccatttgggcactggtataagaactggaaactttgtttaaacccaagccacaaaacctgcgcccgtgtgactaacattctaaaaaccttcacacaaaaaatcgacagtt

SEQ ID NO: 128307 - DNA, 625 bp, Glycine max
  Clone ID: PAT_MRT3847_86867C.1
acagatcacagcatcaaataaagaacatattggtggaaaaggctcggaaggagattgttaaaaagcttgatgaatggaaagcttcttctgcatcaaataatttagacaagtcaaagaatactgacacagaaatcagagagaagggcaaagaaagggaaggaaatgttgtaaaacctggtgcacaagttgttgattctgagaccgtcaacaagaagtgtttctctgctgatctagagccagagctgcctggttctctctcaatgaatgttccagacccagatttccatgattttgatggagaccgtactgaaaatgcttttggtgagaaccaggtatgggctgcatatgataatgatgatggcatgccgcgttactattgcttaatccatgatgtaatctcaaagaatcctttgaatatgaggattagctggttgaatgccaaaagcaatgatgaattggccccaatagagtgggtcagttctggctttcccaagaccagcggagatttcagaataggaaagcgtgtatcctatagcactcttaattccttctcccacagggttaagtggacaaaaggttcaagaggggttgtccatatatatccgaagaaaggtgacgtatgggc

SEQ ID NO: 128308 - DNA, 274 bp, Glycine max
  Clone ID: PAT_MRT3847_86868C.1
acaatctctttttgtctttgtaactgctattataacttctccacacaacaataatccacctcttttctctttcaatcatatcaatcctttttacatataccactatcctaaaattttcccacatcataatttcactattatgactatattatcaaagattataatatctctcgtaagacccaaatactaccgaaaatacctgcatgaagtcatcaaagaaaatactttagacattctttttcattaaacacttaccaactttttcattcccact

SEQ ID NO: 128309 - DNA, 702 bp, Glycine max
  Clone ID: PAT_MRT3847_86869C.1
caccaagcttactggatgagtttgttcccaagattactgaaagttttatcacatcaagattcaactctgtgcaggctggattacctgatgatctttctgagaaccccttggacaatgctgaacttcttcaggatcaattagattgcttcccatacctatgtagatttcagtatgaaagcagtagtttattcataataaacataatggagccagtcctgcaaatatacacggaaagagctagattacatgttcctgataacagtgacctcattgtgattgaagataaactagcttggattgttcatatcattgctgcaattcttaagataaaacaatgtactggttgtagtgtggaatcccaggaagagcttgatgctgaactttcagctcgagttttacagtggataaatgtaactgatagtggaatacacagtcagagatatggtgagataagccaacaaagactagatagggcaattattactttctttcagcatttccgaaagtcttatgtaggagatcaggctattcattcttccaagttatacagccggttatctgaacttcttggcctacatgatcatctattactggtgaatgtgatcattggcgagattgtgactaaccttaagtgctacacagagagtgaagaagtcattgaccacgccttgagtttgttttttgagcttgcatctggctaca

SEQ ID NO: 128310 - DNA, 689 bp, Glycine max
  Clone ID: PAT_MRT3847_8686C.1
aaaaaaaaaaccccttttaaggttttttcccccaccctttgggaaaaaaaaaaaaaaccccccggggcaaaggggcccaatacatttttttttcgggggccaattccacgatttcctcccccaaaaaccccaaaaaaaattttttttttttgggaacaaagcccttttggggaatttcccttttcccaaaacgaacgggtatcaaatttgggggggcccccttcccaaaggggggggaaaattttttaaaaaacatttttgggtctaaagcaaacgggttcacaatttccttggtttggggggtccccccaatgcccgggaaaaaaaaaaccccccctgggggggtaaaggggggggggtaaaacatgggggccaacccccggggggttctcccccccaaattaaggggggggggggacccgggtttgggacccctcactttcaaattggtggtaaaatttggggccatgggggggccccctccaaggggtcttttccctagggaggggcagggggccccaccccgtgggggggccccggaaaagacccccacccgggggggatggaaacccttttttttcgaattctttcaaaaaaaaaccccggttcgaaaaaaaaggggccccggtgggttttcccccccgggggggggttttggtcccaagggcgtttttttttttcccgggggg

SEQ ID NO: 128311 - DNA, 446 bp, Glycine max
  Clone ID: PAT_MRT3847_86870C.1
tcggttttcggctcgagcttcgtggggggccatttcttaaacttatattaaatcatctttttggctgagtccactttctattccatccgtagtgtttaaactcacatgtcaaacacacgattattacctttttacgcaatttgcttcctattgtttcatcgaagtcctttcttcattgcgatctgcttgtaacatgactgttctacagttttacatgggtgaattgtgctacatcatcttttatagaaaaatggtttgcttttttgccatactttcttgctatctgctttatggcggttccatatcaaatgactcccctttacatatatatgttgctgagtttacctggatgaatgttcaccttactggaagcctgatcataatacttgataatgtaatggggctcattgtactattaatgagaaccgtgaatccatactactttt

SEQ ID NO: 128312 - DNA, 617 bp, Glycine max
  Clone ID: PAT_MRT3847_86871C.1
aatttttgcagccaatggatcagcatcagcatcagcggctctcttcatgctttgataaactcatggcagatgttgctctaagcatagattctaaaaacagggataagtttactcaaaatctcaccatatttcggcatgaattccgtgccaaataattcaaatttatgcgagtaaatatgagagtttggtgtttgtatattgtctttttggagaatctggtgcactctgttctggtgggtggcaccttggagtcctatcatggaaaaaaaaaaccattttatgcggtttcttcattttggtcttgtaacaaatgtattctttgtaattactgttcatgcagtgtggaagatagctgtatacttttggtggtaccggataactctctttatactcagatttggatgattcaaagttcaaagatgatggaaagatttcgaagatgtaaggaagtgggtgggacaaaaagggtcatggacgagaaaactagtggagggataaaacggtaaccacctgaaatgtagagtgattgggttagatatattctttgtagaaatcatgtatattattatcgccgatatttgtttagaaacatgctagatattatttgatattaaaaa

SEQ ID NO: 128313 - DNA, 135 bp, Glycine max
  Clone ID: PAT_MRT3847_86872C.1
caacggtaccgctcctagaacacgacatacaggtacagctgctatcagacgacacaacgcgtatgctgccagaatacgacatcatggtacagccaccagacgactacaccagggtacagctgcgattatacgaca

SEQ ID NO: 128314 - DNA, 369 bp, Glycine max
  Clone ID: PAT_MRT3847_86873C.1
aagattactgaaagtttcatcacatcaagattcaactctgtgcaggctggattacctgatgatctttctgagaaccccttggacaatgctgaacttcttcaggatcaattagattgcttcccatacctatgtagatttcagtatgaaagcagtagtttattcataataaacataatggagccagtcctgcaaatatacacggaaagagctagattacatgttcctgataacagtgacctcattgtgattgaagataaacttgcttggattgttcatatcattgctgcaattcttaagataaaacaatgtactggttgtagtgtggaatcccaggaagtgcttgatgctgaactttcagctcgagtttta

SEQ ID NO: 128315 - DNA, 2723 bp, Glycine max
  Clone ID: PAT_MRT3847_86874C.1
atggtgcagaagaacaatagaaaaactaaggatgtcataattcagagatggtggagtccttgtaaaatcatgagcttaacagcaaaggattgcatgaagtacacactgccacaaatttggccttcctaccaaagcattcgaactttaggggttcaaattgatgaaactaacctatataggagatatggtgagataagcaaacaaagactagatagggcaattcttactttctttcagcatttccgaaagtcttatgtaggagatcaggctattcattcttccaaggtatgcattggcagatataaacacgccattgtggcctgccatccctttagaaattgtctttggtggttggcaaaaaatctgacatgccattcagccatggtggctccatttaacaacattggttacattgaaacaatacccccccaccccaccccacaccacaataaatttgctagatacccaggcatagccaatgcatacctgtatgcgcagttatacagccggttatctgaacttcttggcctacatgatcatctattactgttgaatgtgatcattggcaagattgtgactaaccttaagtgctacacagagagtgaagaagtcattgaccacgccttgagtttgtttttggagcttgcatctggctacatgaccggaaagctacttctgaagttggatacagtgaaatttattgttgccaatcatacgaaggaacattttccatttttggaagcaaaaagatgcactcgcagcagaacgactttctattacacaattggctggttgatattcatggaagatagccctgtgaaatttaaatcttcaatggatccactccagcagatcatgcaggatcagttgttgaaaaaagctaatctgttcagggacctatttctcgtaacttgttactttcttaattctttatataatttcaagaaagtatttcgaacagatgctgtaaggtatgcacttgttggtttgatgagggaccttagaggaattgcaatggccacaaacagccgtcgaacgtatggatttctatttgattggttgtatcctgcacacatgcctctactcttaaaaggcatctcacattggacagacacccctgaggttaccaccccgttgttaaagttcatggctgagtttgtgctaaataaagctcagcgtttgacatttgactcttcttctccaaatggcatacttctcttccgggaagttagtaaactgattgtcgcttatggatctagagttctgtctcttccaagtgctgctgatatttatacatacaaatacaaaggaatatggatttgtttaacgatactgtcaagagccctttcaggaaattatgtcaactttggtgtgtttgaactatatggtgacagagctctatctgacgctcttgatgctgctctaaagatgacactgtcaattcctatgtctgatatattggcttataggaagggggattcaaacccacaacccattcctccctatctttaccaccaacccaaccttgtatctcttgcaacacagcatgttttctgtcagtttgccaaatacattaagttaacaagggcttattttgccttcttggaagttttgttcaacagccacatcacttttgtattaaacttggacacaaacacctttatgcatatggttggctcccttgaatctggacttaaagggttggatacaagtatctcatcgcagtgtgcatctgctgttgataatttggctgctttctatttcaacaacatcactatgggagaggctccaaatttacctgcatctgtcaatcttgctcgacatattggagagtgtcccaatctgtttccagaaattttgaagaccctatttgagatcatattgtttgaagactgtgggaaccaatggagtctgagtaggccaatgttgagcttgatactcattaatgagcagatattctcagatctgaaagctcaaatcttgtcatcacagccaatggatcagcatcagcggctctcttcatgctttgataaactcatggcagatgttactctaagcatagattcaaaaaacagggataagtttactcaaaatctcaccatatttcggcatgaattccgtgccaaataattcaaatttatgcaagtaaatatgagagtttggtatctgtatattatctttttggagaatctgctgcactcttttcttgtggcaccatgaagtcctatcatagaagaaagaaccactttattcgatttcttcattttggtcttgtaagaaatgtattctttgtaattactgttcatgcagtgtgggagatagctgtatacttttggtggtgccggataactctctttatactcagatttggatgcttcaaagatgatgcaaagaagatttcgaagatgtaaggaagtgggtgggacaaaaaggggcatggacgagaaaactagtggagggataaaacggtaaccacctgaaatgtagagtgattggattagatatattctttttagaactaatgtatattatcgatgatatttgtctagaaacatggctagatattatttgatattttgtataattgatttctttgtacctctagtgaaccagaaaaaagaagtggggggaagaagaaaatgtgtttagatggtgatagaattatagaagagaaatgttcatttttctctcaatctttttaaagtttgaaacatattgaccag

SEQ ID NO: 128316 - DNA, 320 bp, Glycine max
  Clone ID: PAT_MRT3847_86875C.1
aaaagagttggtttatatactgagctatctaaaccagctataacaggttataccaaactaacaagcctgtaaacgcataactaactaatattcgtcctgtgggctaactggtaaatatcgaccaatctcagcttggaaacaaacttctgagaatgtttgggatgtaaactattggtgaagaggtctgcattttggtcagtggtgtgtaagggtagatagaagtcgtatcagtccagccatgcgcttctcgcggacaatattgtcaagctgtaatattatgaacgttgaagatggttggtcaatgggaaaaagataaaaaa

SEQ ID NO: 128317 - DNA, 443 bp, Glycine max
  Clone ID: PAT_MRT3847_86876C.1
acccttgggaaaaatggacattttttttcatatttcataaccaaagccaaatttaaaaggggggctaaaataagggttttttttccccagggaattaaaaaaaaaaaaaacccaattttgtttaaaactttggggcctacccttcccaagggttgggggttggtttttgtgggaaggatttaatccacctccccttcccagaatggtggaggttttcagggggaaaaaaaggcctaaaccccaaaaattctttggaaagggtttatttttggttcccttgggccccgttttgggggggggtggttttggtattggattcccccccaaccccacaaaaggggccctaaaaaaaagccccttcaaagggggaaaaaaaaaacctcttgttttggggaaggagggaaggaaaaccccctttcccaacagggggaacagtttttttc

SEQ ID NO: 128318 - DNA, 1677 bp, Glycine max
  Clone ID: PAT_MRT3847_86877C.1
catagtctagcttctctctctttcttatcacatatgccaaatccaattttgacccgcaatagactttcaatattctaatgctactttacttcatcacttgcatctccttcttcttgtttttaaagtccctccttctcaagcctctcccatcatgggcatctgagatgtggctgtttccccttttgttttctcaagagttttctatgagcacaatctccaagctgttcaggaaccggttttggattggttttctgtgtcaaattcccataggaatgtctctggtgaggaagagtctgacttcaagagtggagaatgttgaggaaagccttgacatgtcagtgttggacttgcctgagttggccttggattgcattcttgagaggcttcccccctcttcgctgtgtcgaatcgccgccgtgtgccggaccttgagggagaggtgtgtgagtgatcacctttgggagaagcacatgaggaagaagtggggtagagttagttggccctgctgcttattagggagagggaaatggcatgcatgttgcttccaaaaggaatgttgggggtcttaagcatggcaggaaagtttgatgagatttatgtctcttcattggcctttcttatcaatggataagaccaaaggttgatgcaattattataataacccagcaggggagctctctgcctgttgactcagtcatgaactggtatcttgctcttgagtctggcaattttttgtcccttcatcacgtctataaccgtgagaatggtcatgttggaatgctatcttgctatgatgctgaacttagctatgatccgcgaactgatacctttcaagccagatatcctccgcaacatggaagaagggcaggtgctagagagtgtggcatcccatgggaaaggctaagagcacctcctattgatacttctccgcatgatcttcatttctccgactgtttaaatgatttgtatccgggtgatcacatagagattcaatggaggagaaacaaagaatttccttatggctggtggtatggtgttgtaggccacttggagtcatgcaatgggagtgaaaattattgccgatgtcatagtagtgacactgtggtgctagagttcaatcattacactcctggctcgcaatggaggcagaccactatcagtaggaaagaccatagggaggaggggaatgaggctgatggattttatggtggaataagaaagattaagagtgaggcggagattaccacttggaaacacctttggccattggaagtcttggaatagtaagcactggcactggatcggatcaaattctctacaacttagcatgatttcaatatagaagctttgtttcagcaactgaagcattgactggttctgcattatacaacctgaagtggactttcagatatttaggccaacccgattttttcctgtcctttgtcacatttttttatgtggttttcctcattgtaaattgctcatttacgcacaaatgtagaatattcattccactatatatagaatctagctgataatcccaaattagtagctttgaactcacatagcaatacagcttctatctcaatcaatgaagatgtagttcaggcattcaatgaatgaaaatgcagttcaggcattatttatctaggatgctcgcgccccttggccgtcgag

SEQ ID NO: 128319 - DNA, 460 bp, Glycine max
  unsure (1)..(460): unsure at all n locations
  Clone ID: PAT_MRT3847_86878C.1
gaaagctgaaaaaacaaaagaagggtagatttggaaactaaaataaattttaattgagtcggaacttctttcgatcggaggattaagcatttctcgctaaaccctctcgtctcgtggtggcgtgcgtggccactctctcacaagcaaagcaatttcttattctgaacgctttaatctgcgattcagaggattacgacccgccccattttttcccacactcttttgctttaacctaacctcagaacttgattctcgcctttcatcaaagcaaaaggatttgaggattgaagactgaatcactgtgaggatgacgctactttagctcctataagtattgattaatagcaagatggcactttgagcaagatttactctctgggagaaaacaagttgtatgcgctatggccactacatccatgactntcacatctntagaagccaagattttgagcaatggaaa

SEQ ID NO: 128320 - DNA, 808 bp, Glycine max
  Clone ID: PAT_MRT3847_86879C.1
tcccatggaagaagggcagatgctagagagtgtggcatcccatgggaaaggctaagagcacctcctattgatacttctccgcatgatcttcatgtctccgactgtttaaatgatttgtatccgggtgatcacatagagattcaatggaggagaaacaaagaatttccttatggttggtggtatggtgttgtaggccacttggagtcatgcaatgggagtgaaaattattgccgatgtcatagtagtgacactgtggtgctagagttcaatcattacactcctggctcacgatggaggctgaccactgtcagtaggaaagatcatagggaggaggggaacgaggctgatggattttatggcggaataagaaagattaccagcgaggctgagattgccacttggaaatgcctttggccatctgaagtcttggattagtaggcactagcactggatctgatcaaattctctacaacttagcatgatttcaatatagaagctttgtttcagaaactgaagcattgactggttctggattatacatggcaatatacaacctgaagtggacttcagttcagatatttaggccaacccgattttcttctcttttttgtcacattttttcatgaaaaaatttatgcatattcatgtggtttccctcattgtaaattgttcatttaagcacaaatgtagaatattcattccactatatatagaacctagctgatgatcaaattagtagctttgaactcacatagcaatacagcttccatctcaatgaatgaaaatgcagttcaggcattatttatct

SEQ ID NO: 128321 - DNA, 1529 bp, Glycine max
  unsure (1)..(1529): unsure at all n locations
  Clone ID: PAT_MRT3847_8687C.1
gattctgtagagaagaagagcaatggcgtccaacgattccgattcgcagatgaagatcgtacatggcgatgctggttacatacttgaagacgttcctcacttcgccgactatattccaaatcttcctgtattttctctctctctctctctctttaagagttcttcgattacatatgcgaactgcattgcattgacgcattcacttgcggatcgtttgtgtactacttttttttttttgcagacatatccgaatccgcttcgatccaatcctgcttactcggttgttaagcagtatttcgtgcacatggacgacactgttcctcccacgcgtccggttcacaaggatagtccaagaggtgtacattttcgacgtgcagggcctcggcaaaaggtatactttaaatcggatgaagtgcatgcatgcattgtcacgtgtggtggactctgccctggcctcaacactgtcataagggaaattgtctgtggtctttcctacatgtatggtgttaacaaaggccttggcatagatggtggttatagaggcttttattccaaaaacaccattactttaacacctaaggtggtcaatgatatccataagcgtgggggtacgattcttgggacatcacgaggggggcatgatactggcaagatagttgacagcatccaggatcgaggaattaatcaggtttaccatgtgtcagctgtattataatgaagtttctgatgatgatgaatgcgggaatcataaattagagttttgttatatccatgtacttaaaacctaagtaggttattgtcatcgcatgggttttcattgcttgggttatggttacaggtttatattattggaggagatggaacacagcggctcgagactgttgcttttgaggatctggatctttttcttttctttctcagttatgatgaatactatgactgcaggttttattgcaatgtatgccactcttgctagcagagacgtggactgttgcttgattccagagtcgcccttctaccttgaaggaaagggtggactttttgaatttattcagaaaaggctgaaagaaaatggacatatggtcatagtcatagctgagggagcaggacaagatcttcttacagaaagcatgcaagccatggatcagaaggatgcttctggaaacaaactacttcaagatgttggtttatggatatctcataagatcaaggatcactttgcaaggaaggagaagattcccatcaatcttaaatatatatgggcagattctcttacagcattctcttcctttttgacccatttatttcttgggctttcatttttatttcggatttcaaaggttttttaaaatttgacaattatctaattttaaccaagttatctacatcgtgggataaggctttgnttgttgntgtatctgccagatccaacttacatgatccgggcaatccaaagcaatgcatcagataatgtctactgtacacttcttgctcagagtgcagtccatggtgcaatggcagggtatact

SEQ ID NO: 128322 - DNA, 261 bp, Glycine max
  Clone ID: PAT_MRT3847_86880C.1
cggctcgagtacggctgcgagaagacgacagaaggggattcacaacttcaatccctcttttgctttaccaaattccattttccaattcaaaaccctaactccgttcgaagcaccaaatcgtgatggcaccaaaggcagagaagaagccagcaggaagaagcctgtggaggagaagaaatcgacggtgggagacaaagctccggcggataagaagccaagggcggaaaagagccttccgaagagggaagcggcggcggagaa

SEQ ID NO: 128323 - DNA, 321 bp, Glycine max
  Clone ID: PAT_MRT3847_86881C.1
ggcactgcatgtgcagcaatcacctctgcccacttcatattacttttgcactgtctcaacctgctcttggaaccactcatatcatcacacagcgcctgctcaccctttgacatatatatacacatgtatacatatttttttcgtgctctggcaaggggccaagtgttctattgagttaaagaattcaacacctgcaggcgatggataccctcatgccacccacaatgagcagcaggcctgcaccttgcagccgatcctggtcaattagcgaggactcactaagaaggtatgtggcagttgggagtgaaagctgcatacagg

SEQ ID NO: 128324 - DNA, 122 bp, Glycine max
  Clone ID: PAT_MRT3847_86882C.1
gagccacattctgtcactggtggactcaagacgtgtctatcataggacagttagaattatagcttgcagaacgggttcactagcgaacattgcactggactcaacctcttctgactctcact

SEQ ID NO: 128325 - DNA, 279 bp, Glycine max
  Clone ID: PAT_MRT3847_86883C.1
attaccttacaatcatgccttaccccggagaaaaggttaggccttccttaaaactggttaaaaccatttaaaaaccaaggcttttgcccaaattattccggtttaccaaaaagaaaaagggttggcctttattaccaaaaggcctaacctcattttttccttttttgggcccttttaccacgtccaaaaaagcaattcccttccactttggtcacccccgtaatttttcttgccccatgaccctgatgcaccatctgctgtttctttccaactagatgc

SEQ ID NO: 128326 - DNA, 560 bp, Glycine max
  Clone ID: PAT_MRT3847_86884C.1
cttttttttttttttttttttttttttttttttttgggaatttcatgctgcctttggattttatcctcataaaaaaacattttccggggagatagctggggatacttgaaactgggatcattaatattccacaaatgggcacccgggacaataacatttgatccgagggactcaacttcaatccaataccaagggggggggcctaaaatgaatgagctcaccaccctatcttaactgaatcctctcttggtagttgggcgattatcttggcaatctcttttcttctttggtggctggcacactggcagtccaagcctctgttcttcagtgagcaatgttgcaaaactcaagcattgttcaagaatgaaagaggattaaaagatcataacttgaggatgtaacatggattgtaagatcctttctataatgcaaatgagcccaaacattaagggcccatttgttagagcccttttcaaataaaagtgcctttaaaactaaaaggtctgcttaaaaatttttataataataatgggagtttccagaagctaaagtagcttctg

SEQ ID NO: 128327 - DNA, 433 bp, Glycine max
  Clone ID: PAT_MRT3847_86885C.1
aacaaaaaaccttggggaactttattggcaaaataaaaaaccaaatctttaggaaattccacaagggggccactcaatcacattggttgtttataaaagggggggacctttaaatcttggacctttaatggaaaactcacgggcgcaccccaaacaaaaagcatgttgggccaaagttaattgatcccattaacaaaaatacaaactgaacaagcagtaaaagactcaatccccctccttaaagcaagcatcctttcggccataaattgaatggcctaggaaaatcaataaagaatcctcatttggggtataaaaagaaagcccattttccctgggggggtggcgtctccaaatatataggatatgttgcttaaggctttcataagggttgtgaataaactacaatggggggcactaaccagctggatagggg

SEQ ID NO: 128328 - DNA, 796 bp, Glycine max
  Clone ID: PAT_MRT3847_86886C.1
taaaaaaaaaaacactgtaatttgtaacagaaggtggcgtctaccagctacactcgctactcaatcgtctcacacactcaatctttgctttcttgtccaacaatgtcaaacactgaagaagaagaagaagcaactccttcgaaccctaacaatcacagtcaacactccaccaacaacgatgtggaacctcgtgacgacgaagacatcgaagaagacgacgacgacgtcgttcaggaaccgaatcgcggaattccccaatccgcagcgtccaagttgcgggagcagcgtttcaaggtggaaagcctatcgcggcgcttgtcgtcggagctggttccgatccgagtccacgacgttgtcataaacggcaacacgaagacgaaggattgggtgattgaagcggagctgaaagacatcgagaacgccaccagcatgcaggagcttatgcaagcctcgcaaatcgccgttgccaggcttcagggcctcgaaatcttcgattcctgcaaggttcgcctcgaggctggaccccgagagctccaaaacactgggtctgtcatcgtcggattcctgcatggttcgcctcgaggctggaccacgagcgctgtctaacactgccaatggtcatcgtcgacgtcgtcgaaaccgataccaaagtttccggcgaattcggcatttataccaaacccggatgcttctttggcctatggtgccaaccaagcaaaccgaggtgagtgtaggggtgtatgcccctcgagttaaaggatttttgactcctattgtaacacgaatatccatgctt

SEQ ID NO: 128329 - DNA, 314 bp, Glycine max
  Clone ID: PAT_MRT3847_86887C.1
ttcgtttcacgcgtgcgtccacgcgaccgatcctggcgggtttctgatgtttgacaacatggcaagctgcctctattctaaggcgactgggggagatatcccacaggcagcttgggaccttttttgctgtgacacttgtaaacctttgccacatattttgaatgaggaacgggtttctggcgaatcgaattctggtactggccagtattatgctccgagggctcgaaccaatggttgggttggtagactgccaatctacattggtgctggaaatcttgtcgcttatgacgaggtcagcattgcccaggttgcgt

SEQ ID NO: 128330 - DNA, 148 bp, Glycine max
  Clone ID: PAT_MRT3847_86888C.1
ggaagccctacaacggcctaccgcctacttaacaaactaagcaatattattatatcgctctttatttctcgccccaagccgactgccctaatcgaggcgaggttactgttcaactctgacaccggcggcatagagatccactgtataa

SEQ ID NO: 128331 - DNA, 325 bp, Glycine max
  Clone ID: PAT_MRT3847_86889C.1
cggatgcgacctgggcataggttgacatggatacaatgctggggaatacccttaattgcctgggacatgcagcaaataaagaagattgtggcgggtattggagaaatggttgaggttgatgacaatgtagagggacagtggaagatggacatggcaaggatcttacttaaaacaccatggaaaccactcatccaacataccgttagggtgaacatccagggggagatatttcaggtgcatataacggaggaaggcggaacatcaccacatgtgtgcatgtgtcggcgcgagatggagtacaactcatcggacgagattcaatcag

SEQ ID NO: 128332 - DNA, 548 bp, Glycine max
  Clone ID: PAT_MRT3847_8688C.1
tctagctatctcgatcgaactgtccaaggtcctgtcaccactaaacgaagtctaaaagtgagccgggcggtcggtctgtcggtctaataagcctctgcaccgacaggtgataatcacgagtaaccccgaacacccggcacgtcaccagtttgcacatatcgccaacgttgagcgtgcagtttgcacgtgatagtaaccaaacatcaggtacacaccgtgggccataagggattagcattaacggataggcgaaattacgggttttggatgtttagtggttagcgtgcatgatccatcctagcgagttggtgttgatatgtcgcatgtgtttttatcagtcatcgctattgttgttacctttcccattatgtgtagtactagtatgcaggttagttattggtacgagttgccggcaaggccaacgccagccatgcgtggcagtgggcggggaaaagtgcaaaaagtaacgtacaaacagatgcggtactggtgcccgagtgtagtagggccagcagaaaagaacgcgtgagggcagataagggtgcaag

SEQ ID NO: 128333 - DNA, 652 bp, Glycine max
  Clone ID: PAT_MRT3847_86890C.1
gcgagaaggaggctgaagaaaagttgcaagaaattcaggtagctgctgggtcagctaatgctgacaaatatgaaccgaaagctgtctggaaagaaatattgtgccctactcctcctgttagaagaatgcttataactggttgtggaattcagtgtttccagcagattacaggcatagatacaactgtatattatagccccacaatttttaagaatgctgggatcactggtaactctgagcttcttgcagcaacagttgctgttgggttcaccaaaactctgttcatcttgatagccatatttcttattgacaaattggggagaaagcctttgctttacgcgagcacaattgggatgacagtatgtttatttagcctgagcttgtctctagcttttctgagtcatgcaaaagttggaatcgcattagcaattcttgcagtgtgtggaaatgtagcttcattctcagtgggacttggccccatatgctgggttttgtcatctgagatatttcctttgagactaagagctcaagcatcatcccttggagcagtgggaagtagggtcagtagtggtgcaatctccatgtcgattctctcagtctctcgcgcaatcaccgtagcaggaacattctctgtttttggcattgcttcatg

SEQ ID NO: 128334 - DNA, 605 bp, Glycine max
  Clone ID: PAT_MRT3847_86891C.1
cagatgaaaaattcaagcacgggatatttgagatgtcataataatcatttattttggttatacatgaactaactgcctgcttctaattcctgtctgtatagaccttcgaaacatttgaagttttttacaattcttaatttctatatgactgagagagttaaagtaaaaaggtaatcattcaagaattctctcccaccttcacatcaaagccatgtaaaatatattaatgtacatttggctgaatcctctgaacactagggtctagggattagatggtgttccattgtaactttggggtagattaatcaatggcgaatggcaacatatgtacattatattacctgacaagtctactgctccattctataaatgtaaatagattttgctccatgctgcaatcaaccattttttttcctgctgatgaattgtcaagccatccgagcaacaaggcactagttaatgtatctaaaatatctctgaaaacattcatcgtccttgcaacttttgtatataactttgtacacttcaattaaaagtcttggaaatcgacttgcaaagtagtcattgaatccttccggaacaggtcctatcagttcctgaatttc

SEQ ID NO: 128335 - DNA, 298 bp, Glycine max
  Clone ID: PAT_MRT3847_86892C.1
ctcgagccgctgcttgtgaatcatatctggctgcagaagcaggacacgatgctttataaatatcattgcttgatgaacatagcgattgactgtttcaggttgcagaagatctatatcaaccatgttcccgtggagaaattatccgctggccttcagactgtctaaggaagggctataaatagattcgtcctgatgttggtttctaacagtttcatttcgatgatccacataaatactatatctacttttatttagggtgcttctaatcacattgccttacacattggcattccttaag

SEQ ID NO: 128336 - DNA, 432 bp, Glycine max
  Clone ID: PAT_MRT3847_86893C.1
cccacgcgtccgtagatgctagagatccttcaatatgttttaaatcattgtctgaaagatacaagtattgaaggccctttaactcccctaaccaggatggaacagaatcaaaattgttttttgaaaggtcgagggaaactaaggaagtcagattctctaaagcagatggaagtgagccataaagagcattactatcgagaaatagatggacaaggttagtacaagttcccaaccaaaatggagtggaattcaagttgttggaagaaaggtcaatctctgcaatggaattcatattttgaaaagcatccagaaatggagcttgaatttcattttctgctagattgaggacttccaatctggaaaggtttgtggctctaacaagttgatgagtgtgtaacttgttgagtccacaattcatcaattctatttcta

SEQ ID NO: 128337 - DNA, 463 bp, Glycine max
  Clone ID: PAT_MRT3847_86894C.1
ctcgagccgctggagataggtagttgtcctttactagaagcaaggtatcaaagtcggaaagggaaacactggtctaagattgctcacattcctgctatcaagataaatggtaaagtgataatatgaccctgtggcatgagtaggaaccatccagaagatggttgctgaggtcccgggtgtgcaatatttgctgaccatttcagtcaagttgtcacttttgtttcttcaccagtggatggtttctattgaatcatctgaacccaacactagaaatttcctctataacatttgtacttggtacaaattaacctgttgtctattgatgttttttttttaatgtttttgataagcaaaagatattttattgttgtggtttgttgatgttgatgttctattagctggatgatgattgatatttgatacctattttttctttgtattaaattttaagttaaccctgttc

SEQ ID NO: 128338 - DNA, 366 bp, Glycine max
  Clone ID: PAT_MRT3847_86895C.1
accttaaagcaaacatgcttccatgtctgtttctaccaatggcttcaccacatcagcgggattttgtaccaggagaacaacatcaacctctcttccttccaaacccacatcctggaatatgattgctatgaaacaatcttcttctccggggcacttgggcttatccttaaacaatccacgttgaacacttcacctgtcttgtgggttcacatcaccacatgctttccatgagatcatcaactcatgggggctaagcttttctcaagggtgtgtgggaaagtatgcactctgatgacttgaacaaaaatcagaccgttaacgccatattgaaccttgttcactctgctaagaacaactcattatgct

SEQ ID NO: 128339 - DNA, 672 bp, Glycine max
  Clone ID: PAT_MRT3847_86896C.1
attataatttgtgaggggtaagaaaatcagagaagttaaaatatggtttctgtccttccgaagaggataatactgatgcggcatggggagtcacaggggaacctaaatacagcggcttacactaccacacccgatcacagcattcagttaacggcgcagggcatgacccaggcccgccacgccggcgagcagctccgccgcgtgatgggcggcgatgggtgttctcctgactggcgggtacaattctatgtgtctccctacggacgcacccgatcaacgctccgcgagctcggacggcatttttcgagaaagaggataatcggcgtgagggaagagtcgcgggttcgagaacaggacttcggaaactttcaggtggaagagaggatgaaggtgataaaggaaacacgtgaacgttttggaaggttcttctatcgctttcccgagggagagtccgccgctgacgttttcgatcgcgtttcaagtttctttgaatctctgtggagggacatagacatgaacaggcttcgtcatgatccttccaatgatctgaatttcgtaattgtttctcacggtctgacatcgcgtattttccttatgaagtggttcaagtggacggttgagcagtttgagcacctaaaacaatttggcactgcgagttccgcgttatgcagc

SEQ ID NO: 128340 - DNA, 290 bp, Glycine max
  Clone ID: PAT_MRT3847_86897C.1
cttccatggctctctcatccccatccttggaatttaaggccgaggagctgggcccatcagccccagaagtgggaagggtgagcatgaggaagaccgtcaccaagcaggtctcctcaagaagcccatggtacggcccataccgagtcaagtacttgggcccattctctggcgagccgccgtcctacctaaccggtgagttcctcatcgacgacggctggcacactgctgggctgtccggatacccagaaaccgtcgctaaaaccgcgaacctcgagagagccagtccacgc

SEQ ID NO: 128341 - DNA, 118 bp, Glycine max
  Clone ID: PAT_MRT3847_86898C.1
gtaacctgtgatgcaccggtgcctaatatagaagagccgttttcattactttatcacattgcatattctattaaaatgcccaatattccttgttttctatccaaataatcaaacgatt

SEQ ID NO: 128342 - DNA, 996 bp, Glycine max
  unsure (1)..(996): unsure at all n locations
  Clone ID: PAT_MRT3847_86899C.1
tgaaatttataaaaaaaaaaaaaaaaaacacattttctgtcataaatcatttcaatttaatccggttcaatccttgcaatttttgggtcaatttagctgttgcaactgatactctaacagtgttttattctatgcatctctttaccaaattgcccctgctcaaagttgaaattctatagtcactttttaatttttttttggttctgggtgtttttcttatctgtgttttgtttcaattgcgcgagggggtttttctagggtttggaggctatgccgaaagcgggttgaataagctcaggaatttgagattttgtgggtggtacttgacatggattgaggaatgaagcgactttgtcatgttatttggttggcgattgtgttgttgctaggaaattttcgaaaatgtgtttctcagttgccccaagtcctgattagtctttccccccaagtgtttggatatgttctatgttgtggagtatcggtgttagtcgaggctgggcacttcatggacgatttaagggatctgggacagtttgaactcctaggtgaagaaaatgattctcacaaagcagtaccgatgcatacactcagctagctgtcaatgtactaaagggcatttaagtgaagatgtgatattcttagtatttcataatttgaattggaatcccaagctaattgctactctatcatgtgtgtgcaaatggtttgatgatcttgccaagcgagttctatggaaagagttttgtagaacaagagctcccaaaatgttgtgtgatctgcaatctaatgggagccacattgttgatgggaactggagggccctagggaagcttcttatatactgttcaggatgcacanaaggtggcttgttcaatagcattcagattcctggtcactttgtttatcagacacgattttctagaacatcaggaaagagctttcttttgccacaatgcangactgatgttttgtatgtatgtgatccttgtgagcatc

SEQ ID NO: 128343 - DNA, 187 bp, Glycine max
  Clone ID: PAT_MRT3847_8689C.1
tggggcgacccacacctccgaagcgaaaagaacaaacaaagggggggggggaaccagaaaaacccccatcccgaaccttaacctaaaatcttcgccctttccttttgatcaaggttccttctttcccagagaactaaaccatttcccgaacagtttccaaatccaaaaaatttcccaaactccttta

SEQ ID NO: 128344 - DNA, 1466 bp, Glycine max
  Clone ID: PAT_MRT3847_868C.1
gagtgttgctcctttgtactctccatcatccctcttgcatagcattgcactgtttcccttttctcttctcacatcgtcattcacacaccctcttctcttcgatctcatcgccctcacaaacccttatatttacaccggcccactttcctatttgcaccatttcgttcagatcatagcgccgttcgagatcagaaaccggaaaaaataggtttttgattcgtggggttggttccaaatggcgtcattcacgatcccttgccccaagtgcgttgttgttccttttgctcatttgggactgaactctcagacccagcaacggaacgcgctggggttgaagaaatcgctctcatttggatctttgagtagtgattcggcgccaaatgggattcagtgccttaacaagaagcaatcttctgtctggaagcttcaagcacaaccaaaagaggctgttactgttgaaaattctgcacctgtacaggtcaatggacctaaaattgctccaccagaagagaaggatgaccataatggaaaaccctctggtcctagcacttctgctgatgcatcttcaatttctgcatttatgaaccaagtttcagatcttgttaaacttgtggactctaaagatattatggagctgcaactcaagcaagcaaactgtgaactcgtgataagaaagaaggaagctttgctgcctccaccagctacatttgtagctccagtgtcacaaccatttccatatcccacaaattctcttccagcagcaccacctccagttgctacttccactcctgcaagttctccatcttcaaaagcagctcctgccttacctcctgcaaaagcaagcaaatcatctcatccggcactgaaatgtccaatggcaggaaccttttatcgaagtccagcacctggcgaacctccatttgtcaaggtgggagataaagtgcagaaggggcaggtcatttgcattattgaggctatgaaactaatgaatgaaattgaagctgatcaatctggaacagtagctgaggttgtagcagaggatgggaaaccagtcagtgtagacacgcctctttttgtaattgtaccatgaagtatgagaaagaccttactttggctttgatggaaatctcccttgttggataacatgctacaagattagtacaaaggcacaagtttttcattatttgaatttcttatgagacaatgtttgtcccattttaggaagtctttttttctttttaaagacttataagacataaaagcatagcatatcagaaggaatattggtatttgtagttctaaacagttttgggattagtagtgtaaaagttttatgcatttggtttctcaaggatgaacccgctggttggttttacaagaatttgttatgacaggtttatatgcggtgaaggatggattataattaaaataaaatttaattactcatttgattcttatatctggct

SEQ ID NO: 128345 - DNA, 294 bp, Glycine max
  unsure (1)..(294): unsure at all n locations
  Clone ID: PAT_MRT3847_86900C.1
gccggaancggctcgagctcggccgaacggncggggagagaagagagaacagncagagaaggccaacagggggcggcaccaagagcngangggagaccggaaccacnggggccagacacaagggccagaaccnanagaagagnacaggcgncagcaanngcgcancaggggaggaaaaacaaagacaccgaacacagaaaggggaagcgcggnagncnnccaaaagaacggcccaggcagggaananaanccacaaggggaaanccagcagaagagagacancaaaannggaag

SEQ ID NO: 128346 - DNA, 767 bp, Glycine max
  Clone ID: PAT_MRT3847_86901C.1
ctagctccaataaacttctctattctacatttcaaccggtgaattaagctccttctatttcaaagtgctgaaggagaacacttaatttctctccgtttcttcattttcttagaggggatataattaattaccaatggctctctcacacagaaggatcctcttcacggtttttcagattcttttgttcaccctcatcatttttgttgcttctccggaatctggggtagcttgcaggccattgttcttgcattatcaatggtcatgggattatgggcttctcatgcaatcacttccaaacgcaccggcgccaccgtcaacgggagatccaactcatccttgagcccgtttgaaatggaccaacggatattcacatatatattatagctaaggaaattaatatatagaagctgtcaacgaaatacgtaccaaccttaattgtccatacgtgatatgtgtgattcgagcaatgacattctcgttgcacatgtttgacgaggttgtagattatttccattcttaatagtatatttttttagcgtggtttgcatgttttcacatgcaaatgcttttcaaatatactatactttttttgctgaatttttcaaatatatactagttccttgtattcttgtattcacattcaattgtaacaatctcacaaaatatatttacttatctgaaaaacatgtaatatattcttttaggtcaattgttattgtatgttaacctttggtaataaataaataaaaaataacgcattcaaatta

SEQ ID NO: 128347 - DNA, 427 bp, Glycine max
  Clone ID: PAT_MRT3847_86902C.1
aaaaacccatgggcccaaaaacaattggggaaaggcatatccaaacacaggcgggggaaaaaacgggcccaccccccacaaaagcccccataagccttagccggaacaaaaaaacaacccgattggggttttttattcctttaaaggggttaagcaagccccccatgaccccttattttgaaccccccaaaagcccaaataaacggggaaaaacaattccttaaacaagaacttttcatccgaacggggcctgggatctacctaggggtcacccccaagccccacccgcaaaagggcaaatggaaatactttgggggcaaacggggttttggggggtttgttattccacacagccaacaatcccagggacgggaaaaaactcaatcccccacacaggcaggccaagggtttatacttttcgacaggg

SEQ ID NO: 128348 - DNA, 631 bp, Glycine max
  Clone ID: PAT_MRT3847_86903C.1
tactcaaatactataatacaaatcagattttacacacacatacacactgcctatctataatttctagaaagttctggagacatttgggaaatgaaatgaaatagatgaacaactactgtgattttctaattattttcctgttcttcagctcctttatgaagcttagacaagtactgcatgtgaaattttaaatacccctttcttcatatatgtcctgcactaccccagcagcaacttcagatatttctgcagcacattcaataactttagcaatgtctgatctgatgacttgaaaacatgaaacacagtggcatatatatttcttctagctgcctcacagttccatagcagatcgcagaagtagaagatgcacacttgagagaagtggaaattgggttggcaaagaggaggggtaaggaaataaggcatagtttcattgttttctttactttaacagctggctatttatcaaaaaccttgcttcttgatgaaggcatagaacaaagaaattttactaaatgcattcccattcattgccataaatctagtgaaccactgctgaaaatcttccatacactgtcttgcaaaggggtaacaactaggccactcagggaacaatgaaaccactcgt

SEQ ID NO: 128349 - DNA, 943 bp, Glycine max
  unsure (1)..(943): unsure at all n locations
  Clone ID: PAT_MRT3847_86904C.1
cccacgcgtccgcccacgcgtccgcccacgcgtccgggagcagcgtagaggaagagtgcgaaagaaagatcgttctcgatgacagaggggaacggtgacaaaactctgcgaaagatcgcagacgcattcaatgaccttgcaaacgttttcaccgattctcagagcgcagaagcagaggtcaaggttgctcccttctctcatgcctgctctctcgtctcccctctcttcggttgcttgggcgtcgccttcaagttcgccgaaatggattacgtcgccaaggttcatgatctggcagaggcgtccaagtctattcagaatctgcagtctctgattgagctggatgtgcaagctaacactgttaggaaaggaggtagccatacgcggaatctgctcagagtgaagcgcggacttgacatggtcagagtgctctttgagcagattctagttacagagggtaattcccttagggatccagcttccaaagcttacgaacaggtgtttgcacctcaccatggctgggcgatcaggaaggctgtttctgcgggaatgtatgcccttcctacaaaggaacagcttctgaagaaactcaatgaggatgaggcatcggcaaaagaccacatgcaaagttatgtcactgcttccgcacctctaatccaatacattgacaaactctttgtttctagagacttgggaatagattggtgaaaccttgggttgtatttcagattgtacaatgtaatttgctattattaaatttatatgacataattgatgcatttataattaagaagtattcatttgttatagaatttgcttatattgcaatagatgttagtgctaatttacaggctattgagatgctatgtgcaatgtgttactgaatggtaatgatgggttaagagtaaaaaaaaaaaaaaaaaaaanccgagactagttctctctc

SEQ ID NO: 128350 - DNA, 274 bp, Glycine max
  Clone ID: PAT_MRT3847_86905C.1
gtgtttttttggctcctcaatttaagttagttgttcaaaaattggcccagcatgaatgcccaactgacaaggggttattcttcgtaccttccaaaaattttgtatttttttttttttacaaaaattcctttcatgactaatttctgttgtgtatttgatacatggatactaatttctatttcggtgaaaggtatttttcatacaaaaagattacaaaattatgagaactaactcatggtgtttttaaaagatgcgttgtcagtattttttaaag

SEQ ID NO: 128351 - DNA, 1056 bp, Glycine max
  Clone ID: PAT_MRT3847_86906C.1
attcccttaggaatccagcttccaaagcttacgaacaggtgtttgcacctcaccatggttgggcaatcaggaaggctgtttccgtgggaatgtatgtccttcctacaaaggaacagcttctgaagaaacttaatgaggatggtaagtgcaggattaagtttgcttgaactttttattgaactttaagtcctgaaaaaagattacttgaaagtctagttggttctagagcttgagcaggggtggcagacagggagagagatgatatatgtgaaacctatttatgatgaatgtggaatggttaatactttatcattttttccttacttttctaagttagcagttgcatctctggtttaaccttgaagtttggggcatagtaatcttaatctgctacccatatttgaatctatgtccttaacagctcgtagaagcataaaacactaaaacccacatgatatgaaattccttgtctgtgtgtcctttgcacactgttcaaatagagagagaaaatcaaatctattatgtttaatcatattgtttcttgctattattctttttaccatttttctcaaaggtaaaccaagacagtgtagaagaataggaaaagggaaagttattgtaagagattattttattcaaacttgtatcgtaaattgaagttcatgtgattatgatgttcatttttcttatcttttttatttgttgttggcatctttgcttcagaggcgtccgcaaaaggccacatgcaaagttatgtcactgcttccgcgcctctaatccaatacattgacaaactctttgtttctagggacttgggaatagattggtgaaccttggattgtggagtatttcagattgtacaatataatttgctattattaaattatatgacataattaatgtatttatgattactaagtattcatttgtttatattgcaatagatgtcagtgctaatttacaggctattgagatgctacgtgcaatgtgttactgaatggtaatgatgggttaagacttaagagtaagattttcttgcagtctttggaggattaa

SEQ ID NO: 128352 - DNA, 423 bp, Glycine max
  Clone ID: PAT_MRT3847_86907C.1
ttggggggggggggggggggggggggggggggggggggggggggggggggggggggggggggggggggggggggggggggggggggggggggggacccgaaaaattcacaaaaaattgggggggggggaaatttcgggattagagcaaaccccttttaattgggagggggttttttggttccaacccaaaaattggaaaaagtggggttcccattgggaggggccggttaaaggttgaaagccggggccaaaaagggaaaacccctaaagggcagaccaaaaaccccccttttttccaaaaccaagggggggaaaattgaaaacccttttgggggccatagtttggttaaatttttaccggggggccttttttaaaaaacccttggactttaaggttccctgggttggttttccttggccaaa

SEQ ID NO: 128353 - DNA, 442 bp, Glycine max
  Clone ID: PAT_MRT3847_86908C.1
aaacaaaacctccccttttatctcccaagaatgcttgctattgatatagttaaaatacagtattatactcccacgttcacatgcacaaattattttataggggtaaggtgtctgccacacctcaaattaacatgatattggcagaacattctgcgagtccgaagacagagagcgacgtctaaaacaacatgttcagccttggacatccgagtactaagctcccatttcatccttctgaaaggaccacatgttttgagcccacactgttttcacccgtaggagagatggtggataggctagcaccgcctgcaagggaccgaaaaagtgcgcgagcaaacaccttgaaaggaaacggagctgttgtatagacccgtggaaacgaaagaggtgtaactgttgggggcaaagatgatggtggaactgcgaagggatgaatgtcggg

SEQ ID NO: 128354 - DNA, 206 bp, Glycine max
  Clone ID: PAT_MRT3847_86909C.1
ctcacattgtcatcctctattgtcttgtgagggtgggggttgaaaaaggtccagatgcaaaagctcgagttcctctacccacttattaaggtcatacagggggacaaacccccaatcaattcatttaatgggccaaaaaacttgtgaaatctatttcaacccaaggtgttgtggaatctaacaaaaatgctccacacaaaaaggtg

SEQ ID NO: 128355 - DNA, 646 bp, Glycine max
  unsure (1)..(646): unsure at all n locations
  Clone ID: PAT_MRT3847_8690C.1
ggaaaaataatattctcccacttgcttgttagaaaaaaaaattactgatttatttgttctttctattggaaagacaattaaggatgatacactggaaaggaacaaggaatttaggtcataaagagaaatgtcagactgtatttgtttactttcattaggtttaaataattatagtagctcagaacatgccctccacgatgaagcttcacttcccctttcccttatccaagagaacacatattgaataattatggtacaaggtgttcctagtacaagaaaactagattagaaagtaaaaacatgtccaccctggccacaattcaagcatagagcacttgacaagtacaaggtgagaattcgcggaaagcagacggcgcctccacaacctcccacgtcacactaacctcaaaatcacctttcccttggattctatcactcttcatctttccaattgcaacgtttaaattgtacgatgccacgtagattctgttgtccaaacccgtcgccaaaaacggactctttataacgtccctcggaaagctccctcctttcacgtagcgccacgtgtcctgctcctcgtcgtacaccctaaccggcgcgtccccgtattccgctatcacgaaaacccttncccccaccgncacac

SEQ ID NO: 128356 - DNA, 445 bp, Glycine max
  Clone ID: PAT_MRT3847_86910C.1
cccggacatcttaaagataataggatttgaaactattcagccacacccccgctccatgaactaataggtacaaaataacaacattgaaacttgaattaaggtaaaaaaaatgtataacaattaatgctgtcaactgggtccacccgaattaaaaaaaaaaaaaaaaacctcacaactcaaaagctacacatccataattaacaactgaaaaatattttgaaaaaggaaaaaaaaacccttggattgaaacaagccttattcagcagaagcgcctttacataaatgttggattaacaaaaggggggggggaataaaaagctggaattaatcacaaatattacactgtaccacattttacattttagaaagaaagaaggtttttttttttttatagcacacacctgtggtcaaaactgactagagaaaattctgacctgaatcatca

SEQ ID NO: 128357 - DNA, 876 bp, Glycine max
  unsure (1)..(876): unsure at all n locations
  Clone ID: PAT_MRT3847_86911C.1
aaacatgctatcgacttcttgcttagcatcacagatgaaggtgtctccagaaactacaacgaggaacgttctgaatggtcatcttatgtgccaagccttttctcggctttgcaggctgtaaaaatggttatcatgtatgccccagagccagaacttcgaaaaaaatcctttactgtgctgaaaggagtacttgctgatattccaaattctcaaagatttgacattatgaaagcattgattacaaataccgactcttcctcgatgatcgccattttcatcgatcttgtcaggaaggaaatgcatacagcaatctgcagtagtagatcaatagtaaaagatgccccacagatagataacaaagcatttccggatacctccttttggaatcccgggatccttgagttggtggagttggttctaagacctccacagggcggacctccttcccttcctgagcagagtgatgcggtgttgtcagccctcaacctatacagatttgtattgatgacagaatctgcagaaaagacaaacatcactggagtgctgtcaaggaacaatttactgaaggcctacaatgaatggttgcttcctttgcgtaccttggtgacaggtataatggcagagagccatagtgattatgatgagtttgcagttgacactgtatgcaccctaaatccacttgagttggtgttgtatcggtgcattgaactcgtagacgagaagcttaagcaatccacataagctgccccattagcaaaaggtttttttttaataaaagatggcaaatgttgtttttgaaatattgatcatctaaagcaaggttattgaattgcaatgcaaatagtgagtgaattgtccagccagttnnngaatggt

SEQ ID NO: 128358 - DNA, 352 bp, Glycine max
  unsure (1)..(352): unsure at all n locations
  Clone ID: PAT_MRT3847_86912C.1
gnaatgnaangnatgnagcgtangtnnnggnngaatnaggntagagnagagagaggaagantgtagnggtntgaaangganagangagaaatgaggnngtgggantannaaganggagngagaagnatggttnnngtaaagttaaagcntggannaagtatntgnagnaganngagngagagaagtaaggngaaaggtnaagantgaaggatnagagagaaagtaatganaaanggnaaagagggnnnntgagnannangngnagaagngagnggaananggaataattggggntnaatgaggaangncatggangngggangaagtgntgangnagagngncaaganganc

SEQ ID NO: 128359 - DNA, 675 bp, Glycine max
  Clone ID: PAT_MRT3847_86913C.1
gtcatatatttttttatatattcatacaaacacaagcctgtattggttaagcccttttagaggtcttgtttaattaatctttcaggtatcactatggagacacaacaatttgatgatgacactttctatgctgagattaagaggcagattctgcaattgacatctgaagatgatgaattattagaaagaaaaagtttcaaccaagctgctattattggtgatgatggttcaacaaggttagcttataaaagtacatcaccacttgcaaacgaattttgctcatgggaaacacatagctcaggttcacctgaatggcttgtgaatttgaggaagagtggaagaggcactggggtgttcattccccaagttgtgactggtaaaaaacaccagagaccaggaacaatgaatagcagaaaacaaatatataggccagtggccaataagtattgaagaaactaccatttctaagtttgtgttcagtagaaattgaagattatttgaataatttatagaagggtcaaattgcaagtggaaagatgggaagcagctgaaatttttttataccagatcctcaatttaagaggcactatgtacagaatttacaataaagttgcctagagtcttgtgaaattgtttaatgcatgttttattctttttacataatttgcttttaga

SEQ ID NO: 128360 - DNA, 1687 bp, Glycine max
  Clone ID: PAT_MRT3847_86914C.1
gccgcttcgctcgctcgctcgctctctcttccctcaccctctgctgcggcgaaaaccgatacgacaccgttcgccgttgaatgaatcttccaccacacgattcgatcaatctcaatggcgtgttttgattggtaaagtacgcgcgacggaacgaggcatggcagaagtggctaaaccgagttctgtgcctccgagctctcatcgaattggttcaggacctttgaaaagtggatctttggttagaaagaagacaccgtcagaacttaggggagagttgttgaagcgggcaagtaatgtggaccttactgatgaatctcaatccaccttggctgatcctacgaagaccactgaggtggacaatggatttaaaaaaacaaggttatggaagccccctagatacacagacacacgggttgatgaagtatttgctgccaaaaagcccaggttcaaaattgcatctggaaaggaaaatgcaaaggaaaatccatctttggggcaaactagtaatctgaagaatctttcagttttttcaacttttgaggctaagggacatcaaggaaatacatgcttggagaattctgttacttccagtgaggtcagcaaagctagtgtattacaatcttgccaaacatttgaaaagtggagccaaggaaaatttcgtagtgttgctgaactttcatcagctgttgatacatcttgtggcacggctactattgacctgggaaaagcattaagaggactagctgcacttgaaccatctaatcctaatgacacggctgctgatttgtctgaaggacaagatttgacagctgttaaaggaaatttcttatccgaattccatttaccgggcaagaaggtccttttggatcttactctaaaaaccagcatgcggattgtatcctcctcttctgtgaattggtcacttgtgtgtggtaccatgcctcagttaacctcccagcatagttatttcaagagtctgaatatgagaggttccaagggctttaaagttttacattcatggatgtatccgcaatccacgcgtccgctttccctaattcgttttctttatctcgggagctcaaacttttcaacttcagattttgttttcttaaagaacgtgcagtactgcttttctttttttttttcctttcctcattcagagaaattcaatttttctagaatgccatatttcgccggttaaatctgtttgctgccgtatgtcagtcaatatcattgattcttttttcttaataaataactaaataaggagatacttagatgggtgataactacttccatagaatctcatagttcttgtgtttgttgcggttctcaatttattgcagcataggcaccggttcgtcacgattaatctttgaaacaaggagtctaaggctggatttggtttgtttcctgatataaaataacatattgaaaccaataagatactatcggtaaaaaatctaatccaacattttcagtcaaataaaatgatcttttaccatatatgctttcttaaataattaagagagtaagaagcttgcatggcgacattatttttttgattgcttaaggttttcaagatatgtactttgttgacttgtaactaaatactaacacgtttccagtattatgtgtgccaattaccaagaaaacaaaatacctggcagaaacaggatataaattc

SEQ ID NO: 128361 - DNA, 251 bp, Glycine max
  Clone ID: PAT_MRT3847_86915C.1
cttaaacttcttactgatgggaagttgtatgagggtaagcatattcctgtatctaatattagtgcaggggagaatcatggagtgctaatacccttagtggcacaggaggagattctgtcttctagtgcaagtgatgtcagaactgctatggtgattaaaaataggtagcctcaagctactgcaatgcatgtgggagctataggattacccctggtagtttcgcgagtcctgactgtaacatagctggtgca

SEQ ID NO: 128362 - DNA, 595 bp, Glycine max
  Clone ID: PAT_MRT3847_86916C.1
gtgaatttgctattgaatcatagcacgttttaaattcattttacatattttgtacggctaaaaaaaaaaaaaaaaaaaaaaaaaaaaaaaaaaaaaaaaaaaaaaaaaaaaaaaaaaaaaaaaaaaaaaaaaaaaaaaaaaaaaaaaaaaaaaaaaaaaaaaaaaaaaaaaaaaaaaaaaaaaaaaaaggggggggcccttttaaagaaaccaagtttaactccccctgcctggcaaggaaaaatttttttattggggacccaaaaatcaaattccggggccggtttttaaaaacgggtgacgggaaaaaccccggggttacccaaataaaagcccttggaaaaaaacccccttttcccaatttgggaaaaaacaaaaaagccccgaccgaaagcccttcccaaaaatttgccaaccctaaagggaaaagggaacccccctttaacggaccaataaacccggggggggggggggtttcccccaggggggccccttaaatttgccagcccctaaggccccgttctttgggttttttccctttctttttccgcacttttccgggttttcccccgaaaagttttaaaagggggccccc

SEQ ID NO: 128363 - DNA, 878 bp, Glycine max
  Clone ID: PAT_MRT3847_86917C.1
gatattgaagttaaaaagcttgtagattctgactcaaaggaggcaatgaaaagagccaaagttcctccactttctgcagtggatgctgtccttgaacaaatcaagaagaaacagaagctcagtgttctggataagcccaaaaaggactggggtgaatttaaggaagaaaagaggctgaaagaaaagcttgatgcttataagaagagctctaaccagtatctggacaaggtttctttcttacagcgagcagattaccgtgagtttgagcgagagagagatgcacgactggctttgcaatccaggaagcgaccagataatatgcaagaggatgactgaaggtagttgaagactttgagttattactaccttcggggaattatgtatggttttgtagtgagttgatggtgcaggtgctatagttcctgggaaggtcttggtctctggataggtaaaagacctttgatcacattaatggggtatgaatgatgcattttgaggtttgagatttgaaatgcttttcaatgacatggtacttaacgtgggaggtaaaaatagggggctagagagaaacagctgtcaattttagactgacattattatagtttattccgttccttgagagcctcaaagaagcattcactactcgctgaaggtagtttcaaagaactcattttgtgtctgtccattatttggttgtttgaattcctctaaagtaaatattgggacacgattttcttgcaaagcaattcgaacttagtttcaagacagaagagatcgtgtgcatatgcgaatcctataagaaaacaactaccgtgagttttatatgctgttttttttttcggtagctaaatagttattttattttattgtcttcccag

SEQ ID NO: 128364 - DNA, 157 bp, Glycine max
  Clone ID: PAT_MRT3847_86918C.1
ccatggtcagggacaagaggctgtacaaatgtttgagcagatgcttcaagaaggggtgactcctacccatgtcacttttcttgctgtcttatctgcttgtagctattcaggattatcacaaacaggttgggagatatttttcttttttaagagagaa

SEQ ID NO: 128365 - DNA, 539 bp, Glycine max
  Clone ID: PAT_MRT3847_86919C.1
tcgcgcacgcttagtttcttactttgcttaactttactaccttaatgattgggcatacaatgagatttgatatgatttgatatacacttcctgatatccactgcattaaccactctatcgtataaattattgcattggcatgcgacaccttgtagtactttcacaacgatactcaattctgactcaaccgctgagggagacttttcaacctctgacccttcctttgacgcctcgaacatagcgctgggcttaaccactgatatgagagggaaagtggcactcttgttgaacctacgaacagaattactcctacaggcataccctacaatcctttatgtcagacgttggaggacattggtgcttaacctgttgcggtcaaacctatatgccatagatgcattggcgagaagtgctataccctcatgaggaagacctatgaatccgcagcactgctgactattgctgatgagattgtgactgatagggctgcataggaaactgtaatggatctggatctgcgcagacatatccagagagag

SEQ ID NO: 128366 - DNA, 525 bp, Glycine max
  Clone ID: PAT_MRT3847_8691C.1
ccacgcgtccgcacgatagtacttaaaatggatatttagaaattcaatgatataaatatcttccttgtccgatccttttaagattttcatgtctattaaagactatgaaaggtaattatggatgtattcaaataatgtcaaaggagattctattgtgatccattcagggatatgctgatgtatccttagaagcatccactagattctagtaaatcgtctcttgttcttttttatcttctgtctgaatatatgctgcagttttagtgtgaatccatttttttcttgtattattaactttgttttttaatttctttgtgagaccagattaaaccattgaaccattctcatgatttaccaccaccaggaaaaaagggccgtccttacatttgtagttgcatgattttcctccgccctaccaatggagcaaagctaattttgagaaagtggattgaggaacttcagattcaaccctggtctaaaactgtgaaatctaatgatcagcctgcttttaactgggctttaatg

SEQ ID NO: 128367 - DNA, 431 bp, Glycine max
  Clone ID: PAT_MRT3847_86920C.1
tgtgatggatatctgcagaatcctgcttacgcactggcaacaacgcagagtactcctagatttcacattgaactacagattaatgggtactatgggactactatctgctatgcatacgttggagataccagtatggtcaacggatgaatgtgacttgggaagtacagctgacatcatgaactatacctatatcaacgcgtactttgactactacataaggactatatgactggaatgtaagcgattgacacatgagctatcctaagtgtaccagaacatggcgcagctgctatacaaacagctaacgtactagcagagcccattactaatggacgtgctgtatatactcgcacatcatctgctattcatagatcttggcctgactttatacaatgagatacaaaaggatccatctttgaaacatcaattaa

SEQ ID NO: 128368 - DNA, 174 bp, Glycine max
  unsure (1)..(174): unsure at all n locations
  Clone ID: PAT_MRT3847_86921C.1
antccggggttggggaaattaatgtgggcacaacataaatgcctttattatgcgttatatttcagccctgtttttgagaaccctctcatttcaggcatacattttttattcccctatataatataccttaaccatatgctttttcctccaagtacatatgcaggaaattttttc

SEQ ID NO: 128369 - DNA, 490 bp, Glycine max
  unsure (1)..(490): unsure at all n locations
  Clone ID: PAT_MRT3847_86922C.1
gggccatgtggaactgagaagaacttcacaaatggaatggttaatggtcacatgccatctcttcctggcagcccctttacaggttacatcattgcaggccaccgaaaaatgatgaggacagaactgtatttcctgtcatctcagaagaatcgccccagcctctttggaatgccattgattgatccatgtactgtgcatacccggaagaaagacctatatgatgcggtttggattcaagtatcccggttagcgagcccactcccacctcatgaagctagtaatcatgcccaggattgtgacgacagtatgggctatcaatatccattcactctacgagttgtgcagaaagatgggaactcctgtgcttggtgcccatggtatagattttgcagaggctgtaaaattgattgtggggaagacagagcnttcattgcacatgcctatatcgctgtggattgggatcccacagcccttcaccttcgctatcaaa

SEQ ID NO: 128370 - DNA, 330 bp, Glycine max
  unsure (1)..(330): unsure at all n locations
  Clone ID: PAT_MRT3847_86923C.1
gataantcgaatcgtcgaggnacctcaatcggacaangagncttatggaagcnnannnanggattgaanatcccgggtggnttnaagaaggggaanaccaggcaggnaaacngtgttttccgntnaaaggcngaaggngnttaaacnaacgatngccttgcaagacttcccganagcgggnaaaaccggttggnaacncaaangttaggngtttggancccnaacttttntggnaaacccntggnagacntttaattcccnagntttccgggttccttccggaaggggggncccactttggaattatccggantggttttccaaacaacc

SEQ ID NO: 128371 - DNA, 456 bp, Glycine max
  Clone ID: PAT_MRT3847_86924C.1
tagttgttctgcctagcacgaagggcgccggtgccaccatggccacgttctcccgtatctgcgccagtgcgaacgaatcgtaggcagaggttaaggctatcgaggcatgcagcactgctggctccgacactgacagctggaggacgagtgagctccagaaatgggacccgaatggtcgagtgagtttgtccgtcagcaggacacggaagcggtccaggcagcgcctctcctcctcagcgaggccaggaagagtccgcaggggatagaccggggagggaagtagtctcgttgacttgggctggccccagatgccatagccgtcacaggccctgccggtatccagacaccgacgacatgacggcctttgatcatcgcatttaacccgccgaaccttgcatgttcgacagcccgacctagttcggggcgtgctcttgcgcttcgccataatggcctcta

SEQ ID NO: 128372 - DNA, 355 bp, Glycine max
  Clone ID: PAT_MRT3847_86925C.1
aatactagagaaaaccctaacggactaaacgatcacaacagaggtggagtctaccaacaccatcaacaacgtgaaagcaaatatccagcactatgaatggatgccgaccaaccaacaaagcctaatactacacaagaaacagctggaggacgggcacacgctcaccaactaaaacatacacaaagaatgaacacgtaaactagaactccaccaccgcgacgacgacaaaaaccacgagatgaagacctacaccgagccagagatacaacaacacaagcacagaaatgtgaagatcagcactaatcagacctacaaagaacacgacaatggaaaaatacataagatcaacacggag

SEQ ID NO: 128373 - DNA, 343 bp, Glycine max
  Clone ID: PAT_MRT3847_86926C.1
ggtgtgagttgagtctgtgatgataatgatgatgaggatgtgttccatgtggatgtggggtgtccttgtggccattgctggtgcccttttagtcctaagatctatcctcaatctactatagagctcattggaaagaggtcatttatttcaatgtcttatgaagaacataagcgccttatgcgtttgacatcctcttcaatcaatggcatggaagcactgtccctctacttgacatatattgaaaaaaatgtgaaatcttccttggagaaatgggccaacatgggacaaattgagttcttaactgagatcaggaagcttactttcaaaatcattatgcatattt

SEQ ID NO: 128374 - DNA, 563 bp, Glycine max
  Clone ID: PAT_MRT3847_86927C.1
caccaatggaaaagcagaaaaaactcaaaggtgctgcacaccttttcttatgatcaacaagggcaatacacttctccctacctctccttcaccatgatccattccaacaactttgagtgtaatgtgctaaagaataattctaattccttttcaccagcagaggcctcatttgatgtcccttctattcctaaggaacattcttttgagatgtcagaatcagactcttgcagtgaggaagttggtgacgcaactgatgatgaagaagtcatgagtttggatgagttgctgaatgatggaaaagcaaagaagaaaattgagcagttggctgcactggttggagttcacactacggagccagcaattgtgctgactgtagtagtgagaattctcaaacacttgaaccactactatagtactacttaaatgaggcaaaggaattttagtttttctcccatcatgggcttaatgcttttttttcttttcttttcttgttcatatataatatgcgacttgtgtattttctatgttccatctacgaaatattagtttgagaatctctcttc

SEQ ID NO: 128375 - DNA, 1590 bp, Glycine max
  Clone ID: PAT_MRT3847_86928C.1
aattcggctcgagaaattccctttatttgtttattttcctatctctctctctccacataccaaaccccaagatcacttataaatacacagaaagagagtgaggaagttgccccagttgagtagtaagtgatgatggagatggattccatgtgtatgtgggtggtccttgtggccattgctggtgctcttttagtcctaagatctatgctcaagaatgtcttatgaagaacataaacgccttaggcgtttgacatcctcttcaatcaatggcatggaatcactgtccctctacttgacatatattgaagaaaatgtgaaaaattcattggagaaatgggccaacatgggacaaattgagttcttaactgagatcaggaagcttactttcaaaatcatcatgcatattttccttagctcagaaagtgaacctgttatggaggctttggagagggaatacacagcacttaatcatggagttagagccatgtgtattaatattcccggatttgcataccacaaagcattcaaggcaaggaaaaatctagtggccatatttcaatctattgtggatgagagaagaaacttaaggaagggatatctgccaggaaaagccaaagatatgatggatgctctgatagatgttgaagatgatgatggaagaaagttgagtgatgaggacatcattgacattatgttgatgtacttgaatgcgggccatgagtcttcaggacatattaccatgtgggcaacctttttcctgcagaagcacccagaatatctccaaaaggctaaggcagaacaagaagaaataataaggagaaggcctccaacacagaaagggttaacacttaaggaagtccgggagatggattttctttacaaggtgattgatgaaacattgcgtgtgattacattctcactagtggtctttcgggaggcaaaatctgatgtcaatatcaatggatacacaattccaaaaggttggaaagcgcttgtgtggttcagatcagttcaccttgatcctgaaatatatcctaatccaaaggaatttaacccttatagatggaataaagaacacaaggccggagaattccttccctttggaggaggaagtagattgtgtccggggaacgatcttgccaagatggaaatagcagtttttcttcaccatttccttctgaattaccgatttgaacagcataatcctaattgccctgtgagatacttaccacatacaaggcccatggacaattgcttgggaagggtcaggaaatgttcatctacaacaacctaagagcacatgtctatggctatttttaatttgaaaatccatctccatgttttccctcagctaaatgcttccaggtccactttgagctacgttggcatagcttcaacaaaatggacaaaaaaaggaaaaaaaaaagtttttcacagcacatacaaataagtataatttcgaaagctccatctaccaccctctttaagcactagctagtaagtcttccatctggtccatatgttctgaaaaatggacaaaaataactttgtttcattaggtatttgtttaaaggaaagaatctagtttct

SEQ ID NO: 128376 - DNA, 683 bp, Glycine max
  unsure (1)..(683): unsure at all n locations
  Clone ID: PAT_MRT3847_86929C.1
gtccgnattcccgggtcgaccccgcgtccggtaagtgatgatggagatggattccatgtgtatgtgggtggtccttgtggccattgctggtgctcttttagtcctaagatctatgctcaagaatgtaaattggtggctctatgaatccaaattgggtgtgaaacagtactctttgcccccaggtgacatgggatggcccttcattggcaacatgtggtccttcctcagagctttcaagtccaaggaccctgattccttcatctcctcctttgtctccagatatggaagaactggaatgtacaagaccttgatgtttggaaatccaagtgtaattgtgacaacacctgaaacatgcaaaagggtgcttacagacgatgataaattcacaactggttggcctcaatctactatagagctcattggaaagaggtcatttatttcaatgtcttatgaagaacataaacgccttaagcgtttgacatcctcttcaatcaatggcatggaatcactgtccctctacttgacatatattgaagaagatgtgaaaaattcattggagaaatgggccaacatgggacaaattgagttcttaactgagatcaggaagcttactttcaaaatcatcatgcatatgttccttagctcagaaagtgaaccctgttatggagggctttggagagggg

SEQ ID NO: 128377 - DNA, 510 bp, Glycine max
  Clone ID: PAT_MRT3847_8692C.1
gacctcctgctctcacactccctattctccgtcaccttctccctcctctgccactccaacaaactctccgacaacctcgtctacagattcatcaacgctctcggccatcgcagcgacatcaggggcaccattcactggttccagaaagccaaaaacctaacaagaggacgatgcgcatattctgcaaggtgattagagacccgtcaaagtatcgaagaaagcgagggtttgaatgggaaccttcgattttgccgaggaagttgctcgagcctacgacgccgccgctcggactctccgaggtcccaagccaaaacaaaaatccctctctgacctttttgctacaaccccaccatcgatcctttcttctacgcgggtttccccacttaccttgaagtctgccacagcggctgccacacttcatctttcgtcaatgacgacgacactatttttaattttcttctgcttgattgttcttattttactctttgttacaaataatttgagttttgc

SEQ ID NO: 128378 - DNA, 271 bp, Glycine max
  Clone ID: PAT_MRT3847_86930C.1
ggcgagctgattctgagctctttccccgaagaaacaaaagcactgtcacctcgacctgaacccgaagaatagatattatcggcgagactcctgaggggactcactttgtcctttttgcgaaccctcaatacaccgttgctgtttttgataaaaatatagagacacctcaaggggctgatggtgaccctgctgcacaacaaatgcttatttatgcggggaaggggcttaaaaaagccacaaccctggaagaaaataacgggggtttataata

SEQ ID NO: 128379 - DNA, 2625 bp, Glycine max
  Clone ID: PAT_MRT3847_86931C.1
acactgaacaaaactattcccgggatttgtttgccggcctccccctcgccctcctctcgagccgctcgagccgattcggctcgagactcactgctgtcataaaatttcctttatttattttttttcttttcctatccctcccctctcccctctctttctctctccacataccaaaccccaagttcccttataaatacacagaaagagtgtgaggaagtggtgtgagttgagtctgtgatgataatgatgatgatgatgtgttccatgtggatgtgggttgtccttgtggccattgctggtgcccttttagtcctaagatctatcctcaagaatgtaaattggtggctctatgaatccaaattgggtgtgaagcagtactctttgccaccaggtgacatgggatggcccttcattggcaacatgtggtcctttctcagtgctttcaagtccaaggaccctgattccttcatctcctcctttgtctccagatttggaagaactggaatgtacaagaccatgatgtttggaaatccaagtataattgtgacaacacctgaaatatgcaaaagggtgcttacagatgacgataaattcacacctggttggcctcaatctactatagagctcattggaaagaggtcatttatttcaatgtcttatgaagaacataagcgccttaggcgtttgacatcctcttcaatcaatggcatggaagcactgtccctctacttgacatatattgaaaaaaatgtgaaatcttccttggagaaatgggccaacatgggacaaattgagttcttaactgagatcaggaagcttactttcaaaatcattatgcatattttccttagctcagagagtgaacatgttatggaggctttggagagggaatacacagcacttaatcatggagttagagccatgtgtattaatattcccggatttgcataccacaaagcattcaaggcaaggaaaaatctagtggccatatttcaatctattgtggacgagagaagaaacttaaggaagggctatctgcctggaaaagccaaagatatgatggatgctctgatagatcttgaagatgatgaaagaaagttgagtgatgaggacatcattgacatcatgttgatgtacttgaatgcgggccacgagtcttcaggacatattaccatgtgggcaaccttcttcctgcaaaagcacccagaatatctccaaaaggctaaggcagaacaagaagaaataataaggagaaggccttcaacacagaaagggttaacacttaaggaagttcgggagatggattttctttataaggtgattgatgaaacattgcgtgtgattacattctcactagtggtctttcgggaggcaaaaactgatgttaatatcaatggatacacagttccaaaaggttggaaagtgcttgtgtggttcagatcagttcaccttgatcctgaaatatttcctgatccaaaggaatttaaccctaatagatggaataaagagcacaaggctggagaattccttccctttggaggaggaagtagattgtgtcctgggaatgatcttgccaagatggaaatagcagtttttcttcaccatttccttctgaattaccgatttgaacagcataatcctaattgccctgtgagatacttgccacatacaaggccaatggacaattgcttgggaagggtcaggaaatgtccatctacaacaacctaagagcacatgtctatgctgttttttatttgaaaatccatctccatgttttccctcagctatatgctttcatgtccactttgagctacgttgtcatagcttcaacaaaatggagaggaaaaaaaaaggcttgtcacagcacatgcaaataagtataatttcgaaagctccatctttcaccctctttaagtactagttagaagcctagtatgtcttacatctgatatgttctgaaaaatggacaaaagtaactttgtttcattaggtattttttcaaaggaaagaatcgagtttctatgtcttgtgcttcaaaagaatttactaatgtgtgcgtctacaatcgggctaagtataattgctgtatataccgcacacagtttttgtgtattaaaccaattaaaattaaataattgtatgattggacggaactttacgtaaatattaaattttgaaataataagcatccaattcacaatgctacttcttgattgcacagatttgaacagcataatcctaattgccctgtgagatacttgccacatacaaggccaatggacaattgcttgggaagggtcaggaaatgtccatctacaacaacctaagagcacatgtctatgctgttttttatttgaaaatccatctccatgttttccctcagctatatgctttcatgtccactttgagctacgttgtcatagcttcaacaaaatggagaggaaaaaaaaaaggcttgtcacagcacatgcaaataagtataatttcgaaagctccatctttcaccctctttaagtactagttagaagcctagtatgtcttacatctgatatgttctgaaaaatggacaaaagtaactttgtttcattaggtattttttcaaaggaaagaatcgagtttctatgt

SEQ ID NO: 128380 - DNA, 485 bp, Glycine max
  Clone ID: PAT_MRT3847_86932C.1
tatcatctccgtctatgatgcgtaatatttcaccatctgctcgaccctaacttcatggaaatacaagggctttgacacatgaaagtaactgccatgtgcaaaggattggggcccaccatatttgataaacaaggagcactattacttgctgttgcttttcttgttgtacaaggacatgggtctcatatcgttttgcatgactgaatggccctactgtgaagcttgatctcggagcaagataaagctttctttatttggttaattggtttaactgtttttcaaaatgctgggttttctttcattgccccttttataatacacttgactgcaatgctagcccttggggggccgtctcatttggcgcaccatgtacttgcgaactacttgataaacaatgccttttactaggtatttcacatggtaagcaaaacattgacgctgatcagaggataactcatgacttggagaaggttacaaccgacttg

SEQ ID NO: 128381 - DNA, 501 bp, Glycine max
  unsure (1)..(501): unsure at all n locations
  Clone ID: PAT_MRT3847_86933C.1
atttcccgggtcgacagcaattagtcggcggccgccctttcttttttttggggaaacttacaaaggcaaagctgcaatgtcaactgccggaaacaaataaatagcaagcaaacacacacgttgtcatacttaagacaattattcctataataagtttaaggtcctcattagtcattactcctacaggcctaaacaaaatgactaattgaatcccctacagagctacctcaggctatcaaaattcatctccgctccacaattaggagggattcttgtcttaagaattcaacagatcaagcaagttacaaacagagaaacttaatttgcacattcaagcttgatgctgtctaacttgttgtgaatgctactcctgcactgcacttcattcagcttactntgttgtggtggcctccataaagggggtaagcaccataagcagcagcatatatgctgggatcatgaccagggggcaatgcatacccataaccatcatacataggg

SEQ ID NO: 128382 - DNA, 184 bp, Glycine max
  Clone ID: PAT_MRT3847_86934C.1
ggttgtgctcatggggtttgttgaaggttacagagttggtggaggaccacttggtgaaagacttgacccaatctaccctggtagtgcttttgaccctcttaatctggctgataaccctaatacattcactaagttaaagatcaagaaactcaataactgtcacttaactgtcttctccatattt

SEQ ID NO: 128383 - DNA, 118 bp, Glycine max
  unsure (1)..(118): unsure at all n locations
  Clone ID: PAT_MRT3847_86935C.1
ctgaattgagttcactgtngacaagtntcgcnccaacactcaactcggntcgtcgntattgtngtngtncttcttctccatatcaaacanagnntanatgaaatatcattgcngcttc

SEQ ID NO: 128384 - DNA, 347 bp, Glycine max
  unsure (1)..(347): unsure at all n locations
  Clone ID: PAT_MRT3847_86936C.1
aaaaagctacgcattggcnaacggcngttaacgttaaagactccgnggaaattcgngcttcgnatngncaacngggtttntngctaagcccnnnggncctttgnaaaaatccanntncatttnagntccattnggaaaaactttggccaatttccaaaagatatgnacattgcatgtncaatccncattggaagaacangccgtgctggtgacaangaccgggttgcatacacnctataaccctgaaagaagcncgtttccgtnatgggcaatacctgggtccccccggnaaatntttngggtttncnancntnnnagggggngggnccccnanaaaaaaaaaanan

SEQ ID NO: 128385 - DNA, 477 bp, Glycine max
  Clone ID: PAT_MRT3847_86937C.1
agccgaatcggctcgagctaacacagcactagcggttactgcctgttcaagctgcgcatttgggtgtttctctctaagtgccctcttgccaggctctgccactctttattactgtattttcattcttctgggggcgatgtgcggtgagcgttgctctacgcaagatctaccaggccaagggtgaccgcggcctctactccggtcttgaggccgaagtccttaaaggcttcctcaatcacagcttgacgatggagatgaaggatcgggtgcacgttgcggacatccagctatactatgctttgctgaaggtcacgaacaaatggacggttgagcttgaaatggtacatgccgaagcgactcactgtgtttaccctgcgaaggacaaggtacaggcttctgcggttcatgctttcgaggaggttaaagaacacgcttagagtgtttgcatttttgtagtggacagcggctaacaggttg

SEQ ID NO: 128386 - DNA, 279 bp, Glycine max
  Clone ID: PAT_MRT3847_86938C.1
tgctgagatggttcttcaagtagtattatctaatgattgtgaccagtgctataatcacaggggaggccaatgtcggcttgacgccaataaaaagttctactgtaaagaaggaccaaagaataagagtagtaaaagtttgaagctgatacttggacttgtaacaggtttaagtgttatattgtcagctattctgatcattggatacatagtatttagacggaaatatactccatcacacccccaatcccaatcaagaaacacatatgttgatgtaattgg

SEQ ID NO: 128387 - DNA, 503 bp, Glycine max
  Clone ID: PAT_MRT3847_86939C.1
ctatggacacatctctgtatctctgttacatatattatataatacatatctctacacctgcttttaactcccacaatgcaacaattcgacagatacaggaacctacaggtctttatgctcctgctgtactagcaggaaggaaaaatccacctttcatgcactaagggacagcccctcctctccaactaatcaaggtaaggaccttccaatggactgaacattagtctccactcaacatacccatgataaggtctgagaaaaaactatatagcttatgcatgcagcacatttgtactgcttcttacactctaccactgatattgtttatttgaagcactttccttggctccctttgatacaaaaaaccattgaattccgcatgtggcacattctcaaacttcttgcagatgctatatagagctgcattccatacccttttcttgcgctctttcaaaaatccacactattgatgcctctcgagcctgtagcacatttgatgttag

SEQ ID NO: 128388 - DNA, 442 bp, Glycine max
  Clone ID: PAT_MRT3847_8693C.1
atactcacactctggttcatcactcataaaccgtgccaacattgaaaccgcgattgaacagcttccggttctcggcgaacgggagagtagctgcctagctgcaggaatcgattagtgattgtgaagatgcggagagacaacggtgatagctaagaagaggacatgcttaataggttaaacagacgcttcttttgcaccgttgctccacgcccttggctttttgtggggctgggcaaccctggcgagaagttcaaaggaaccagacacaatgttggctttgagatgattgatgcatttgctgagtcacaggggattcctatggacactgtccattccaaagccatttctggaaaaggttttgttggtgaagttcctgtttttcttgcaaagcctcaaacttacatgaatctcagtggtgaatcaacaggaccactggctgctt

SEQ ID NO: 128389 - DNA, 656 bp, Glycine max
  Clone ID: PAT_MRT3847_86940C.1
cggacgcgtgggggtgcattcaaaaaatggctgggattgtagtgatttttgactttgactcaacaatcattgagtgtgatagtgataattgggtgcttgatgagaccggtttaactgaaaagttctatcagcttcttcctagcacgcattggaaccctctaatggataagatgatgaatgaacttcattcacaagggaaaaccattcaagacattgtacaaattctgagtaggacaccaatgcatcctcgcattgtccctgctattgaggcagcttattctcttgggtgtgacctgaagattgtgagtgacgcaaatattttctttattgagacaattctgaagcatcatggagtgtggaactgtttctcagatgtcattgccaaccccatccatgttaatgaagggaggctcaatatttgtccataccatgattatcttaaatcttctcatggatgcaatctttgcccaccaaacatgtgcaaggcaataattgcattgattcccaagatctatttacttatggccaagcaattaattctcatatttattctagtaatatatagttaaccacttaagcttttattatgcctttgaaccccaggtctagtattttacttccctaacatttcgttaatggatagtaacacaagccag

SEQ ID NO: 128390 - DNA, 458 bp, Glycine max
  Clone ID: PAT_MRT3847_86941C.1
gctcggaattcggctcgagaacaagatgccactcatacatttttcgactttacggcctacactggaaaaacagggggcctcggtgaaaccatcatgctcagaaatctgcaccaccctaattttgacaatctcattggatactgcgcctgtggcaaccaacgcctcttaaaacatgaatttatgccatcgcgatcacagcaagaccatcttcatgatcttgccccgcacaaggacccattcaattggaacatcaagatgaaaatcactgctgacgcagcaaaaggataggaataccttgatgacaaagcagatcctcctggaatacatggagacttccgagcactatatatattacgtgaataaagctatcatccaaaactatcaaactctgcacatgcaaagctccgaccacctttggacaaaacacacgactccacccacatcaaggaaactcaagg

SEQ ID NO: 128391 - DNA, 1247 bp, Glycine max
  Clone ID: PAT_MRT3847_86942C.1
ctcatttaggcatattcagcggctccgagaagacgacagagttggacagttaatttatcatatcatttgttttttcttcatttgttttggtgcattcaaatggctgggattgtagtgatatttgactttgactcaacaatcattgagtgtgatagtgataattgggtgcttgatgagaccggtttaactgaaaagttctatcagcttcttcctagcatggcttggaaccctctaatggataagatgatgaatgaacttcattcacaagggaaaaccattcaagacattgtacaaattctgaataggacaccaatgcatcctcgcattgtccctgctattgaggcagcttattctcttgggtgtgacctgaagattgtgagtgacgcaaatattttctttattgaaacaattctgaagcatcatggagtgtggaattgtttctcagatgtcattgccaaccccagccatgttaatgaagggaggctcaatatttgtccataccatgattatcttaaatcttctcatggatgcaatctttgtccaccaaacatgtgcaagggattggtgatagaaaggatccaaaattcccttgcagcagcaggaaagaagaaaataatctatcttggagatggaaatggagatttttgcccaagtttgaggctcaaagatagtgactatttgatgcctagaaaggactttccattgtgtgatttagtttctaaaaattctaataagataaaggcagaggtacatggttggagagatgggaaagagcttgatcatgttctgctacatgttatcaacaaagctattggtgaaggaaacaagaatatcatttctactccaatagtatcagttgattgcaagttggggtcaatttcaattgaggctcataaacctttacctaaagcaatcccagttcctcaataaaactaaaattgcagaggatgaaggatcgatcgatttcaaagtgattacatttcttgtggcttgtcttctatgtattgctactttgtttttgctgttgttgcttttgcagaaagtgtatgagtatgaggctttggcctggttattattattgatagtaataataaaaatataaaaagtaatttgtggtgcaattgcattgattcccaagatctatttacttatggccaagcaattaattctcatatttattctagtaatatatagttaaccacttaagcttttattatgcctttgaaccccaggtctagtattttact

SEQ ID NO: 128392 - DNA, 403 bp, Glycine max
  Clone ID: PAT_MRT3847_86943C.1
aaccgccaacgtgatgtaaaccatatccgcccaccgtggagaaggcattgtgcagcctagagcccagctgtgagttgtacaaagcctgctaaaagtggcttcgccgggcttgctgcaatggctgctgaggtccggcgtaacaactatgaacaatcacaccctggaaaccagcagataatgcgtagacgacggcatagaagtttattcgagaatcaaggcttattaatattgtttttttttaaatccaatacgtgcacacagtggtgggttggtacacactgtttgcaggtgcttcgacgtgcgtaaaaacgtgggttctgagaaagagacgccacccaatgcgggcaacaaccagtagtaacgtggctgcaaacaggaccaaagcagcataatggcaatgtcc

SEQ ID NO: 128393 - DNA, 202 bp, Glycine max
  unsure (1)..(202): unsure at all n locations
  Clone ID: PAT_MRT3847_86944C.1
cgcagttcagttctctaatnatntatgccgaaganaagttggggtcaatctgcgatctcgtaattntntcatcatntnacagtaacggatgaagctaagcancgaggtagaagctgagagnnaagttggatggctatngaagacgatatntnntgtcactgnaggggtagcaggataccatnnccgtnctnatatggggaga

SEQ ID NO: 128394 - DNA, 400 bp, Glycine max
  Clone ID: PAT_MRT3847_86945C.1
aagcccgaattcggacgagtttgaagcaggatgcccactccatcctttatttttccatgctcgaaacgacgtcgtcgtgtgggtgcacttcttcgtcgccttcgcttgcgaactcgccgtcgaataggggacacgaagcggaggatcacaatgagttggggagtgaggagcatttcgcgcagatcgggggaggtgcggggcggaaccacacatcatcaggaggagggtagagctttgcaatgctccgacgtctcccacgacagttatcgcgagcctagccgacgaggccgggccaaacggacgcggcacagtggcagatgaggagcataatatgcgggtcaccttcggaggagagagatcagaacatggggttgccgaagggtatcgaaaaccaaccact

SEQ ID NO: 128395 - DNA, 457 bp, Glycine max
  Clone ID: PAT_MRT3847_86946C.1
aaaaggccacctataagagggccgtatgaccaaggaggaagcaatgaacatttttgaggagatgccagactatcaatcatcaatgcaagcccaattgtgctatttataatatttttatcaatggatttgggaaagcaggcaacgttgatattgcttgtgatttgttcaaaaggatggttaaggaagggataaggcctgacttgaagtcttataccattcttgtagaatgtctgttcatgactggtagagttgatgatgctgtgcactactttgaggagctaaagttaactggcttgatcccgatactgtttcttacaatcttatgatcaatggccttggaaaatcatgtaggttggaggtagctctttcttttttaagtgaaatgaagaattggggaatttctcctgatctctatacttacattgcattgattattcattttggaaatgctggaatg

SEQ ID NO: 128396 - DNA, 550 bp, Glycine max
  Clone ID: PAT_MRT3847_86947C.1
ctccgcgaaccccacggctacaattgatttcaaaggcaccgtggtgggaatcagaccggcacccgttgtggcgtcgttttcggcgagggggcccaacgggttgagtttggaaatacttaaaccggatttgacggcaccgggggtcaacattctggcggcctggaccggtggggttgggccttctgggttggactccgacaccagaagaaccgaattcaacatattgtcgggcacctcaatggcgtgtcctcacgtgagtggcgcagcggccttgttgaagtcggcgcaccctgattggagccccgcggccataaggtctgccatgatgacaaccgccacggtttttgacaacaccaacgctctgatgattgatcaagccaccgggaatgcttccacgccctatgattttggcgctggccatctcaacctcgctctcgcaatggaccctggcttggtttacaacattaccccccatgattatgtcaccttcctctgtgctattggttacgggcccaagttgattcaggtcaattaccggatcgccgcccaa

SEQ ID NO: 128397 - DNA, 321 bp, Glycine max
  Clone ID: PAT_MRT3847_86948C.1
tggcacagaacatgagggatatgatcctttttttggtggaattcacaactatgccactcccatgatgcccctagatgaagaaattctctctaaggctgcacaagatatggttgaggaatggtttgactgtgttgctcaggaggattcctttggggaagcttcctgaagtgcttgactcaatgttctcgcaggtttggtctcttccagatggattattattcactcgcctctcaatttatctaatggcttccggatcacaattggtggcatctgcataccgtgatgttttacatgcgaccatgttatgttactgctgaaatt

SEQ ID NO: 128398 - DNA, 378 bp, Glycine max
  Clone ID: PAT_MRT3847_86949C.1
caacattaattccaatccaatcatgttcaacttttcactggatttctgacacgtgtttcactctcagtaaactgttgcttcatgcccagttatacgtaccatctcgacacagtgtcctaccattcgaagtgtttcactgtactcattttcctatttgcgctcactcaagtcaaatgcttgtatctgtgagaacagattctgcttattccgcatcatcgacgtcgtctactctgtcatgagttctcaacaggtacctgcacgctgtcgagctattgctagaataattcgtaatggataatgggtctgtactgcttcacatatttcctgctgtagagatgtttggcatcataggtcggaagtatgtaccagacacactga

SEQ ID NO: 128399 - DNA, 144 bp, Glycine max
  unsure (1)..(144): unsure at all n locations
  Clone ID: PAT_MRT3847_8694C.1
ggttaaagagatttacagangtactcctnctctgtcttattgttaagatttcaattcancattacaacccttatnncattatcttanctgtttcatatttaagatagaatcctacttataatctgcatcttagatttctacatc

SEQ ID NO: 128400 - DNA, 1291 bp, Glycine max
  Clone ID: PAT_MRT3847_86950C.1
tgcggccgttacgtggagtgagtaactatattgagcgtcaaatcggagaatcgaaatcggaggaatcaaagccctgctgaatggcgccaccggcaccacccaagtcaagtcagggtcaggtgatgaataatgcaaggattcacttcttttccattctcctcgctctccaatacggtgctcaacctttgatctccaaacgcttcatcagacgtgaagttattgtgacttcatctgttttgacttgtgagcttgcaaaggttatatgtgcagtgttttttatggcaaaagatggtagtctgaggaaattgtataaagagtggactttggttggtgcgttgactgcatcaggacttcctgcagctatatatgcattgcaaaatagtttgctgcaaatttcttacaagaatcttgattcactcacattctcaatgctgaatcagaccaaaatatttttcaccgcgctctttgcatatttcatattgaggcaaaaacaatcgattgagcaaattggagccttgttcttgttaatagttgcggcagttcttttaagtgttggcgaaggctctaccaaaggttctgctattggcaatgctgatcaaattttattttatggaattattcctgtattagttgcttcagtgctctctggattggcttcatccttgtgtcaatgggcctctcaggttaagaaacactcatcatacttgatgactatagaaatgtctattgttggaagtctatgtttgcttgccagtactttgaaatctccagatggggaagctatgagacaacatgggtttttctatggttggactcctcttactttgatcccagtaattttcaatgcccttggaggaattcttgtcggtttagttacaagccatgctggtggtgttcggaaggggtttgtcattgtttctgctttactcattacagcattgctacagtttattttcgatggaaagacaccttcattgtattgccttttggctcttccactagtggtcactagcatttcaatataccagaaatacccctaccaggttaagaagaaggagtcatagaatctgaccatggggaatttatttcattagttccccccgaaactactttgtttttttatccagaatatatagcatattgtaaatgatagaacatagaaggcaagcattcttcttgatgtcttctggatctcaatagaattaggatgttatacagagctattttttttttttttgaatattctggaatctttaaatgatcaattatttgtctcctcttcattgtgtgg

SEQ ID NO: 128401 - DNA, 318 bp, Glycine max
  Clone ID: PAT_MRT3847_86951C.1
gagatttacgtttataaggatgacatcaagcatcaaaacctcccgcaacagctatggctctcaccactgatctcagccgattcagtggtgccatgatttatccaagaatcggcatcagatttgttcgtagagatgctcatgtttacccgtatgcaaacccataatctaacacgtaattccacaagcacctgaagccttcactgctcacctgaactgccatctacactgcgctgtacaaaaaggacattgctcaagacactgttcagaagacgatacgtactaccaaaaatccttactctaagtctaatgctaggtcca

SEQ ID NO: 128402 - DNA, 314 bp, Glycine max
  Clone ID: PAT_MRT3847_86952C.1
cttctctcctatctatatcttttctcacttagtcttgtgttgtcttcccccacaacacacttgtaagggagagataacaatggcttctgagaaggttgagactgttgttgcagggaattacttagaaatggagagggaaaaggaaggttctaagtccaccagtggcaaattgtctaggctcttttggcatggtggctctgtctatgatgcatggtttagctgtgcttctaatcaggttgcacaagtgttactgacactcccatattcctttttacaactggggattttatctgggatcatattccagctttttt

SEQ ID NO: 128403 - DNA, 914 bp, Glycine max
  Clone ID: PAT_MRT3847_86953C.1
ccccgcgaattaattgcctagcattgtacgcctatcctccaccctcatatcttattcagagacccatgaattgattgcctagcgctgttcatgtgtcctccaccatcgctcaagagccccgcgaattaattgcctagcattgttcgcctatcctccaccctcatatcttattcagagacccatgaattgattgcctagcgcttttgatgtgttctccaccatcgagtctggagccctgcgaattgattgcctagcgctgttcgcctgtccaccaccctcaaatcttattcggagacccatgaattgattgcctagcactgatcatgtgtcctcaaccatcgagtctggagccccccgagttgattgcctagcgttgttcacctatcctccaccctcaaatgttgttcggagacccatgatttgattccctagcgctgttcgcctatcctcgaccctcaaatcttattcggagacccatgaattgattgcctagggttgttcatgtgtcctccaccatcgactttggagccccgcgaattaattgttcagcgctgttcacctatcctccaccctcatatcttattcggagacccatgaattgatttcctagcgttgttcatgcatcctccaccatcgagtccggagccccacgaattgattgcctagcgctgttcatgcatcctcaatcattgagtccagagccccatgaattgattgcctagcattgttcatgcatcctccaccatcgagtccggagccccacgaattgattgcctagcgctgtttgtgcatcctccatcattgactctagagccccgtgaaatgattgcctagcgttgttcatgcatcctccaccatcaagtccggagccccacaaattgattgcctagcgctgttcgtgcatcctctaccat

SEQ ID NO: 128404 - DNA, 244 bp, Glycine max
  unsure (1)..(244): unsure at all n locations
  Clone ID: PAT_MRT3847_86954C.1
gtantttgtgtcanggctatgcgttatgaaaggccttgaccgaggtcatagcaaagatcgtgaatcagagaaaacggaagagggcacttaccatggaccgtcaaccaataagccaacaatgactatgacgatgggctgaacagaacactattgaaagagacaggaggctgatcaagatatggaacatgacgcatggcaaggtctggaacaggtatgtgggtcacatagcagacactgagatcaa

SEQ ID NO: 128405 - DNA, 237 bp, Glycine max
  Clone ID: PAT_MRT3847_86955C.1
tttttacctttttttagactttaaacaaaatggacatactgtgactttactcaaaatggacatacagcgacaagttgattacactggatatacacttcctttggatacacattgcgactctcctcgtcagacctctttcacaggcttattgacaactacgaattctacgcactaatgtgaattgcagggagaaagcttaagaatagtcaaaaggatatatgcacgcacaaaaaatag

SEQ ID NO: 128406 - DNA, 246 bp, Glycine max
  Clone ID: PAT_MRT3847_86956C.1
atcaccggtttacaagcctccagtttataaaccagctgtttacaggcctccagtgtataaacccccagttgaaaaaccacccgtttataagccaccagtttacaagccaccagtgtagaagcctccagtgtacaagcaccagtttagatgccaagtgtgtacaaaccaccagttgagaagccaccagtgtaccagccaccagtatgtaagtcacttgtacacaagccactatgcacaagtcacagt

SEQ ID NO: 128407 - DNA, 588 bp, Glycine max
  Clone ID: PAT_MRT3847_86957C.1
ctccccctctccatttaacattttatcaaaacatatagttagaactggtttagaggttgaagataaagatcgaattgcattactgagagtgaacattcacagtctggttatatagggctgttcaaaaattattttgaactgaattaattgagaacttcaactgaacttaactgtataaaattaaactactattgtaaaaaactgaactgaactattttgtaagttaagttttatagaaccaaactgtctgtcagagaacagttcagttcatgtgtttgcaaactgttttgacagttttaaaaaaaaaaacaagacaactgaattattgattcatgtactcctatatgtatcgatcacaagctagctttgcttctatagggtctttctccaattatatattgagtatcatcctagctacgttttgttgggttattgaatgatttgacctttttttttggaattattttctcctatgccacatgccataaaatcgagttttttaaactgtgctggaagttttaattctggacctgtacagaacatagttattattcaaacaagtgaaatttctgattcaagcaagtctca

SEQ ID NO: 128408 - DNA, 470 bp, Glycine max
  Clone ID: PAT_MRT3847_86958C.1
agtctctccgttctttcacgcgacttccctcttcaacaacgccactccctttatcacgccggaggcacgacggagttgacgaccggaggacggcgcttcctacttcgttttccggtacggtccgaggtctctcttcgctcttcagtcttctctctcccttttccggcactgtccgaggcggtctcacttctctctcccttttccgacgaggtcaccactgtttgtgcgttttccggcgaagtactctccgtgattttcgctttttgcgctcgatttctctgcattttatctgttatgtattttgaagtttgatttctcccctgattttgaaatttgatataaaaaaaattgaggttgcgttatgtttttttatgttctgacttctcagttctcatgttctggtttcttttctcatttctgatgttggtattattgcgtgggtgtgttgctttgaaaaatgtctacaactg

SEQ ID NO: 128409 - DNA, 303 bp, Glycine max
  Clone ID: PAT_MRT3847_86959C.1
gaagagagaatgatgatgaagtctgctatgtgtgcattggtgcttgtggcactggttgtggttgaagtggggcccatggctgacgctgcggtgacttgcaacccaccacagttgactccctgtcatccggcacttcactcacgtcctgcaccttcgagtgcttgttgccaaaacctcaacgagtcaccccacgcctctgtcgctacctcacattaccaagtatcgaacaatcacttaactccccgaccggaagcctcctttccagaccttgcttcatcaacattgcccaccatttcaagcacc

SEQ ID NO: 128410 - DNA, 568 bp, Glycine max
  Clone ID: PAT_MRT3847_8695C.1
ttgggggggggggggggggtacaactaaaagtaagcatgaacagctaggatggcaccgggaagactataagacgagggtcctcgaaaataaaaacgacgaactacgaatacaatgaaatttgaactaaggtcttggccagtgtaaaacctaaacaagagtctaataagcggtaagggaatagaggataataaaaaaccttcaattaattgcacaacaagttattccatatactcggtcgttacagtttcctcgggatatctctctcatccttcctctcctcctgcaactcctcctcttattcaccaatcacaccaagttccactgcggtccagtttgtcacttcaaggttcactggatcgatctcgctagctcatcgtagactgtggtgagacgcgtattgaaaggtaaggtatgccttcgtcggggataatcgtcgcatgccctagaatttgcctcggatttaatggaagtcttggctagtatagtttatgggtgctactgcctcgaagactctaaacctttctattcagtctttggtttaatacggctctacttgcaagcctcaag

SEQ ID NO: 128411 - DNA, 794 bp, Glycine max
  unsure (1)..(794): unsure at all n locations
  Clone ID: PAT_MRT3847_86960C.1
ggctcaaagcactactggccgaagggcgtatcttctgtgacatgccagcattggccaacagagatagtgtcctgatgaaggatacttgcctacagaactcttttatctgtcagccacagcaaagaaacatccatggtcgtatctttgggggattcttgatgagaagagcgtttgaacttgccttttcaactgcttatgcctttgctggtgcagcacctcatttcctagaagttgatcatgttgatttttttaaacctgtggacgttggaaatttccttcgtctcaagtcttgtgttctgtacacggaacttgacaacatagctgaacccctggtgaatgtggaagttgttgcacatgtgacaaagcctgagcaccgctcaagtgaggtatctaacagattctacttcacatttggtgttgatcctgtggccattaaaaatgggttgaggcttctacatgttgttcctgctacagaagaggaagcacggaaggtgcttgaacgcatggatgctgagaacctgagtttggttaaaaaagatggtaatctaaacgttgtcaaggagaacaagtgtacggagaaaacaaatctctgatatagcacctgtagaactttcttagtagttgtggattgaactacagagcgattttgaagggtttttttttttttttccattcacgattagaggtaaaaagataatagcttctcttggtggttcaatagaggaggcaacacaattctcaaacctttagaaatcaataataataatcgcaatttccttaaaannnaaaaaaaa

SEQ ID NO: 128412 - DNA, 139 bp, Glycine max
  Clone ID: PAT_MRT3847_86961C.1
gaagttgaaaatcataataattctatttacttccgttcctttacaatatatcttacaaaaggtaaatggagttctgggccattcccttattattgttcccgactaaagatgaaagaaacaggcttaccttacaaccgtt

SEQ ID NO: 128413 - DNA, 178 bp, Glycine max
  unsure (1)..(178): unsure at all n locations
  Clone ID: PAT_MRT3847_86962C.1
aggagngncgatcgtngagaggacgcgcaagaaaggaagggatgctcgngnnggagggnncctntgnncangnagangagnngtcccnagagngagnanncttgagccaggatgggggacagaancnatgaaaangggaggncgaggagggggggangnncggganagggagnagccc

SEQ ID NO: 128414 - DNA, 293 bp, Glycine max
  unsure (1)..(293): unsure at all n locations
  Clone ID: PAT_MRT3847_86963C.1
gaatggnaaaaggggagaaaaaaaaacggttaaagctctcatttgaaaatttttcacccttgggggcacaactttgaaacgtaaacactgtgaaaacccggtgcaaacgggtgccttagattaaaagctttgggaattttgaactaattttagaaaaggcccatacctggtaataacttttgccctttaccggggggcttttcaaactggttgggcaaaaaaataacgtttttttttttttgaaaaaccggaggggccattgtggggggccctaaattcaatttcccgggttt

SEQ ID NO: 128415 - DNA, 436 bp, Glycine max
  Clone ID: PAT_MRT3847_86964C.1
gtttagaaagagttcggtgagcaattgatatcccatgttgatacattcagcaaagacctgttcgtttcattgaaaggggatgctgtacagcaagccagtaagcaagatatttaagtttgtaaatagaggaaaggttttttgtcttttcaaatgcaaaatggtttttaaaatggtaatttaaatcaggtcccgcttttgaatacttggagaatgctcttggtaaatttgatgatgggccattcttgcttggccaattcagtttggtaagttaaaattttaatggtcttcaaaaaaattgttttccttttaaattcgctggctttcaggctgattactaatgcttgtcgtgatgcatctgacgaattagaattcattaccttatcatgtcacacattatcctttaagattagctttcaccatttctgtttatttctta

SEQ ID NO: 128416 - DNA, 191 bp, Glycine max
  Clone ID: PAT_MRT3847_86965C.1
agaagagtaaattatatgtcctatagtcctatgaagaggaggagagagatatcattggaggaggttttcacaagggatctcatggtaaataatatatctgaagcttaggtctttaaccaagccgagtgacattgtgtgatcatgtagccgatctcatactaatgggataaggctttgttgttattgttatt

SEQ ID NO: 128417 - DNA, 579 bp, Glycine max
  Clone ID: PAT_MRT3847_86966C.1
aaaaaaaaaaaggccccaggcttttaaaattcttttacaagaaaaattaaaggcaaaaaaaaacccctaataaaaaattttggcttaacccaagggaaaatcccaaacccaggggtaatatgggggccgggggggggaaaacaccccaggggcccttttgggcccccccaactagggggcaaaaacccttaaaaaaaacccggggacattgggggccacttcccattcaaggggggaaaacctgggccccctggggccctttttcctggggtcccaggggggctggttcaacccccgggggggaaaaaaagggggtcccaacccggggggggggcaaaaaagggggggaaagggtttttttggaaaggctaaacccttcccctatttttttaaaaaggggcccccacaaacagggaaaaaaaaagggcgggaccccgggtttgaaaatggggccgaaaatccccccagatttttagaaccctttttgggaaacaaaaacccctaacacaaactttttgggaagggggggggatttcccccccccaaaagggggagtgtttcccgggggggtttcccccc

SEQ ID NO: 128418 - DNA, 435 bp, Glycine max
  Clone ID: PAT_MRT3847_86967C.1
gctgaaagttctgcggccggataaagttctgaatcatggtctctttatccttaacgaccgcaaacaccgatcctctggggggtccgatgaatggaccttgtctgagcaggctgcagatgctgctatggatcgtcaatgtctcgacgctgccatggactgttcaaaggttctttaaatgacatccccagcgagtaaaagagttggatggctacacgcaatgttgcttgaagcaaaccgatcctgggacttggctgactaggcttacacaggccttccagaggtcattcctattgatcaacccattcatgctaggatggaggatctgctaatggctcacagctatatacgagtgtctatagatcggctcaataaatatctggcaacatacatggaacatcatgatgcatgcagagcattgactggatgctacatctt

SEQ ID NO: 128419 - DNA, 401 bp, Glycine max
  Clone ID: PAT_MRT3847_86968C.1
cccactcaaccgctgcctatttgaaaatttccacacctgttttaattgccgtaatgatgtgtgaagtgcgcgtcattttaaaaaaaaaaaaaaaaaaaaaaaaaaaaaaaaaaccaaaaaaaaacaaaactgacgggcggccgatctaaaaaacccaaccttcccaccccgagcatgcaacgtcatatctcttcaatagagccacctaaattgaacacaccgacccacgtttaacaacgtccaaaaccggaaaaaccctgacgtaccccaccttaatcgcctggcccaacatcccacttccaccagcaggggaaatatcgaagagggccaaaccgaccgacatttcaaacattagcacacccaaaatggcgaatgctacaccccctgaaacaacccaacaa

SEQ ID NO: 128420 - DNA, 238 bp, Glycine max
  Clone ID: PAT_MRT3847_86969C.1
cttttattccaaaaaggggaagttattgcagatatttttgtttacatattgttaaattttacatttctaaaatgataatagttttattatattacaagcatgcaatgaggatagctctacaatagctaagatactatttgtggactttttttccagatttgagaatataactaagaaacaagctaacaatgcaatggtatattactataactctgaatgagggattttccaacaagac

SEQ ID NO: 128421 - DNA, 766 bp, Glycine max
  Clone ID: PAT_MRT3847_8696C.1
ccacgcgtccggattcttttcttgaacctaagacacagtaacttccttttttcgctggttatgttccaatgtttcagaacatcactattgcaagcttttttttttttatcccttcaactctggtctttctttcttgagttctctgcgctgaatggtggtgtaagctgaagaagaagaataactgaagctgagagagagttgttgtatactttgaagtttgaattttgaaggaaggttggtttctctttggcagcatggttatggggagaagaacactgttgctcttggttttgtgcttgtgcttgtggattccctttgaagtggtggggagaaaagaaccttttttttcacctaccagtgtgaattccactgtttcttctagacccaaggttgtgaagtttggtgctctctttactatggattctgtcattggaagatcagctttacctgcaattatggctgctgttaaggatgttaattccagcaccagcattctccctggcattgatctgcaagtaattttacgtgatacaaattgcagtgcttttcttggaacaatggaagctctgcagttgatggagaatgatgtggttgctgttgttggtccactgtcatctggaatagctcatgtcatatctcatgttgttaatgaactccatgttcctcttttatcatttggggcaactgatcccactctatcttctctacaatatccgtatttcgtccgcaccactcagaacgactattttcagatgtatgcaattgc

SEQ ID NO: 128422 - DNA, 335 bp, Glycine max
  unsure (1)..(335): unsure at all n locations
  Clone ID: PAT_MRT3847_86970C.1
cgatnaggcacgcgnacgaaaagcncngaatgnggctcnatggaangaccgancaganancaaaagatnnntnntnacnancagannanttancatcttcagagaactgttnaaggaactccagcanaatgnnatnnagcncnnnngntnannnananagtntnnnagngnnaggggatagnanaatngttagaagtgaaatnaganncnnaaagggaggnnagaaacnaagtaagnnncaannncgattgnngnngttgngagngaaggatgntnanagagggngntnnaagnaagananacngggngangnnnngnnagngaaagangncann

SEQ ID NO: 128423 - DNA, 172 bp, Glycine max
  Clone ID: PAT_MRT3847_86971C.1
tacaggtgtcagaagacggctggatgtgatgcaactgagtgactgacaaaagccatttccatatacagcctaagataatgaagagcactagcttggtcgctatctttctactttgggcctttatctcatacttaccttgcggcaccagacattacgtgctctacgtggattg

SEQ ID NO: 128424 - DNA, 715 bp, Glycine max
  unsure (1)..(715): unsure at all n locations
  Clone ID: PAT_MRT3847_86972C.1
ctcagcccttgtcttgtcagaataccaagctgcaaccataaagagagacccttttggctttcggttagtcagctcccaattagacacatcacccaaccaaaacaatgaagtagttactgatggaggacagaaaagccaacacaatctctgtaatatcagtgattgcactgatcatcctcatcatcgtcgctcgtgtttccttgaagctctcgcgtgccttcttcctcatatgtggcgcttctattgctgtgatcctcgctgtcttttcttgtgcactcataaggcaccgttacaaccacagaaggaggttgttggagtcacagttgaagacagaagggagagagcttcgaatagagtacagtttcctaagaaaagttgctggtgttcccacaaagtatcgtttcaaggagcttgaagaagcaacggatggttttcaagcacttttaggaaaagggtcctctgcttcggtcttcaaaggcattctcaacgatggaacttcggttgcggtgaaacgaatcgacggcgaggagcgaggggagaaagaattcagatcagaagttgcagccattgcaagtgtgcatcatgtcaacctcgtacgtatgtttggttattgtaacgctccaacagcacctaagtaccttgntgatgagtacatcccanacgggtccttggattgttggattttttcccttaaggaaaaatatacacgtaaagg

SEQ ID NO: 128425 - DNA, 1939 bp, Glycine max
  Clone ID: PAT_MRT3847_86973C.1
gccagaccgaatgaagatctgaacaatcttgattgcacacgagaacatgaatgtagaatgtctttgccacaaccttgccaacctcacggcgtggtcctcggctaccgctttcactgacccctgtgcttgcgcgccttaaagaccggaggaagactgtacctagggagaaaaaaagtgtccactccaatgttttgattatgcatccaggtaactatgtgaagctgctgttatcaatgcataaacaactttgggaagataagataagtgtgacttcacatagtagtttgagtgtattacggagaattctcggtgaacatcagctatcatgcatggacctttggcatgtaaatactgatggcatcttttttacttagcacaatgatgaagcaccagtagttctctccaaaaaatcttacccggcctggtaaagggctctttctttttagccccccagactttgcatcggcctctgaagtctcgaaattgcagtctcaagattgaagggccaggaaactatgtcacggaagccttctcaaagcctcaagaaccttgcaaaggatgagtttgagagcaatttcatttcagctgtagtacctcctggtgaaattggggtgaagtttgatgacataggtgctcttgaagatgtgaaaaaggcacttaatgaacttgttattcttccaatgagaaggccagagcttttctctcgtggaaatctgttacggccctgtaaaggaatattactttttggtcctcctggcactgggaaaacccttctggccaaggcacttgcaaccgaagctggtgcaaattttataagcataactggttcgacccttacttcaaagtggtttggagatgctgaaaaactaaccaaagcgcttttctcatttgccagcaagcttgctcctgtcattgtatttgtcgatgaagttgacagtctgcttggagctcgaggtggtgcttttgagcatgaggccactagaagaatgaggaacgagttcatggcagcttgggatggattgaggtcaaaagaaaaccaaagaatccttattctgggtgcaactaaccggccatttgaccttgatgatgctgttattcgtcgtttgccaagaaggatatatgttgatttaccagatgctgaaaatcgaatgaagattttaagaatctttcttgcacaagaaaatttgaattctgattttcagtttgacaaacttgctaacttgactgatggatactctggcagtgatttgaagaacctctgtattgctgcggcatatagacctgttcaagaactcttagaggaagaaaagaagggagccagtaatgatacaacttcgatactaaggcctcttaatttggatgattttattcaggcaaaatccaaggtgggtccatcagttgcatatgatgcaacaagcatgaatgagttgaggaagtggaacgaaatgtacggagaaggcggtagtagaacaaaagcgccgtttggatttgggacctgattttgatggttccatcactaacttatcaccaatgcttcttagcaaagcaatttaccggacgtggcaaagagctctagatagatttcaccttatacttttcaacggcttctgcatttgctaattttttcgtcctcatttggtataattttcggtacaatccaaatttattcatacgaatttgttctgtttatgaggctgtgtttcaagctccattttgagctgatataagagtaattcagtttaatgtgttgtaatgaaatgtaggtagcctctaattttgtctagccaatcttatttacgcttaagcaataggggtaatttccccaatttttttttcagcagtgtttaataattaaatgtcatctcatgtattgttttaccaaaaatgatctgctatgcacctgtatatttggttaaaatggctcccgcgcaataattgg

SEQ ID NO: 128426 - DNA, 687 bp, Glycine max
  Clone ID: PAT_MRT3847_86974C.1
catgaaagaaataaaagaccgtctatcattagatcactctgcctaacatgggagggagatttgtgttcaccccaattgtgggtttggatccatctgatagaggtccaacattagaaggggaattgctaggggcacccaacaacattgctggtgcacccaacaatttttcaaaaaccccaaaatacccctgaacgtttttcaaatgaaaaacaattttgctttggtgtgatatttgtcaactaaggtacatagcttttgtgtgtatcattgtttatgatgagggaagcccataggcctacaggtaacttacgggtaaggctcatatgacggggatcaagggattgctaggtgtgacattataactgcggaagaaaaaaaacttatttcgtggaagctcacggaagatgtctttcgggagattccacggaagaagttttattccgttgttgtaactacaactgcggaagacagtttcttccgtggattaatttgttttataatttttagttttaagattattttgaatgttattttggttaattttatttgtaatttatgtgaaacataaaaatatatttcttggttgaagtgttgatttttttgcctaggttgaagtattttttggttaaatgaactttgtatgttatatttttgaaattatgtaattaaaagttgaatttggttgtt

SEQ ID NO: 128427 - DNA, 252 bp, Glycine max
  Clone ID: PAT_MRT3847_86975C.1
gtaatcactacgtcgtcgttggaatatctgtgtacgtctcgaacatgtgaacgtgactctgcgcaactccggacacgagtaagacgattgtgttcatggaagaagcatctggagctcctcatttctgtctagtctcgagattatgctgtatgaatgctgaaagtcacagttccagacagaagctagactcgaagatctgcgagttataccatggccggtgcagttggggagttgaagatcctcgcaagacca

SEQ ID NO: 128428 - DNA, 323 bp, Glycine max
  unsure (1)..(323): unsure at all n locations
  Clone ID: PAT_MRT3847_86976C.1
ganaangngntnnnanancantatggttgaantctcagtncncanttcttcatcgccgacttcgnttcaatnggagtgncatttcnaaagtgngcggttgcagtttganatgggtgtggggaggtgatncngggggccattgntcgtggccanngcttgagcttcggcagtggtaacatttcccctagnngntggnantcatgctccttcatgnntagggtgtacatgggcattgtcatcatcctcgttaagctcttctggaataaggcccaaccagnnctnacaagttcgagccaactccaggacgacgngggaattcgggt

SEQ ID NO: 128429 - DNA, 188 bp, Glycine max
  Clone ID: PAT_MRT3847_86977C.1
tcgctccgcgactttttttcacaagaggacagcctcacagcttggtcaactcaggtgcgtactgcagcaactatgatggccgatgggcgtccatatttgtatgctatggagcatgatactgcagggaagacatttcaaggtgatcatgtcactggtgctaagatgcagcacatgacaatctgtggcat

SEQ ID NO: 128430 - DNA, 419 bp, Glycine max
  Clone ID: PAT_MRT3847_86978C.1
cttggggggggggggggggggggggggggggggggggggggggggggggggggggggggggggggaataagaaactgcccaggttacaggtaaaactgggttgtttattaggggtaatggggatggataagggtaacaggctttaacggtaaaaaacaacataaccggcaggtttcaaataggaaggaaataaataaaagaccgccaaatagaaatgacaaatgagaccctagagtggggtaggcaaagggtaaaacttccacaagtagaaaatggaggtaaatctttaggccggggtttgataaatggttgttggggttgaaccccccaacgtaggtggcagcggcaagcgtggcccaagggttgtaccccgtgggtttggcaatagcctgccgatgcctgcctaacgaacccttaaa

SEQ ID NO: 128431 - DNA, 188 bp, Glycine max
  Clone ID: PAT_MRT3847_86979C.1
ctggtgcacacaatgcttttctcatgaatatgccaaatgctggccctccaatgtggagatattatggtggagagctcgcctgctaagtttgttagaagaccggttcgcacattaaatgtaccaaacccttactcatacaacttggaaagcctgctgttcataccgtcaattgttatgctatttcccac

SEQ ID NO: 128432 - DNA, 448 bp, Glycine max
  Clone ID: PAT_MRT3847_8697C.1
cccacgcgtccggaaacttttaggcattacttggttgttcctgtggcgcacattcctactgttaaatatcttcagaggaaaactgacgactattctttgggtaaagaaactgatagctgttgtcacttcagattataagatttatgtatgcatatgttcaaatttctactgtttcaatctatttcatgattgcctattttatacagtgagtcacatgttagaggtggggaagacgttattaaatagagatgcacctcagtcccagcagtacaggtattttagttgcttacaacttacatgggcaatgcttattatttttgtttgtcgagtttcttgtgaaattagattattgacacatgatgttgggttcaattgcatttgctgcccctaattaatgattgcacttataaggttatataacttcttgtgcacattctgttttacactc

SEQ ID NO: 128433 - DNA, 690 bp, Glycine max
  Clone ID: PAT_MRT3847_86980C.1
tgttcatatggatgaccagaaagttttgacatgtatgaatctaataatgtaaagggagacagaaaattgttaggtgggagtgggaggaaaatgaaatctctggagggttgtgaatcctcaatgggaagtcaatgggctctacaaagaagaatactcggaatgatgttggagtgctgtcaagaaaggaacaaagtacagatgcattgactatggaggagctagtttcaaaaactatgaagcttccacttttatccagttcatattctttcggtgatgacttgcttaaggctgtggatgggcaatgtgattcatcaaaggaagccaacaaagttatggtgagggagaaaaccttctctgatcagggacaaagggaacaggtggagtcaacatctactgaggtgaatggttctgctgagaaggcaaagggaagttcaggaagaaaagttgtgggagataaggtttctcttgatgactacccagtaaaagaaaatcctcaaggagataaaaatttcaactcaatgatagttgaatctaatgtttccaaagttaggacagaaccaaacactgaagagctgcctaagaaggctaatcagagaggtaacctctctgaaccagatggtatagaacatccatttccagggggtaagaaaaagccaaagggaagtcatggccccatggttatggagaggg

SEQ ID NO: 128434 - DNA, 290 bp, Glycine max
  Clone ID: PAT_MRT3847_86981C.1
cccacgctttggtttttctgagctaacaagcattggatgaaggaagatacagatgttatatatgaagatcgtatctctagacggaccagtaccagaaccacacctgaggccaccgacgagacccatgaacagcatactagaacaacttgaaagaagccataactcaaacaaactgccgagtctacacccatacactaaccattgaatgcattggctgggacgagccagactaagccatagacagatcacgcgcagattcagaccccaaagccagagccacaacactgcca

SEQ ID NO: 128435 - DNA, 458 bp, Glycine max
  unsure (1)..(458): unsure at all n locations
  Clone ID: PAT_MRT3847_86982C.1
aaaattcccgggacgacgagctaatanagaacggcggcacgcaccataaaaaaaaaaagggggnntatttataaaaganttattccggggtttaaacccacctttagtttggaaaatgggaaacaaaagtctgacttaggggatcagaccagaggaagaagaacacaggggggcacaaacaaaaacacccctaaaggtccaacacaaaatcacgaaaccccaaatccttccaaagctagaaaggacaaagtactcacaaaaccgaagtaaaaacgaaaggataacaacaacaacaacggggaacaaaaaataagggttctcaatctaactataataaaattaaagggattaaaaaacagggcgcggggaattgcttgatgaaagcgacaaactggtaaacgagggccacaaaaaaaaccttagggggggcgagcaaaagaaacacgggggcctcgccc

SEQ ID NO: 128436 - DNA, 702 bp, Glycine max
  unsure (1)..(702): unsure at all n locations
  Clone ID: PAT_MRT3847_86983C.1
cacgcgtccgtcagctgttccttcttccatcttcattatatcagattctcaattcgtcaagctctatcaatgggaactgcatgcttccaaaatccgagatcttgatctaggtatcagaatttttatctctgggggtatcggtgtttgtaacaattaggtctctatgttcnntttggttggtgggagtatgggattagatgtctgaatctgaaattgtgcttgatttgggggttttaaggaattagaggacatggattgtgtagggcattcttctgaatcaaggtctggagtttgtgttgcccaatcagtagaaaatggaggttttggtggagtgggaagttgctgtaagcaagcttcccctccaaggagtgggtgggtctagaaatactagtccaatgagccgggccgggtccaggaacacgagcccttcacggcagaaggttgttaagaccaacctaagggtttgggatgaggaaacacttgccacatttggtaaggtagtgcatgctgatattcagatggaggataatatatgggcaatgttgcctgaggacttgttgcatgagatcttgcttagagttcccccgtttctgattttccggcttcgattggtttgcanacgggtggaattcgctgctacaggattagcagttttctcaaattccatttccagtgtcccatcacatggggccgtgtctcctt

SEQ ID NO: 128437 - DNA, 495 bp, Glycine max
  Clone ID: PAT_MRT3847_86984C.1
ttctatttttttttttaaatttttttaaaatccctctgtataataaaatggaatgggggggaaaaattaacatgtaattacgtgacctaaaattttgtcatttttatttaaccggacccgggggaccacccggaaatacggaaccggaccccgcaggggaaacaatttacctaaaaggaggccaaaaaaaaacagggcataaagaaggaaaaagatgatccctggggaaaatggataaccgctaaaactaccacaaaaaaaaacgagccggaaaaaaaaaaagaaaaccccgggggccccaagaagggaccaacccacaaataatgggtccagacacaaaacccattatgaaaaaggaaaaaacggaccgcccacttcaaaaaaaaaaaccccaaacaccccgggaaaaggggggtccgaaaatggcccccccagggggggattttttatattaaaacaagaaaaaaaggggaaaaaaaacgaaaaatgacccca

SEQ ID NO: 128438 - DNA, 662 bp, Glycine max
  unsure (1)..(662): unsure at all n locations
  Clone ID: PAT_MRT3847_86985C.1
ccacgcgtccgcaaagtaaatcaaatccaaccagagagagagaaacagactctaacccgaaccttgtcaggctgttccttcttccaatcttcattcatatcagattctcaattcgtcaagctctatcaatgggaactgcatgcttccaaaatccgaggtaattgtctgtcttcacccccccaccatagctacactctgcctttctatgctctctgctttaaaaaaataatcttttttcattcggtgatttatatgttcatccggggttttgaaatctttatcattttagatcttgatctaggtatcagaatttttatctctgggggtatcggtgtttgtaacaattaggtctctatgttctttggttggtgggagtatgggaatagatgtctgaatctgaaattgtgcttgatttgggggttttaaggaattagaggacatggattgtgtagggcattcttctgaatcaaggtctggagtttgtgttgcccaatcagtagaaaatggaggttttggtggaggtggggaggtgctgtaagcaagcttcccctccaaggnagtggtgggtctagaaatactagtccaatgagccgggcccggtccaggaacacgagcccttcaggcagaaagttgttaagaccaagcctaggggttttggatga

SEQ ID NO: 128439 - DNA, 807 bp, Glycine max
  Clone ID: PAT_MRT3847_86986C.1
cctcaaattttagctattttatttattaaaagtttaaatacaaccaaattaatcacatctcggaaggaactgtaagggagagtgtgtactgtgcagtcaatttccaaccacaataagcaatacttataataggacccagtgacccattatttcacatgcagaaccttatgtactctcagatccaccgattgatggcggttcctgcatgcatcacaagtcacaagcatataatacctaatttaaggtttttccccgccagctaaaattctcatgttcactcatggtcatttcattaacatactatttatttatttttttgtaaaaaaattcaagtgttgaatattaattttgaggtactgaatatataagttttaattaaaaaaaattatgttttggtttgggtaattggctcgattcagtttcggttgatctagcatgatattattccatttggatatctcggatagtaacccaaattttatgtttggtgagacttataagctattgtcttttttttttcttctcaattttatgcttattttttatttaaaatttagttttatctttttattcaatttaaaaactttcttattttctttattgtccggacaaattctcgtatttaatttaatgttcttacatgcttacaacaaacataataatcaatccctcaattgtcattgttacatcattctttaatattagatttttttaaaattatttcaattttataattatttactattttttttattttataattacctatttttgatcccttgcattattttttattttattgattaa

SEQ ID NO: 128440 - DNA, 199 bp, Glycine max
  Clone ID: PAT_MRT3847_86987C.1
gccagaagggtgcagcactcacggagagagtattaaagctgtaatgaagcttccccgactacctaacattataatgcactatgctgatcattcagctggacatcttatacatctcttgcaggctctatttttatatgacccctgtgaaagacttacagctaaggatgctttgacgcattccttctttactagataccga

SEQ ID NO: 128441 - DNA, 826 bp, Glycine max
  unsure (1)..(826): unsure at all n locations
  Clone ID: PAT_MRT3847_86988C.1
ctttgcaaagatcgtaaacttattgatgctgagattgtgcttgcagatatgataggtcgtggggtttctccgaatgcagaaagatataatatgctcattgaagctagttgctcattgagtaaattgaaagatgctttcagatttttttgatgaaatgatacaaagtggaatagacgcaactcttgtgactcacaatactttgataaatggactcggaagaaatggaagagtaaaggaagctgaggatttgtttctccaaatggcaggcaagggatgtaacccggatgtaataacataccattctctgatctcaggatatgccaagtcagtaaacacccagaaatgccttgaattgtatgacaagatgaagatgcttggcataaaacctacagttgggacttttcaccctttgatctatgcatgcaggaaggaaggcgtggtgacaatggataaaatgtttcaagaaatgttacaaatggatttggtcccggatcaatttgtatataatgaaatgatttacagttatgctgaagatggaaatgttatgaaggcaatgtctttgcaccaacagatggttgatcagggagttgattgcgacaaggtgacttacaattccttgattcttgcatatcttagagatagaagggtttcagaaataaagcatcttgttgatgatatgaaggctaaaggactggttcccaaagttgatacatataacattctgattaagggactttgtgacttanaagatttaatggtgcatacttttggtatagggaaatggttgagaggggtttgcttttaaatgtcagcatgtgctaccagc

SEQ ID NO: 128442 - DNA, 429 bp, Glycine max
  Clone ID: PAT_MRT3847_86989C.1
tttctggacgatggactcgattcttgatataattttaatgtatcctgccacagtttagtactataaaccacaatgtcgccgtaatggagtgcgaaccatttatcacgtttaatcaaggaaaatgcccccctttactaggcaactactaatgccctagatgaaccagtcaagtgaggaatggaccctaacaagccttttgcagccccaaaaggtctgattctgctacaccaagagttacatgctgatgggattcttcattctatgggagctttactagagagaactgagtttgaaaggccttgaccacttgaagcgcaggcagaaatcatgctcatattatgcgggaacctcagtgtcctttcctcggagaaattccatcactgaaaatgtaccttcagtcataagggcggacacgaggggcacgcttac

SEQ ID NO: 128443 - DNA, 427 bp, Glycine max
  Clone ID: PAT_MRT3847_8698C.1
ggctgagtacatctcaacctatatctccctgttcgtcgatgaggtgccatcatcgcctacaacaagctcaccgacagactgctccgccactcactatcgcctcatctccgtttgcatcgcccatgctctcgccctcttcatctgcgtctccgacggtgccaacatctacggcaggcacgtcaaccctgccgtcaccttaagcgccttcgtgcacggatacatcaccttactccgcggcatcgtttacgtcatcgcccagctcctcggctccatcgtggcctgcctcctcctcgcctccgacactgactcccctgtgccagcatacgagctttacactggagtctgaattggcaacgctatggtggttgagatcctgataaccttcgtttgggtgacacgagttacgccactgacgttgaccccaaaa

SEQ ID NO: 128444 - DNA, 314 bp, Glycine max
  Clone ID: PAT_MRT3847_86990C.1
gtaaaatgctctcacacaatttgctcaccgttacgcttcttccagtctccatgtcaagctccacctcatttaactattgctactgatgacgttcaggtttactatagcaggtacgctaccaggcttactactaccaggccactatcgatgcttggccatggaatcaccgacatggagattcacttcctcgacgtgaaattccattcagtcggagcttagatgggttcacacttagtatgtcacttggtctagttcacaggagtatctgttaccgcgctggcagatgctgaatagttcttcactgctctcatttc

SEQ ID NO: 128445 - DNA, 273 bp, Glycine max
  Clone ID: PAT_MRT3847_86991C.1
ctaggatccacattagagcgcctcctccaatttcctacgttcactgcctccacattccaccacaacactggaatactctctctcaaatattcaccgaaagttctcaactttcgaagattccatgacgaggttaagtttctaaaccttattttcagggaactcaaactgtgtctgaacctgttatttgctttgttgcacataaaatacatgtggggtgttgattttagtgtttgttgaggaaaaaagagagagagtataagtgagtgtagcact

SEQ ID NO: 128446 - DNA, 264 bp, Glycine max
  Clone ID: PAT_MRT3847_86992C.1
ggcacccgattgctcatttggatgtaaaacaacaatacgtaaggctgcggaacaccagttagagttggataaaaatatcttgacccgacacaaaaaactagccaccaacggccttaaatttgtatgggaggaatagatccggattggcaatcccaacctttatgcgacgccacttaattcaacaaagtggaagctctcataaaactgttcgagcaccatggccccgtgggaatgtctttccccccttcttgggcacggtgggag

SEQ ID NO: 128447 - DNA, 217 bp, Glycine max
  unsure (1)..(217): unsure at all n locations
  Clone ID: PAT_MRT3847_86993C.1
gaaaatataancactaacaaaatgaatctgatcaagccctttattttgcttcgatttctgaagggggggatcctaatgggggcggtggtggctgatgagccatctaacgatgaggaaaaaggatcatatggaatttacgaagagtttagtggatgcgaagacgtgcattgaagccttttgagcggaaagaaataccaactaaatcatgataccgaat

SEQ ID NO: 128448 - DNA, 538 bp, Glycine max
  Clone ID: PAT_MRT3847_86994C.1
ggcaaaaaatctactaatttttgttgaagagttgttcgcgacaatcttcagctttggggaattttgcaccgattatttgttcaatactagcaattgatacaaaatataatgcaatttaatttattctttaagccacttgacaaacttgttgaggttatctgaagatagccctttgttgttcattaactcctcctttagcttcaaagaccttgatcgtatgttctcatcactaagtagttggtccaatttgtttcgaatctccaaccttgacacaaatccactttcatttgaattcaatcccaacccaactttcaactcatcacaaatgtatgttttgttataaatttggtctgcaaaatatggccagcacaagaagggcacaccactagacaagccttctatggttgaattccaaccacaatggctaaaaaagcatgctatggcagggtgacttaaaactttctgttgaggtgcccatccaactatcttacctttttgtccttggaattcataagggtatgccatcttattgtcttga

SEQ ID NO: 128449 - DNA, 861 bp, Glycine max
  Clone ID: PAT_MRT3847_86995C.1
tactaatgtatagtatatctttctcttttagtaagtggcttaataagaggcatcatttttgttattttccccttattcattcgtcgctcagtagcactgctggtggctgggtactctgcttcggcaaatgaactattgccaatacaagaaacatacaaattgagaccctaattattactcgatatttgcacaaaacaattgtgaaagaaagaacttcaacttagaataatctatgcataaaataattgaagaactgaatgatatagtaaagaaatgcatttgtcacgaatattcttccagggctacaacaaaaatcacgattctttatcactcagaagaaaaaaactgcctgtaggaccctagctcaaacttctgcagcactggcttcaaacgctctttctagtctggtctgcaatgcagttgaactcctctttggcttcacatcctttccacttttgttgaattctaaatccatggtctgctctgtgtgactccaatagctcccaacagtacctattatgggtgtctcgtcaggactccggcttctagaccttcttgaagatgcagataaagaaaacatcctgatctcttcaacggttaatgctcctaaaattggcctatcctcgcgactccatggtgagcctcttcttccttttggtgtttgttctcccacagaactggtattgttgatggaaattggtgtggtttccgatgattcaaccaaccagctcgagaggctggtgtctaccccaattttggcatcgaacctctgctttgccttgcggtttgacagcttcaaactatgctctggactaatgggtttgttgatatcttttactaccatggttggaggttttttta

SEQ ID NO: 128450 - DNA, 491 bp, Glycine max
  unsure (1)..(491): unsure at all n locations
  Clone ID: PAT_MRT3847_86996C.1
gcacgagctcagactcggataatgcaacancancggtgtctatttncacactcacncgcgancanctcaacacnctgaaagccaantctaangaaccatggcaacacantcagctacngttcttatgagangtcggcgggtcncntgtggacaactgtatncaaagcaagagcncntcctgatgtatcaagaaaccaaactntncattgcanctgatgcgaaggtctaggttgcataccctcctcccccccaaccgnggtttnactttctggccnnnnngntgcatanttccatcaacccncncncctatccgcccgntgngccaggggtcgcanccncactntcccnnnnnccccnncnctggtaacngncttgccttanntcntgaaaccccnncacnctcntctctntgggttttncncannnntggggaccaanntgnaanttatntctaacggntcnaggctnccncggaanctatnttcttataa

SEQ ID NO: 128451 - DNA, 442 bp, Glycine max
  Clone ID: PAT_MRT3847_86997C.1
ggggggaacaccaacggggacaatttacaaacagaagtcgaagtttcagaaggggcatcacgatgggggtttttggggtaattcacgaattttaagactaagggaaattaattaatcaatcgaactggggtttttaaccaaaaaaatgttcccttgttttatgaagcacgaacaattggggcgctggaaaccaatcacttaggggagccaaaagggggatatcctggggggggataagcagcaggggggtaaccagtggggggataacccggggcaggattttcttgagcaggctggccataagctgggtggggggcctacccaaccgaaggaggaacttggtgataaatgggggacatctgctgaataggaggcaccgccattggtggttgggggccaaaattcgcggctcggttgggcatctaaaacttgggctgggttt

SEQ ID NO: 128452 - DNA, 375 bp, Glycine max
  Clone ID: PAT_MRT3847_86998C.1
agagcagaacccgcaactcccccgacgcaccagcctcgcgcctgctcagtcttatgtccacagatatccagaaccttaagtccttcgatccgttcgcggaagccgaagacgcaggcggggaagtcaaggtcagcaatcagcagaactacattcacatccgtattcagcagcgcaatggtcgcaagacattgaccacggtccaaggcctgccgaagaagttcgaccagaagaagatcctcaaagtgatcaagaagcaatttgcctgcaatggcactatcgtcgccgacaccgagatgggagaggtgatccagctccagggcgatcagcgcaaggatatccaggactttttgaccaacaagaaggaaggcctgggtc

SEQ ID NO: 128453 - DNA, 368 bp, Glycine max
  Clone ID: PAT_MRT3847_86999C.1
ggaccggcctaaaagggctatttatcatttacaaacaggggaaaccggcccaaaaagatgtacaaaacggacaaccccagggaaaaaagaccaaagagaaataccctgcaataaaagggggggaaagaaaaaaggggaatttttgactctagggcccccgaaaaaaaggggggggggaacctgactatatggccccccaacatttccctggaccaacatcttcacactaacacagggcccgcggtttgtgaactgcccttcccgatcccacacgagaaacggaaggtttccagggacatccaaaggccccaccccccaagagagggctatatcaataaaaaaaaggggaaggccaaccgaaaaacccc

SEQ ID NO: 128454 - DNA, 395 bp, Glycine max
  Clone ID: PAT_MRT3847_8699C.1
cccacgcgtccgcccacgcgtccggaagaaaggaatctaccttacgaatggtggcatcaagaagcatatgggattgtatagctcggatggtgactaatattgattaccaagagagtgtgagacagataaatctagactttatgttaacggcacgaataagctgtttgtacagacatcagcatcgactacagatattacaaatgtctgtatatccgctgtcatatcagtaaaaagtggttacgtcattatacactgtaattcatgtagtaactaccaaggatgcgatggagatatcattagctcaatctttacctagctgtgacttactcttcgcactatcatcaaatttataatgctacttggcgttataacactgggaatgtctgcatacttaa

SEQ ID NO: 128455 - DNA, 431 bp, Glycine max
  Clone ID: PAT_MRT3847_869C.1
ctttattctttttctgagcaatttaacgtatcaatcccgaacattgaacctagcccgaaaaaataagaagggctagaggtttaaaaaattaaggcattcattcactactaagtactaaccttcatgttggagagcagcaccggcgactcgagaaacgacgtcggactgagccccggcggaatcgtgacgcacggcgagcgcgagatcgggagcttggccggtgacatgagcttgtaccttgctccggcggtggccggagctgcgtcggcggcggaattgggccgattcggatcgtcagagagggcttcgccggcgtccattacggtgtagagagagaaagtgtctctctgtgagagagagggggggttgttgagtcaaaggagaagaagatggaggcaaagagggaagagcaaaagggtcatttcatgggg

SEQ ID NO: 128456 - DNA, 415 bp, Glycine max
  Clone ID: PAT_MRT3847_86C.1
ttttagtcacaaaaaacatcttattgtgagaaaaccaatcatataaatatatatttaaaatacaaaaaacataaagctttttttttttctttctaattttacaactccaaactatatgactctgttatctgataggatggaccctctgcttttgcagttttgtcatgatctagtgtaaaacatatcctcaattctcttatgatatattgttgagaagaaaaaaaatcataaaatatattataatgtacgggatctaaacccatcgaatatctaaaaaaactttgaggttgcttgaaatccatcacttctttggtttctagtttgtttagaaatagaaatccgttgagaaataagaaaaaaatatatgagatatgaaaattataactaacagtctcttaaaatcacatatgagatg

SEQ ID NO: 128457 - DNA, 257 bp, Glycine max
  Clone ID: PAT_MRT3847_87000C.1
tacgggtgggagacgactactgaagggggtctgaaaactgcaaaggcaatgcgaccgactttaggtacggaattgggaattagggttgttcgtgtgactaagatgattcaagtggagttgaacgatctattaaggaataaggttcgcctgaatggcatcgactatgacaccatacgggacctgaataacctgttggcggctcagacgggcacaagagccatcaagatccggatgcagaaatagtacaccatgttcca

SEQ ID NO: 128458 - DNA, 181 bp, Glycine max
  Clone ID: PAT_MRT3847_87001C.1
ttaatggtgtgaggcaattgctttggttgctacatcattggggtttcttgaaacatagagtttgggaattttcggtttaaattgtttgcctgagttggctactagtgtgtggttgtacagtgtgctgttcttcttgatgcaagaacggagcagcttggacaagattggcacgaacgcagag

SEQ ID NO: 128459 - DNA, 368 bp, Glycine max
  Clone ID: PAT_MRT3847_87002C.1
ggctcgagctatatcgatgatgctctcaacatcttatctatatttgcctttatcctgccgaccggcgcctacatgaggagtgagacatgatgctgttgatcgttaccaccctgttcaacacagttgttcgcgatgaatgaactgacgcacctgctggtgggactcaaagctgctggatctacttccatcgtgtcccatctcatccttggcctgattgcacacaacgtacccaccatcacatacaatggttcgactgacgactgcaatatcatcttccaatctgtgtgcaatggagggggactggacaagagcccagctctgaggtggcatcatttccataacgctcagggtcatatttccgtgattga

SEQ ID NO: 128460 - DNA, 591 bp, Glycine max
  Clone ID: PAT_MRT3847_87003C.1
ggctcgagaattctcacaattgttggggacataactccattggatggaggttctaaagcagaaaagaatcaacgagaacaggcaacactagatcatatgtgtaaagtacttggaggaggatgtacaagtactttcttttcactatacatgagtttgttaatgagataataatgaaaattcacaactcttggtctttaaaagcgatagtcagttttacttgtgccttgaggaggaggaggagtaattttataccaagttgttcagtatcttatctaaagtttgttgagtttgctttggatgaaaccaaacgtcacactcacttgatcccttcgcctttacaggaaaagttcagtttcatgaattccaaggatgttaaagggagtcttagtatgctatcatttgaagctacaaaaattaggcttctacgaagattgatcattgagacagaaacaatgcaagtggttttttttaatgcccatcaattatcaaattgatatatggttggtatctactagtgtcttaacaaaatatgcctttgtgtagtaccttgtaatctattacaacaataacaatttcaaaaattgactttgt

SEQ ID NO: 128461 - DNA, 312 bp, Glycine max
  Clone ID: PAT_MRT3847_87004C.1
ctctttttttaggtgtttggtgattgaattaagcaagtgtgtagaaactgaattgcctccaacgtgactacatggaggagctgcggggtggatgtcacaaggggaatactgaatgcatgcgtctatatttgactcgattgaaatgggggagagctccatgacccattaggtcctatactgcgtctagaaagctcaattctggcgtttataacacctacggatgatataataggtcttctaccacataaccaaaaacctcgacagtcttaccactgggggctgcaaactattcatcttcatgctagaacacag

SEQ ID NO: 128462 - DNA, 228 bp, Glycine max
  Clone ID: PAT_MRT3847_87005C.1
cctataaacaatctcaatcataacccaagcaatctattatacactattcacacagtgaggggtacttaacatgatgaccgtgtacttacatattccatacatcctcttttacttcaactacaaatggtgcttcatattccaactaacatgtacaaactacaccattctacttatacattcctcataccaaaatctcacaagatgaatccctcaaccttattactcata

SEQ ID NO: 128463 - DNA, 645 bp, Glycine max
  Clone ID: PAT_MRT3847_87006C.1
cgagacagggtttctctgtatagccctggctgacctggaactcactctgtagaccaggctggccttgaactcagaaatccacctgcctcagctggaattaaaggcatgtgccaccacgcccggcctctgggcaactcttgtgtgtgagtcactgcagtgcatgtgctctcggcctgtgtcactgctcatgtgccacaggagagtaagagcatccctggggcatagggatatatagatcatcacataccagaactaagttgctatggctgcttggtgaatgcccgggaacatgaagatgacaggtagcccctccccagcttcctttcctcccacaccatgccccatgccgagtgagagctcctgaggaacgtaatacctgtccctgggccagcaccatgatcctgtcagagcccagaactgtgtgcaggcgatgggcaatggtcagcatggtgcagtccgcaaatgcttcccggatggtctcctggatcagtaagtctgtctctgtgtccatagcggctgtagcttcatctaaaatcagaatctgccagggagcagaggacagacagatccagttacttccccagcattcttgtcctcctcagtttcctaaagagcatttcagtatttaaatcctgtacgatgtac

SEQ ID NO: 128464 - DNA, 316 bp, Glycine max
  unsure (1)..(316): unsure at all n locations
  Clone ID: PAT_MRT3847_87007C.1
gttgtttgttttctttgttgctgccccgtgttctggtggactgtccttgccatggcgcaggctagccatggntccctctccgagtgacaaccggctatggtgagcgttgcctcggaggatgcctgccccgcgctctctgttcgctgngggtgctctcctcatcccggccttcacaacccgtcctctggtgagcgcgcctgcccgctcggcactcctcgccgggcccctcacacccgggcgcaggggttccaccaccccggtttttgggggnttttgggcccccccccgcaagaaaaaaaaaaaaaaaatatttttt

SEQ ID NO: 128465 - DNA, 705 bp, Glycine max
  unsure (1)..(705): unsure at all n locations
  Clone ID: PAT_MRT3847_87008C.1
ggccggaattcccggctcgacccacgcgtccggcaattttattaaaataatcttaaaaattaagtgttgaaagacgattttcttaaaatatattagtctcctgaaccctttagtgactcggtgtctaatcttctactcatacgtttctccctcagatttaaaattacacccactgtcttttttcccttcacacggaaccgcgacaatgggggtattcgtcagcggggaattcgtaggagctcagaaggtcttggacttcgagctcgacgagttggagaagctcttcgtcgtcgacttggtcttgtttgtttaagaacacagccatgttggggacaccgacttgtttggctaagaggatgtgttctttggtttggggcatggggccgtcggcatcggagacgactaatatggcgccgtccatctgggcggcgccagtgatcatgtttttaacatagtccgcgtggccgtagtggtggttctccatctcgtactccacggtggcggtgttgatggtgatgccgcgggcgcgctcctccggngcggcgacgatctcatcgtattttttgggggcgttattgctgagggtggcatggtccatggtcnaggtggcggtaaggatggtcttgccatggtccacatggccgatggtgccgatgctcacgntggggcttcttgcgctcgaatttgctgcggacggtgaaagtg

SEQ ID NO: 128466 - DNA, 589 bp, Glycine max
  Clone ID: PAT_MRT3847_87009C.1
aattataatttgttcaactatattcacaattcatctaacaacaaaaattacactatatatcattgatgtttcccttgtctaatctataatctatctaatcacaatatataagcaaaaaattaagaaattgggtatctacccgcagcattgcattccaaggttgaagtcttcgattagttaagataagaaattctcaccagtcactgcttaaataaaaggataaaatctgaggtcttagttcttgttgcaaatcatgcattgttgttctttgtgatacttgtagcaaagaattggtaatttggtgtattcattttcctttgcgtaatgttccatgaattcaaggagaacaaataaaatgctctctgtggatcatgtgcataataatgttccttgacattgagtattactaggtccatgtatgagaagtttcatgttttaggagcaatgcgtaaagtagctcattccaagtatctggtacaccagggagacaccagtggctgcaatcttggcgatggggaggtgcagggcccgcattaggaccgagataatagatggatgaatgaccatcttttctctgagatgtcatctg

SEQ ID NO: 128467 - DNA, 3935 bp, Glycine max
  unsure (1)..(3935): unsure at all n locations
  Clone ID: PAT_MRT3847_8700C.1
aaataataaaggataagtagatcagataaaaaacgttcatcaaggagaaaaagcgccacgcactgactaatcaagtgaagaagaagaagaagtggcttgtttaaggaatggcttctctgctcctccctccaactccaactgctacttcttccacagttaaacacaacaaaatccaaacgaaactgaaaccaaacagcaatgctcatgcagctacatgtaatttcttcttatcatcgaattcaaacgcaaaccaccgtttcaactctgcaaagtgccatgcattgttggatgacgtggccaaagggttgttggagagcagcagcagcgttggcgtggaccagttccagagactgaccgaaggcttatcccacatgcagaggtgggagatcctcgtgtttggaggcttgacgtggatttacctgactgcaagaccaggtgttcttgttggtgccattgatgcgtaccttttggcacctcttcaactgggtcttgtcgacttgtctggagcaaggaacttgaaccagtgtgtctttattcttggagacaagcacggtgaatggtccatcggtgatgggtttcctttcgtttgcaccatctgggcaagacaaactggatgccaagtctataaagtcatcttaaaaaggttaaggttggaatccaaggggctgaggagtttggtgattatgagagtggttcaattacaggctatctagggcagcacccgaaacatgtgctgacttccttggaacttttgtagctgatcaaactaattcacagtttacaaaaggtggaaaatggcttgtttggaagtttgagggagatcgtactcttgctgattacatgaaagatcgcaactttccttcaaacttggaatctgtgatgtttggacgtgtcttgcaaggagtagactcttcgaaacgaaatgcattgatcatcaaacaaataatgcgccagatcattacatctcttaggaaaattcacgatacaggcattgttcatagggatgtaaagccagccaacttagtggttactaaacgagggcagattaaactcattgattttggtgcagcaacagacctgcggattggaaagaattacgttcccaatcgtacccttttggatcctgactactgccccccagaattatatgtactccctgaagaaacaccaagtccaccaccagagccaattgctgctttcctttcaccaatcctgtggcagctgggattgtactcctgcaaatggcaataccaagcttaaggtctcctgctgctttgaagaatttcaacttggaactgaaaacctgtggatatgatttgaaaaaatggagggactatactcgcctccggcctgacttccaaattctagatagtgaatctggtagagggtgggacttagcaacaaagcttgtatctgagagaggttccctaagaagaggacgtttatctgccgctgctgctctgcgacatccttattttcttctgggtggtgatcaagcagctgcagtcctttcaaaattaagcttgaacagaaagtgagctgctaagcaaagaggagcacagttgaattcaaaggtgtcccacaccaagcctgcctagtttgtgaattgacaaccatcaattataagattttgttccattttttttttgtttttgggttttcctccccaagtttaaattggggagattttctactcaatttcaggcaagcaataagcctgaggacatcaaagcttacagaaggaaaaattttccctgcagtatacatttacatcttttgtgtaacctatatgacaacaatctcaagcaggagcacaatgtggttttaagagcttaatcagttgtctcctatggtttctttctacaagaggtgaatgcttgaagattggtgggacctcacttgtaatacctaagcttaagttctatgccttgaaacaggacatacagctaagtagagctgcttgctatgacacttattagacgaaacttacatacttacatccaagatgagattatatattgagttccatatagctctgtcatttgaatagtattcttgtacgaaattgtgcttcttgtggctttcaaagagttgtcattgatataataacacaatagttcttcatgagattatatattcagtttcatatagctctgtcatttgattagtattcttgtacgaaattgtgcttcttttggccttcaaagagttgtcatcgatataataacacaatagttcttcacaacaaaattactagcttattttacaaaatgccacacatatgtcggaacatataaagtaaactattggcatcaatacaaacagaatggtacggtgagccccatatttatctcgtcttcgttttactatgtattatcgttttcaaaatgaagctaatactcttgcatccaccacggacatgcttttttacatagcactagttggcaactttccacatacggtgttacagttcgtcatgatagagtactttttccaacacatttcttttcttacaaccccaacggcatttcttagaacacagggaattgaagagggctagccttgtggattgaagggatataatgcttgacgtggaaggtgactttgagagaacaattgcatagccatcatccatgtaatccgttccgtcaggaaagagctgccacacaaggcttccagccccactacctcctttctttgtagagttcaggatggtcttgtacacagtgtttataaggttgtctctatatgttgaattgtagccaggagcttttgcagatacaccaaactcagcaaaaacaacgggcattccaagatacttttcagcatcctctatgtgggcttccatccaagtctttatgaatgggagatgggaatctgcaactgattgtgaaatccaagagtcagcatatatgtgaacagaagcgaagtcaacacctagaacctggtggttcctgataaaatcagttccaacctgtgtagcatatgtgttgggattgaactgagttctctgaggtgttgatgggccataaaatccttctactccaacctccactaggtgctttggatcaattttcttcacatggaatgccatttcttgtatccaatcctgtaacttgtcacccgtgggatctgaggtgcaacgaggctcattcatcaactcccaagcgaaaattgttggatcttccttataagtgatgtttgtgaatgtgttaactctattgagcacagtcttaacatgggccttgtagtagcttctaagagttggatgtgagaagaagtcatcatcagaggtcaagttaaggccagcagcattgccccatttcacatattgtgctttgcctccatatgcctcccagttgttggccaatgataatataagcctgattttgtatttctttgcttcacttaccacaaaatccaaagccttgaagacttcttcatcataaactgatggggatttctgtagggccctccactggccatcattgaatgcccaagtcctacaaactgtcataccaactgaggatgcttgtttgaacacctcagtgacctttcctctggtggactcatctgcagcaaataccatcagccaatacgtgttgaatccattgacatagaaaggtttgtcattcaccacaaattggtttcctttcttttgcaccatctgccaatcatcatctttcatgcccctcatttcatcattatttgagagagaattttccatttcattttggtcttctttgagtccttcctcatcctttatactgtcaccaagtgcattggaacttaaatttttagtaagcatcaaaagaagaatcaaagaaataatgcacacaccaaagctctccattgagcttggttgcctcgaaccgctcgagctgctcgagcggtacgtaatccacatntgttgtgtgtttccataaagttggtaa

SEQ ID NO: 128468 - DNA, 860 bp, Glycine max
  unsure (1)..(860): unsure at all n locations
  Clone ID: PAT_MRT3847_87010C.1
ttctgcggacgcgtgggcggctgcgagaagacgacagaagggggctcaaaataattttgggagaacaaaacacagaaaaataagaacttctcttcttgtaattacgtttggctccaactaatcggatccatcatttaattcaccaccttcccctgtaacccaacacagattacatacatcggattcatcgattctttccttctccagattccgattattattaattatcatattattgttattcaatattcatggcgtcgagttttgatcgatgggaaaaagatcctttctttaacgccgcggaagaagttcaggaatctgcagacaggatggaatctacgtatagaacatggattcatgcaatgagagatgcgtccagcccatggaactgtgatgaactccgccgagatctagaaactacccttggcactgctaaatggcagttagaggaatttgaacgggcagctaggtcaagttatagcagagtttcaagtgaggatgcgagaaatagacaccgggattttattcatgccattggtgacaagattcagaaagttgaacattcgttacaagaatctgttcattcaggtagcaaggcatctctgccttggacgcgtctggatgaaggagaacgagatgagcttgcgtcgtttctttcgggaataccggttctcattaaatgtgttggcagagacaatgaaagtctgcaagctaattgttcaagcaatttacatgtttcatctgggtggggttcgtccgaagcagcgctggagaaatcacgtgggcatcgcagggcagctagtgctgatgctgatattggtacttgnaaaatcactgnttctgacgatgtgcaacaatct

SEQ ID NO: 128469 - DNA, 624 bp, Glycine max
  Clone ID: PAT_MRT3847_87011C.1
cggctgcgagaagacgacagaagggggaccgaccgcacaattttcatgaatttaatgtgatttactctggaggaagctaatcttcatcccaccctactgtaccagctgacacggacatcatctcacgcgtgcttgctgtatatccaattcttcatacttttccttcattgcccaaaataattttgttacgtttccctccaactattccaatccatcttttaattcaccttctcccccttgtaacccaacacagattacatacatcgaattcctcggttatttcctttcccagatttcggttattattaattatcatattattattcaatattcatggcgtcgagttttgatcgatgggaaaaagatcctttctttaacgcggccgaagaagttcaggaatctgcagacaggatggaatctacatatagaacatggattcatgcaatgagagatgcgtccagcccatggaactgtgatgaactccgccgagatctacaaactacccttggcactgctaaatggcaggtaatttctattagaaaatgtactttcacttttttgtatcatcgtaacgagcatgtggttgcatttggatggataatgcagttagaggaatttggaacg

SEQ ID NO: 128470 - DNA, 291 bp, Glycine max
  Clone ID: PAT_MRT3847_87012C.1
agtgtaggaattaaccaataaacaaattgttataaggagaaacaaattcttatttttacccctaccaaactagaagcaatacacaaattttagttgaagactgtcaagactcaagattgcagtcacatggatttcaaaactcataagcttcctcagaggtcctcagggccattaatttccttgtttgtgatcacagctccgtcaggtatttcctgcttcacaccaggttttgcaagaatacttactttgccctgttaaggcacccgtcataacatttgattaatgtcaaaa

SEQ ID NO: 128471 - DNA, 215 bp, Glycine max
  Clone ID: PAT_MRT3847_87013C.1
ctaggatgctttagtatttgtggaagttagtatattgctcaagcctcaaatgtataggctcacattgttgtatgctgtcaaatacgtaaagaaattgggctaaatacttaaattcaattgctagattgtaaacgacctaattaggcattttttgctagctgttggaaatttggtaaggtcattcattaggttaacatctgactcgtgtaattctg

SEQ ID NO: 128472 - DNA, 663 bp, Glycine max
  Clone ID: PAT_MRT3847_87014C.1
aattaggcctataatacatagttttaattatcataatcggttagacataactaaaatctttttccttaaaaaaaactaaaaactttaatcaaataaatctttatagttataataaaaataaatctcataataaataacatgcaataaaatgtgaaactgttgtcaatccttccaaccatgtcattttcccaagtctgatatatatctactacttcctaacaactaaaagaaatgggaaatttacaaagaagcaaattaatttttttgttaacgtctctccctgattttaatggtaataagctatataaatattaagaaaaccaatgttcacttactattgaaaaggcgagacatctgggtagctcagaaaaatatactgtccactagagtacttaaatccttgtggtttagacatgtgcaaggccaagacatttcctgggtacactgcaaccttcagggtcttgacgcttttgtatccagacctaaaagcacgaagtgatcgctcgcatgcgtatagtatcatagcaattgcaaggtacgtcgaagtcgttttcttgtgccatttcttggccaggtccaagtagtaaccgtgaacgatggaaaccccatagacggtgacaaagagatgctgagagtaccaaagcgcattgaatccagtgagcg

SEQ ID NO: 128473 - DNA, 1934 bp, Glycine max
  Clone ID: PAT_MRT3847_87015C.1
cgtagctcggattcggctttgcggctgcgagatgaccacagaagggggaccgaccgcacaaatttcgtgcctgctggtacatttgcgctggaggaacctaatcccccggccaccctactgtaccagctgacacggacatcatctcacgcgtgcttgctgaataagaacttctcttcttgtaattacgtttggctccaactaatccgatccatcatttaattcaccaccttcccctgtaacccaacacagattacatacatcggattcatcgattctttccttctccagattccgattattattaattatcatattattattcaatattcatggcgtcgagttttgatcgatgggaaaaagatcctttctttaacgccgcggaagaagttcaggaatctgcagacaggatggaatctacgtatagaacatggattcatgcaatgagagatgcgtccagcccatggaactgtgatgaactccgccgagatctacaaactacccttggcactgctaaatggcagttagaggaatttgaacgggcagctaggtcaagttatagcaaagtttcaagtgaggatgcgagaaataggcaccgggattttattcatgccatcggtggcaagattaagaaagttgaacattcgttacaagaatctgttcattcaggcagcaaggcgtctctgccttggatgcgtctagatgaaggagaacgagatgagcttgcgtcgtttctttctggaataccggctgctgggggcaaaggtctcattgaatgtgttggcagagactgtgaaagtctgcaaactaattattcaagcaatttacttgtttcatctgggtggggttcatccgaagcagcaccggagaagtcacatgggcatcgcagggcagctagtgctgatgctgacattggtaattggaaaatcactgtttctgacgatgtgcaacaatcgagttcctccaatggttcttctggtcctactcctatgcataaggtagccagtctctctggattttttggttccatggaaaccatctctaagttgaagtggcctaagaatggctatagaaagctgaaagctgttaatccttgtgaagaagtggataaggcactgctagcaccagctggattgaatggggtttgttctttagctgcttttgtttttactctgttaacggagacttgcttgtgtacttttaatgcttttgctgaagtattaatacctcgtgtcaggttcacaaattgagggcatcaaagcatactatgaaagaagtaagagttgccttgacaatggtgatgaatgttatgataagcaactccaggggtggtatggggctctccataggcagcttcaaagatctcaataccaaatgcaatacaatcggccagttcaaatggctgtatgggctgttattctcctttgctttattgttttaattgctttttgcacgatgtagaaaggaagatttagataaattatctatcaatttctggttgcggcaggcataattgggaatggacaaacaatcttttgattcgagttcatatgatctatgttgtcgcttaagcaagcgagagttttttatctggtttctcgctggcatacatggtgtcgatataacatttcaagtgctttgatattactacttgagtcttccattatacctagcagtagcatttccttacttttttctttttcttttttgctatctatttttcattcacctattccagaatggtctcatgaagattgaagagtattccctcttcgctgttgtactatatcacaagatgtaaatgacgaagtcaatgcacataatgttgtaacgaatatgattttagcttgcatgtataaattgaggataatataccatgattctgtttggattatttatgaaataattttaagaaaataaattatataagtttgtcc

SEQ ID NO: 128474 - DNA, 988 bp, Glycine max
  Clone ID: PAT_MRT3847_87016C.1
aataatttttaagataattattataaaatttaataaagttatcatagatgttaatttataatttatatgattgtataattttttttaagtgcatgtattagttattcatagaaagatgctttcatatttaattaaaagtggagaaaaagatgatgagtgatgcatttggcctttttatgtgtttatcacatggtattgacagtatatatagcaatacttagaaggttatcacttgattttgttaagtttttccatcttgtgctactgtgtatctaaagagaggttttctatcaatcacttcctccgttggccctagaggtgaccacttactgggcttttcattgaaaaccatatataaatacccggggaaagaaagctcaagaagtgattgccaaagtaatcattagtgcagtataatggtggaggttggagtggtgtggagcagcctctggagtctggccatcaatgcagacctgtagctgagtttgtcatgtagcagggattgtggcttctaattgcagccactatggttgacagggaaattcccttctttacccctgtttttgtgtgaggctgaaactactttttgggacataggcgttgggcactagattcagtgtttctctatctctaggatgaacacaaaaaataccgaagagcagcacacctgtttccaccaaattgttatcaaggaagaagaaggttttcgggtagtgcggtgagtcgaacatcgacaagcaaggcaacatcattctccaggacgacgccgtcgaacagaggtgcctcgctcttatcctcttgtcacgtcgattgctctatcctagctacctagctagttagttagggtttctttaatgctggcttttaatcaaattacactgcttgcttctatatgtttttcttgctcctccgaattcagatgctcaaatgaaattggatctatcggttccatgtgagtaatgagcaagtagaattctaatttctagta

SEQ ID NO: 128475 - DNA, 629 bp, Glycine max
  Clone ID: PAT_MRT3847_87017C.1
ggaaaaatgatgacagatcacatttctaactagagatacagccagcaagatcattaatttgagcatgagacacttggtctttcacaagaaattgccaatccaataatctttccttgctgaaaagaaaacaaaattccttaagaaaaaataaaattgtacaacacataaatagtatgaggaaaagctcaaattccaaaaccaaacgcagtccgtatcctttggaaaatgagatcccgccatcccctctctgggttctccaccacagttgcatttccatatctgtcttcttcagggacatcactatgtgggagcttaacaacagggactccatcttcaggctcctcaaacacaatcctcaccatggattcaatcccatccggccagctcccaaacctccatccctgcacaatcagcttcccttcatccaactccaaattcttcccggtcaccgacccatcaaaaatactaaactctcctccaacctccttgcttatccttgcattgctctgcgtaaaccccctccatctattctcatccatcagaatctcaaacaaatccctggccctacaattaaacttctcaatcaaactaatcaccttaaaccccttcttcccctcattcttcttaac

SEQ ID NO: 128476 - DNA, 347 bp, Glycine max
  Clone ID: PAT_MRT3847_87018C.1
tcttcctcggaaaatggacagggaccatctgcagatcgtaatgcctaaccaaccatggcttcttccaccttcaccgcaatgtccgctgaggagctttcctcctgcgccggcatctcctccttccccacccaccgccggaccaacgccgtccttctgtccagacgcagccgcgccgccagggtctccgccatggccaaggagttgcacttcaacaaagacggcaccgcaattaggaagctccagagcggtgtgaacaagctcgcggatctggttggggtcacgcttggtcccaagggaaggaatgttgttctcgaaagcaagtaccgctcgccgaaaatcggtaacga

SEQ ID NO: 128477 - DNA, 579 bp, Glycine max
  Clone ID: PAT_MRT3847_87019C.1
atcttttttctccttcccctgccaaattgaagagccccttgcccccgagacccccttcttccaatcctctcaagcgcaagctcaccgccgccgatgccctaaccgacaattccctccccgcaccctccgattccggcgtcaaggttattgtcaggatgaggccgctgactccggacaaggacaatgtagatcccacagttcagaaggtttccaatgattccctgtccattaatggacacaatttcacctttgattccgtcgctgacatggcggctactcagctggatattttcgaacacattggggtgcctttggtagagcattgtttggccggcttcaatagttcagtttttgcttatggacagacggggagcgggaagacttatacaatgtggggtcctgccaattgtttgttcgaggaaaatgatcagcaaggacttgccccccgtgtttttcagcgactttttgctcgcataagtgaagagcatactaagcattctggcaaccaactcattatcagtgccactggtcttttcttggatatacaatgagcaaatcatggatctgttggacccaatc

SEQ ID NO: 128478 - DNA, 475 bp, Glycine max
  Clone ID: PAT_MRT3847_8701C.1
gttccagagactgaccgaaggcttatcccacatgcagaggtgggagatcctcgtgtttggaggcttgacgtggatttacctgactgcaagaccaggtgttcttgttggtgccattgatgcgtaccttttggcacctcttcaactgggtttggacaacttgtctggaaggaggaacttgaagaggagtgactttgttgttggagacaagctcggtgaagggtcctttggtgttgtctattcgggtattttggtcccaaagaatgtggatctggatgtggtgcagaagagggggagaggcaagacaacacaggtggatgccaagtctaaggataaagtcattcttaaaaaggttaaggttggaatccaaggggctgaggagtttggtgattatgaggagtggttcaattacaggctatctagggcagcacccgaaacatgtgctgacttccttggaacttttgtagctgatcaaact

SEQ ID NO: 128479 - DNA, 303 bp, Glycine max
  Clone ID: PAT_MRT3847_87020C.1
ggaagcccaaacggatccttttttgggtaatcaaaagaaaaacgttttacaaaaaaatgtcttggcccggggggggcaaaagtttaatttagggaaagattataacccccgggggcggaaacaaatattggtatttggaccccaaggctccagggtttcctttaagaaaaaaacccacggggaaattcgatcagggccttgcccccttccctttaaaaatataacaaatctcctttttaaccaaggaaaccgaatgtggcccaaaccccttccagaaaaaacctttggcgtggcctcaataaa

SEQ ID NO: 128480 - DNA, 1753 bp, Glycine max
  Clone ID: PAT_MRT3847_87021C.1
ggactcaaaagctcaataaatgcatccaagcgaacaaatcaaatctctctctcaatctagccttctttctttttttcaatttccaaatcacgaaactcaagaagatggagaaagcgatcaacagacagaagattttgcttcatcatctcaacccttcatcatctacccaccccaacgaatcatcctccctctatgcttcagcatgtgtggcgggggacagcgctgcttatcaaaggacatcgacattcagggatgatgttgtgatcgtggctgcttatcggactgctcattgcaaaggtaaacgtggtggtttcaaagacactcttcctgatgatctactggctcctgttttgaaagctgtaattgagaaaaccaatgtgaacccaagtgaagttggggatattgttgtaggtagtgtattggctcctggagctcaaagagctagtgaatgccgaatggctgcattttatgctggttttcccgaaactgtgcctgttaggaccgttaataggcaatgttcatctgggctccaggctgtcgctgatgtagctgctgctataagggctgggttctatgacattggtattggtgccggtttggaatctatgaccactaatccaatgggatgggatggatcagtgaatcctaaggtaaaaatgtttgaacaagcacaaaactgccttcttcctatgggaattacctctgaaaatgttgcacagcgctttggggtttcaaggaaggaacaagaccaggctgcagttgagtctcacaggcgagctgctgcagctactgctgctggtaaatttaaagatgaaattgtcccagttaccaccaagattgtggacccaaaaaccggtgaggagaaatctgtcaccatttctgttgatgatggaattcgacctggcacaacagtgtctgatctaggaagactcaaacctgtgttcaagaaagacggaagcaccactgctggtaattctagccaggtgaccgatggggcttcagctgttctgctgatgaaaagaagtgttgcattgcaaaaggggctacccattcttggtgtattcaggacttttgcagcagttggtgttgatcctgccatcatgggtgttggccctgctgctgcaattcctgttgctgttaaggctgcaggtctagagcttgatgatattgatctttttgaaataaatgaggcatttgcctcccagttcgtgtattgccgtaacaagctagggcttgatccagaaaagatcaatgttaatggaggtgcaatggcaattgggcatcctctgggttcaacaggtgctcgatgtgttgcaactctgttgcatgaaatgaagaaacgtggcagggactgtcgatttggagttatatctatgtgcataggtactggaatgggggcagctgctgtttttgagagtggtgattgtgctgatgagctatgcaatgcccggaaagtggatgaccttcttttatccaaggatgctcgcttgaaatagttacttcatactcactatatttggtcatcaaataagaaatcacaataaagtctttttctatggtagtgataatgtcaaccactcctcaagcgtttaatcctttctacttattagacttgcattaatttgtgatatattttggacaattgtaaacatacacttaatttttcttctatatctttttcactccaaattttctttctaaaaaaaaaattaattgatcatgacaaagggcttctggccgaatcatgctactt

SEQ ID NO: 128481 - DNA, 260 bp, Glycine max
  Clone ID: PAT_MRT3847_87022C.1
ggctcgagcgactacaccgtaaattcatacgctgatcctgcaacctcacactgcttgcattgtctcagcttactcgatactaaggctacatcaaagatgcatgggaccacggctcccgctcttaacatagctgaagtacagaatcaacaccccatgccgtgtccgatgaacaaaacccaccaacgagctgacccaagatcgtgatgggtcatacctccactcaactgtccctcacgaggattctgtggacggcgacgttg

SEQ ID NO: 128482 - DNA, 1251 bp, Glycine max
  Clone ID: PAT_MRT3847_87023C.1
gccttctttaaacttgaatgccttatctgttggccagtgtcttctcctctttgaaggaacacttggatgccaggttgcgcgcatgcttatggtgcttgaatgccttatcttcctatgaagtgtcttctcctcggagctggaacacttggatgccaggttgcgcgcatgcttatggcatggggtgttcgaaaaattactctagttgacaatggaagggtggctatgtctaacccattgaggcagtctctttatactttggatgactgtcggggaagtgggggcttcaaagctagttgaaagttttaaacggatatttccagcagtggaagcagaaggcattgttatggctataccaatgcctggacatccagtacaaagccaggaacaggacagtgtgcttgatgattgtaaacgtttgtgtgatttaattgatgctcatgattccgtttttttattgactgatacaagggaaagtcgatggctcccaacacttctctgtgccaatactaacaagattactgttactgctgcactggggtttgatagtttcttggttatgcgccatggagctggtcctttatctgcggatatgccagtaaataatgcaaatggaaaacatagattgggctgttatttctgcaatgatgtcgtggcaccaaccgattcaacatccaaccgcactttggaccagcaatgtactgtgacccgaccagggctagctcctattgcttcagcccttgcagttgaacttttagtagggattttgcatcatcctcaagggatatttgccgaaggtgatattaacaacagtgtcactggagctactgagcaacctcttggtattttgcctcatcagattcgtggttccctttctcaattttctcaaatgacccttataggttactcctcctccagctgcacagcctgtagtcatacattgtatcagaatatcgaaaccaaggaatggagttcatacttcaagcaattaattatcctaccttcctagaggatgtcactggactgacagaattgatgaaatcggccacctcgttgtcattggattgggacaaggagatagacgaggaggaggactgtgttgaaattcaataatcagtcagttatacataaaactaatctgtgcaatttatatgatttttttttgcttttagtaccgtaccttatcaaatgtacaaaactaattccatgtaatttatattctttatcaatgtcagcaattcgagtttattaagc

SEQ ID NO: 128483 - DNA, 331 bp, Glycine max
  Clone ID: PAT_MRT3847_87024C.1
gggcgaaacgaactctctctccttggccaccgcgacgcgccatcacataacttcttctcattcttcattcactctttctttctcttcttctgtttgtttctctttcaatctcaaacacactctttctctctctctataaatcttctttttctatgtcaattttgtcaacaaaaaatcagcataaagggccacaaaatccgtttttcttatcttccaattaatagagtaactgattaagcgcttcctcttcaacaacaaaaaacatacaccagaaaggagttacattttcttctcttcttcgtctccttcaacttcaatttgggtcatcaaa

SEQ ID NO: 128484 - DNA, 333 bp, Glycine max
  Clone ID: PAT_MRT3847_87025C.1
ggctgccagcgcagtcgaacatccagcgacacgcagatcatgtgctcctcccccagatcatctggaacgttcttacccggtggcgatgatcgacactttgatggccattggcatggttgtgcaggtcgagttcaacgtcgtcaacggacagaccggcgccatcgcccgccgtattcatgacaagcttccggctgcatcagacatccatgcgctgcatcacacatgatagctacatcttcgacaaactcagatacgtcagttacacctacttctgtcatgcgaacgagattctctggatgctaatcccgttctcgtacatggaagatatccaga

SEQ ID NO: 128485 - DNA, 164 bp, Glycine max
  Clone ID: PAT_MRT3847_87026C.1
aatttatatatgaacatttttggggaacctgagattgcagcgtacattaattacagcctaaacctacattttatgacatgatttcgcggtttgatgccccaaaaaagaaagcctgtgcattcaaccaatttacgtaacacaacccgttcctctttttttgaaat

SEQ ID NO: 128486 - DNA, 347 bp, Glycine max
  Clone ID: PAT_MRT3847_87027C.1
aaaaaaaaaaaggcagtttattgattccattggaaaatttttttgtccaagcttactttaaccccaaacaatgcttcctgggttaaccgaaaggtgcaaattaactacccccgccaattgcttataaacttggggcctaaccttgggtttaactatttggttttccaaaagccatcactggaacatccaacccgcccgaaataactccctctttggggatgttactcaagcaagccttaacactaccactggtagcaagggtggagcaatataaaaaaaatcttttatgcccctatccagcttttggaaaatttcctttttttttaaacccaacttttcgggttttt

SEQ ID NO: 128487 - DNA, 384 bp, Glycine max
  Clone ID: PAT_MRT3847_87028C.1
aaaaacccctttaaaaaaaacatttttcatcatttaaaagggctttttaaaaaagggaaaacaatcgtttaccggatccctttggggtcaaaatttttggggcctcaacatttattttgggacccaatttttttttggaactggaagggcataaaattggctattctcccccggcccaaatatttaaaaaaatttttaggattgcattttttaaccggggcaatgatttttaaaccccttaaatctgcaaaaaggggaaaaattttttttccctaaagaacccgggttattaggcccatcaaatggggcccctttataaaaaaaaccctcggggaattgggcaaatcccgggtcaaaaaaagccttgcactttaccgggaaaat

SEQ ID NO: 128488 - DNA, 436 bp, Glycine max
  Clone ID: PAT_MRT3847_87029C.1
ttacacgctttaccttatctaactctttcattaagtttactttattttgtaaacgtcctgctgtatcacatagtaatacatctactttacgtgcttttgcagcttgtacagcgtcatacataaccgctgctggatcagaccctgatccttgtttaatcacttctaccccaacgcgatcgcccgatacttataattgttcaatcgctccatcacggaatgtatctcctgctgctaataaaacagacttaccttctgattaaaacttatgagccatcttaccaattgttgtcgttttacctacaccattcacaccaacaaatagtacatctgtcgagccatcctttggctcattaatttcattagtaaaatcactggtccctgtgtaaatctttattaattttttcgaaataacagctggtacttatataggatctcg

SEQ ID NO: 128489 - DNA, 289 bp, Glycine max
  unsure (1)..(289): unsure at all n locations
  Clone ID: PAT_MRT3847_8702C.1
gncttgatgcgctggggganttccttntggatncngagcagatagcctaccagctccaanngcacctgctttgccgccacacatggcaataggtttatcaatgggtggcactcaangcagcanaggcagcaacagtcagtctccaccgggcttttacaggcnanctgggatngggttngatgggcaaagcnagnccatcagcagcancntnagtanntaggcagtgagcattanttgaagatcgtcngactacgttgntgcaaaancttctnggtagcgtgttcctctg

SEQ ID NO: 128490 - DNA, 186 bp, Glycine max
  Clone ID: PAT_MRT3847_87030C.1
gtccgccacccttccgcccacccttccgtttacttccattaataaaggtaccataggcgccgattttattccaggaatggaaaattcacctggatttggtgtttccacctctcatgccattttctacattctgcccctcattgttttccttatctgcgctacatagcaaaagacaaggccatacat

SEQ ID NO: 128491 - DNA, 119 bp, Glycine max
  Clone ID: PAT_MRT3847_87031C.1
accacgcgtcaggccagatgtcaatagaacggggagaggaccaccagcagcgtcttggtttgtgagataaactgcggcagagatagaaaatagttttggggtcacgaatctgcccgaag

SEQ ID NO: 128492 - DNA, 194 bp, Glycine max
  unsure (1)..(194): unsure at all n locations
  Clone ID: PAT_MRT3847_87032C.1
gtcgcanggatgnntattcngctcgaaatncggnanacaganattcggnangtgnaactgccggaaancggaatatctcacttctcagattcagatcaatccgacgtcgttgnnagttataatggctccattccagnggngatganacgncaccgtttnncggcttcnttgganccgcagcngccctcgtcttc

SEQ ID NO: 128493 - DNA, 415 bp, Glycine max
  Clone ID: PAT_MRT3847_87033C.1
aagtcttgaaccaagatcactccattctccatttggcttctcaagaaaagcctccttttttgttaaagcagctgctactcctcttgtcaagctaggaccatactgacctttgtggtttgcttcaaaacaatgtctttcctactatgatggcagtctctccggtgactatggatctgaccctctggaactttcagaccctaaacgaacagtagggttcattgatccgaaactgcttgcatatggtgagatcatctatggtcgtgatacaatgttaggttgcagtgtgatgcactttgtaggtgtaatactagagcccgtctgattgatctctcacaggatagcactctcatgcttatcaacttgtgcgtctacgtctgttcgaacctacatatacgtgatagtacagttcacacta

SEQ ID NO: 128494 - DNA, 129 bp, Glycine max
  unsure (1)..(129): unsure at all n locations
  Clone ID: PAT_MRT3847_87034C.1
cttgcaaaaggcaaaagcagagcancaatacggaaactanagatgaaattggaaaaaaggcgagcatcctctatggatangattatgaccangcttagattggcccagaaaaaagntcaggaaatgngt

SEQ ID NO: 128495 - DNA, 518 bp, Glycine max
  Clone ID: PAT_MRT3847_87035C.1
tctaatccttgtgatcttcattttccttgtttcattgccatttcttcaatcctctacttcaagtgagctcaacaaaatcactcttcatttcttcttccgcttgtattaattgtagtaaaaaccattgcttgatacatacctacttacaggtcgtatatatcaaacaaacatggcaggaaccgggtccatagcaacaaacaaagaggttgcaagatttgggaatgaagctgcttctgctggcatagtagaagactcggcaagagaagtccctacgggacctgacccccttcatcacaacaaccaccctataggccattgaatttccttccttaaaaaactctctctctctctctctctctctctctctctctcactctatatatatatatatatatttcaattaatggttcaatgtcatatcatgtattcagtgcttacggttttgtaattcacgggtcatatcttctgcaatgtgcttacttttgtacataatcagaaacgattatacctgggatcgg

SEQ ID NO: 128496 - DNA, 300 bp, Glycine max
  unsure (1)..(300): unsure at all n locations
  Clone ID: PAT_MRT3847_87036C.1
cccaatcgaataaacaacagcgcgnnnnttattatctgcattgtacatttctcacaaaaaaactgatctttttatactaaatccaatgtataactgaacaaaacaatttactctttaaagggaaaaggaatcatcaacattcctacttaataaacacaaattgaaaaagaaccccgttaaatgaggtcattttcatccaatggcttctcttcattttcagcctttttaaccctcaatgaacccacctccccctttggaaattttctcccaaactttattatcacctgggcaaaatgggaa

SEQ ID NO: 128497 - DNA, 320 bp, Glycine max
  Clone ID: PAT_MRT3847_87037C.1
agaggaaaacagacaccctttaacattattaatgtaaaaaatactttgccccctgtcttgggaagtaaagggaattacaaattcatgaatagaggcgagtacacctttgcatgggctattgagaaaagaactacgagtgtttaaggaaaactggtataggagctcaaattcaagaagggcaatcacacaggttggtagggttccgggaacaggggcgttttttgggcaaattggggaggaagggcaccctttaaaggaagaggttggtgaccttgggggaaccaaaggatcatttgccctaaagcgggccggaaagggaa

SEQ ID NO: 128498 - DNA, 1658 bp, Glycine max
  Clone ID: PAT_MRT3847_87038C.1
tttttgctcacctggttagcgtggttcttttgcttacattatcttcatcttcttcttcatcgaactgcggaggcacttagcagcagtagcagaaatggctaccacttctgcttcattcgctcgcttctccgtcatatcgcgaccttcttcgtcaaatccccaattcatcctcttcaacgccgctccccgaaccggaacccctcattcccgaaccggttcggcccggttcaggtgcttggccggccagaccgggttcttcacgaaactagggcggttgataaaggagaaggcgaagagcgacgtggagaagctcttctcgggattctccaagacccgcagcaacctcgccgtcatcgacgagcttctcctctattggaacctcgccgacaccgatcgggtcctcgacgaactcgaagaggctcttttagtgtccgattttggaccaagaatcactattaaaatagtggagaatttgcgcgaggatatattttcagggaagcttaaatcagggaatgagataaaggaagcactgaagaggaatgttttggaattattaactctccaaggggagactgaacttcaacttggatacaggaagccagctgtataatgatagttggtggaaatggtggagggaagactacatctttggatattgatggcagctggtgatacatttagagcagctgctagtgatcagttggaaatatgggccgaaaggactgggtgtgagattgttgtggctgaatcagagaaagcgaaagcatcatcagtgctttcacaggctgtaaaaaagggaaaagagctaggttttgatattgtattatgtgatacatctgggcgtttacacactaattacagcctaatggaagagctgatttcctgtaaaaagtctgttgctaaagtcgttcctggtgcacctaatgagattctactggttctggatgggactaccggtttgaatatgttgccacaagcgagagaattcaatgatgttgtgggtgttactggtttagttttgaccaaactggatggttctgctagaggtggctgtgtggttagcgtggttgatgagcttggaatccctgtaaaatttgtgggtgttggtgaaggtgttgaagaccttcaaccttttgatgcggaagcctttgtcaatgccatttttatgtaaaccaatattgtgggtttgaatcatttattagcagaaacagcttgacatggaatattcagagcaacaccaggtcacaggaaagatggcacttgattatggaaaccgttatttgggggtggggggcaagcattgcgaataagtgtacatgattttgaggtgcagagctgttgcttgaggaacgctgagtattttgcatgctgtagctggaagattctgacgcgatgcaaatgagaaatggggtttataatcactcctgtttatgaacagaagggttttattgtggtgtgcgtgtagatgatacttagaaaggaaaatgtaaacagtaaacacattgctccattgtctgtcaacttctgattaatgacaaatttttatttctttgacctcttaacgaggttaacctactatatttatggtgagaaataatcaattatctgtctatggggaaaccaaacaaaaaaaaaaaaaaatctacttttttcaaaaa

SEQ ID NO: 128499 - DNA, 166 bp, Glycine max
  unsure (1)..(166): unsure at all n locations
  Clone ID: PAT_MRT3847_87039C.1
ctcaccccaacaacaacctcaaccttccanaanagacnaagtcttccaaccggtgnagagagctcagacggccaagtcaaacccnnagcccgagcaccaagcccagtccagaattgnaccnagnaagctgattcagataattaacagtagcatagttaccgagccc

SEQ ID NO: 128500 - DNA, 549 bp, Glycine max
  unsure (1)..(549): unsure at all n locations
  Clone ID: PAT_MRT3847_8703C.1
acgattcacccccttgaactcatcacggttgcaaaatcctgagtaaaagaagtgcccgttcccagtgtggtctgtttgctagaacacttctttttaagacctgcactgctccagcagccacaagtgctgaatggttctcactgtccatactcagattatacagtattgccaagcttgcttccacagccctatcactgccttcttctatcaaattcaccaatgaatatattgcttcatcagaaataatagcttctgtgtaatctaccactccttcagatattattctattaagttcaacaacagctgtttcctgtgcttctggggagaatgatgttttgatctgttccagaagtcttgggattgtctcgtnnagagtaacttccacattgattggatagaggctcgtgatggagccagagagagaacttagtttaactaggcangtagctacccactttttattgtggaggggaatgcaggacctgaggattccccgaagcaaatcaatgaattgcgaggagtttattttgtggcggaactgctcatgat

SEQ ID NO: 128501 - DNA, 353 bp, Glycine max
  Clone ID: PAT_MRT3847_87040C.1
tggcttggaacctttgggctgatttatgtgcttgcatggtcgtgagaagatgttcgaggggggcacagagcgtggccgagagaagagagtgtcggcctttctattaaacgacaattagagtaagggtggactaatctatcgacgaatagacgcttgagcctaaggaagttccgagtccgcctaactcggattgtgactgccgtacgacaattaaggcgtccgaaatcgtcacgtccctaccgtggtgaaatttaatcgaggtagaatcctacgatacgactaacgaaccggacgtcgacgggaacgggattacagatccgtgtgagccttcaaattctacggccaggacgacg

SEQ ID NO: 128502 - DNA, 599 bp, Glycine max
  Clone ID: PAT_MRT3847_87041C.1
ttttttttttttttttatatatgctagaacggaaaacgatttattattatttcaatcatgtttaaaaagtatagattacatatagacattttttctaacatactacatcacctaacatatttatatttttctcatttttctctttatatctctaggtgttaaatagtatttagaatttattttttcaaagtataaaatatatatgatatcacttcaaaacaaagggaattcacacttgaaagtgcggttgataaacatgggcatgtcaatcatgcactcaaagattatcaacaaagggaattaaacacaaatcatgtttcctcccaatagccaatccgaagcgttctgtcatatctatactttcaggtttcatcccatctgggagctcccagttgaaatgcaaaagtaattgagccaatggaagcataatacttgctaaaccaaatgagatgcctggacaaattcttcttcctgccccaaatggtaggtactcaaagttattccctttgaaatcaatagaactatcctcgaacctttctgggacaaacctctctgcatcagtccaatatttgggatccctacaaattgcccatacattt

SEQ ID NO: 128503 - DNA, 241 bp, Glycine max
  Clone ID: PAT_MRT3847_87042C.1
catttattcaggatgactgtttcttttctagagaaaatttactagaatctctgaaaagagaaaatgaaaatgagataggttcctcatcaactgagatgccaagacatatcggtaaggtggagacaaaacctaatcatatggaagagatatggtcctggtctcacttgctcaacaatgttggagtatttagagagatgtcaaagggatagactcttcctcggttataaatacgacacagaaa

SEQ ID NO: 128504 - DNA, 272 bp, Glycine max
  unsure (1)..(272): unsure at all n locations
  Clone ID: PAT_MRT3847_87043C.1
ggatcttaaataatactatagggatatctaattgtaccaattaaggttgtttttgcttgatttgccttccaatttggttcgtgagctgaccctgcaagccgtgcagagacctctattggagtctttctctttggtctcctcttttttggatgcaatggcttaattgggtcttctcttctcagaatctgggtaccaaaaacagaagagaaaaaaaggggatttttggttttgntgagctcagagaagctgaggctttttgggatcaaactata

SEQ ID NO: 128505 - DNA, 168 bp, Glycine max
  Clone ID: PAT_MRT3847_87044C.1
ggggaagcgaaggtagcagtgcacgactgcacggtgtgcggcacgtatgccactgatgtagtacatgtgtagctggtctggggcctcaaggatctcgtctgcaactcttgcggcgtcacttccggctagtgcggctagctcctacggccatcccctcatgatggctgg

SEQ ID NO: 128506 - DNA, 1367 bp, Glycine max
  Clone ID: PAT_MRT3847_87045C.1
cgacatcgccaccaactactcaccgctccaccgaacgtccgtacggctgcgagaagacgacagaaggggagggcttgtcaagtgtgaacttggaattccatggacgacatggctgcctactactcacagccccaaccgtcgggccttctcccttaccagtactaccaacagccgcctccgccacctcctccgccgatgatggcggtagtgccaccgccccccggcgcggttgtcccgccggcgcaccacctgcatccgccttacgtggctcagcatcagcagcaagcggtgttcggttcctacggtgctcctcaatcctccacccacgaggttcgcactctcttcgtcgctggcctccccgaagacgtaaaaccccgcgaaatctacaacctcttccgcgaatttcccggttacgagtcctcgcatcttcggagtccctctaattcgtcgcagccttttgctttcgctgtgttcgcgagtcagaagtcagcaatcttggcaatgcatgctctgaatggactggtgtttgatctcgaaaagggttccactctttatattgatcttgcaaaatcaaactctagatctaaacgcacaaggatagatgatgagagggttggcgcggataagaaagctagaggccttacaccatcatggtccactcctgattctggtgttggcagcattcacatgccaggaatgggtaatcctgctttcaacacgaacacgtttggttatccatctgcacaaagtcttgggaatgctgatgggagtgccatgagtgacagtctatttgcgaatctgaagaagtcttcaacaccttacattcctcaaaactcaaccccatgtgcaactttatttgtagctaatctggggccgtcttgtaatgaacaagagctaatccaagtgttttctagataccccggattcttgaaactgaagatgcagagcacgtatggagctccagttgcatttgttgatttccaggatgttggtagctcaactgacgctctaaatagtctgcaaggcacaattcttcactcctcacaatctggcgagggaatgcgtttggaatatgctaaatcgcgaatgggcatgcggaggaagcccaatagataataaaaaaaaaaccaacgagaatatgaattgttatttgcggctacaatagaatggaagctaccaatggtgtgtattttatccactgtaatttatatgaaagctaccttttgcagcttttaaagattggtgaatatatgttatattttatccaatggtgtaatttatttcgtgtagtttgtatttgtatattatagcttattaaaattgatgatgataaaagtcaacagagatagtagccatttgacattttt

SEQ ID NO: 128507 - DNA, 419 bp, Glycine max
  Clone ID: PAT_MRT3847_87046C.1
agccagacatatctactctacccttctcttctcaacacaacattttcttctatttctcaacctcaaactaatccaaacaacgtatatctctatacaacacacagcccactctctctctctctctctctatgacattcacaaaactctgatcataggccatccacccattattgtggccccagcctctcgattcacccaacctgtcgaatcataaatccaacctattcttcaagaacatatcaatcctatgccgtaacgtgatgttcttacaactcctgcagaaaaatccaacgaatcacaagatcgtaaaggcacaaattcattgcatatcaatcaagtttggaattggtttcaaaataacccatatgccattagagcaaaatccagttaaacttactgcaagtttaatattacaccca

SEQ ID NO: 128508 - DNA, 638 bp, Glycine max
  Clone ID: PAT_MRT3847_87047C.1
ctggtgtttgatcttgaaaagggttccattctttatattgatctggcaaaatcaaactctagatctaaacgcacaaggatagatgacgagagggctggcgcggataaaaaagctagaggccttacaccatcatgggccactcctgattctggtaagatgatgttgttggtttggttttagtgcgttgaggttgtctgggtatatggcttgggtgaagtttttttcagtttactattgttgagttactgtctattctgttgcttggaggttagttaactattgatcacaccaaggacacttttacctatgagctcacattgcacgtgttttgcactcttcggcactagcaggtgttggcagcattcacatgccaggaatgggtaatcctgctttcaacacgaacacgtttggttatccatctgcacaaaggtcatctgcactacttaatcacagttttattatgtggaagttgattgcttctaactccgataaagcacattttccaaacttatagcgttattttgagcttctgttgcggaactcttccgattagaagaaaaactaatgtgtttgaagtaccgttattttttcttttgggagcagcctttgtatttcttgatatctcatctgattattta

SEQ ID NO: 128509 - DNA, 547 bp, Glycine max
  Clone ID: PAT_MRT3847_87048C.1
atgtagtactataaagtgattcggttgacagtgttgtttcttatcttatatgttgacagaagaagtcttctactccttacgttcctcaaaactcaaccccatgtgcaactttatttgtagctaatctggggtcgtcttgtaatgaacaagagctaatccaagtgttttctagataccctgggtttttgaaactgaagatgcagagcacgtacggggctccagttgcatttgttgatttccaggatgttggtagctcaactgacgctctaaacagtctgcaaggcacaattcttcactcctcacaatctggcgagggaatgcgtgtagaatatgctaaatcgcgtatgggcatgcggaagaagcccaatagataataaaaaaaaaaaccaacgagaatatgaattgttatttgcggctacaatagaatggaagctaccaatggtgtgtattttatccactgtaatttatatgaaagctaccttttgcagcttttaaagattggtgaatatatgttatattttatccaatggtgtaatttatttcgtgt

SEQ ID NO: 128510 - DNA, 624 bp, Glycine max
  unsure (1)..(624): unsure at all n locations
  Clone ID: PAT_MRT3847_87049C.1
ccacgcgtccgggggccagtcttgcacagagaaaacatattaaaggggagagagaaaaagatatatatatatatatagagagagagagagagagagaaagtgagagaagggagaggagagaaagttcacgcacgctgctatgttgatggcggttagggtttcctgttgatcccgcgaaacttacgtccctttgctgaaattgtttttttctctctcattctccttctcctcaaaaccctaattcgaagcccccaagattgagtgtgcccgttgttgcttcaatttcgagaagttgcgatgggagcgccggagaaatcacagcctaacactaattcgatgcagcctgtcaaggtatatcgtctgaatgatgatgggaaatgggatgaccagggtactggacatgtctctgttgattatttagagcgatcagaagagctgggcttatttgtttatgatgaagaggataatgagaacatacttctgcatcgcatcagttctgatgatatttataggaaacaagaagatacaatcatctcatggagagatccagaatatgctactgaactggcacttanctgtcaagagcctagcggctgctcttacatatggggacatatttgcaat

SEQ ID NO: 128511 - DNA, 150 bp, Glycine max
  Clone ID: PAT_MRT3847_8704C.1
acgcgtccgcccacgcattcggacacgcataaagttatctagaatttaacacgggaacgtactaactgtatgaggtgaacctacaattgcataggagaactttactacatgaaagagtcatatactaagcccaacaatggaatctacttg

SEQ ID NO: 128512 - DNA, 259 bp, Glycine max
  Clone ID: PAT_MRT3847_87050C.1
cttttggatcttgcaagaacattgctgtacctaatacaagtccagcgaccaacacagctggaagctttacaggatctgttcagttctccagatcagcttcaccagtccattctccaaattgctggtgtttcctcgtgttttacttcctgcttattgctgttttattgtaactgtgacgagtattattgtataccatatgcaagctaagtctcaagtgaagctcttagtgttataatatttacgtatttatgtatcataa

SEQ ID NO: 128513 - DNA, 398 bp, Glycine max
  Clone ID: PAT_MRT3847_87051C.1
gctcacaaatgagtgtttctgattaatgaaacaaaaaatcaataattggatgaacccattggtagtacttctgtaaagcaaggtacaaaatgcaaattaagaaactgcatgattatgaagtagtaccctccatggtagttagtatcgtacgattcaccatacgcatcgcacgattgtatacgattccagcagctaccaatatgaatcggagcttgtctggtttttgttcctgaatcgtggttgaatctctgcatcggggatgaatcgtgtttgaatcgcgatttccagacgaatcgcgcgattcttcaccggcggatggcctcgtgattcttcaccggcggatggcctggggattgttgaccatgaacaaactagacggtgagcggaatagctggaca

SEQ ID NO: 128514 - DNA, 289 bp, Glycine max
  Clone ID: PAT_MRT3847_87052C.1
gaatagccttgctgaacctgcccaatgctctgaagacataactgccagccttgctgcttactaataccattatacagactattattctaagcatctcactgaatggaatgcacctaaaagcacaattttatggattgcttgccaccctcacacatgatcggtgaagagcaatatgatctatgcaagattcaaagacagacacgagaagcagctgtatggaatataagtaaaatggtaagcaactgatcctactgagataggcactgatgtgttcaagagccgagccgac

SEQ ID NO: 128515 - DNA, 375 bp, Glycine max
  Clone ID: PAT_MRT3847_87053C.1
ttctttttttatatttttatttatttcctcaaattttttttttggttttttgtttttccccccaaatttaaaccccttaaacccaaggggtccaaatcccgttttaaaaatttttttgagggcccacccaaggtttaaaactagacctagaaccctggcgcgatttaatggcccaaaaaaccgaaaaaaaaaaggcaaaactggcttaacaaggaaaacgggtaatctatgttttcaaagctttcatcccctttcctgggggaaagcccccaaggaaaccaacgggaattctccccttaaatataagaagttggggcccaaaacaagggccatgacatgtaatcctccccggtgagtaaaaaaaaaaaaacaggg

SEQ ID NO: 128516 - DNA, 246 bp, Glycine max
  Clone ID: PAT_MRT3847_87054C.1
aaggtcccatcctatatatagagccacctacattcaatcgactggccagcgtacctagaacgtagctgacagggaacaccctggagaaaaccaactcaatacccaagctatacatcctgcttcagacagctggcgaacaagcgagcaggctcgcaccgagcgccctaacaaacaatcgcgcaaactgaatggcaaacggaacgcgcaatgtaacgccccattaagcgcggcatgagaggcggttac

SEQ ID NO: 128517 - DNA, 354 bp, Glycine max
  Clone ID: PAT_MRT3847_87055C.1
actgccatccttcaagtattagcaaatcagtacgcgtagagtacagcgcagaaagaggcctgattattcttgatgacacggagtgtacagtgcatacattcccaacgaggagattgacatggacgcagacgcatagcaactggatgagcaacttgttccctatcacacatacttggaactggaggacttgaataagatgctgtaggtgatctatgatgaagcttgctcccttaatgaaatgcacgccatggtcaagacagagatgttcatctgctaagatttgaacagctgtcatacatcttacgttgatacccttgaagttaatgatcaggcccaacagatcgaccatgaagt

SEQ ID NO: 128518 - DNA, 475 bp, Glycine max
  unsure (1)..(475): unsure at all n locations
  Clone ID: PAT_MRT3847_87056C.1
acggctgcgagaagacgacagaagggatctcctcctccacttatatactaagtacaataacaatcacaagaatatgatctactatatatcattataaaatttggacctaacttaaacccaaaaaatctaactcaactccacttatatattctgttttagcattagtcaatgtgagattttaaaaaaatgcctcaagcttattaaataagaagaaagagacaagcagcagattaatacttgtagaattgcatcgttgaatacaagacttccggatgatgtttcagataccaatcttctctgcagagtcttgttntttgtgaaggcataaaatagctaaagctttaggccttgagcttatgaactcaacactctcttcaatcttctccacctgcaaaagccaggaaaatacaaataaaacttcacttgccacattcccggactattaatgagaaactaagggtaaaatatttttttt

SEQ ID NO: 128519 - DNA, 479 bp, Glycine max
  Clone ID: PAT_MRT3847_87057C.1
ctttattttttttcctccagaaaaaaacgaactcgttgctgtgctttatttttgcccttcacttatctcaacgaggtacactcatggttccacagaatcctacttgagcccagtgcttgcccctaaaaaacacgcactcggggattgaacctttccggctctaaaaggaggagggatgaactcttctacgacctccaccgcgagcaggacaccaaggcttgtgattcctctatggacgggtacgaagccaaggacttgatcccacacactcctaataaattacccgagtttctttggatccacatgtaaccatgttttccccaatcttatccccatgaatttttctttctcccttaatctgcaccgtccgctgaaccctaaccggccagtaatacaaagaggatagtcccatacggacttgaccatccttctgcatcatggaattgccccggagtataaaggaaaatcctttgcatcaa

SEQ ID NO: 128520 - DNA, 251 bp, Glycine max
  Clone ID: PAT_MRT3847_87058C.1
tcatcctttcctcctctagaaattcttctaatctctggaccataaacgaatcagcaatagcaacgctaggcacatgttggatcatccaatgctcttgtcctccattgggatcaatgctctgcttaacttcagttggcacaccccagagagtgagattttcaagtttcaccaagtgttgaatgccacggggtactcttgaggttgtagattttctctaaccgaagctttttcaaagattgtagccctacttt

SEQ ID NO: 128521 - DNA, 388 bp, Glycine max
  unsure (1)..(388): unsure at all n locations
  Clone ID: PAT_MRT3847_87059C.1
aaaaaaaaaaatttacccacttattggtggtttttttcaaaaaatttggcccccctttacaacccataaatttacnaaaccctaactttaaaaataccaatttttattttaaagacatttattaaaaactcacccaataatattcataactgaacccttccaaaaattattataccttaaaaattccaaacaaatatacaacccgaaaaaataaaaattaaaaaattttgttccctaaaaattaaaattactcacattaatttacttaccctcaatccaccttttaaaacaaaaaaaacaaccttccctttttcaataaaaaattcaaaaacccacccctataactctacttaatattttccctcccacattttttttttttttaacc

SEQ ID NO: 128522 - DNA, 225 bp, Glycine max
  unsure (1)..(225): unsure at all n locations
  Clone ID: PAT_MRT3847_8705C.1
cggtgaccggctgaatggtgaaatatngnngttatggacccattgatgatggnntagaggtgagtggggnngtgagtggttcatctagtggttgaactttgtaaccaagtggatgcaaccaagggtgagggttacaaacgcaagggaggtacctttaggtttcaggggtataacaaggggtgatcccagatttgagaagaaaatggtttccgcttttgacacatg

SEQ ID NO: 128523 - DNA, 268 bp, Glycine max
  unsure (1)..(268): unsure at all n locations
  Clone ID: PAT_MRT3847_87060C.1
gccaagccctatacaaccaaaccctaacacacacccatttgattcagtttccatggctagcctcaaggttgcatttttggctgcagtgctctgcatggttgtggtgagtgcacccatggcacatgcagctatcacgtgcgcgcaggtgataagtagcctgcccaattgcatcggttacctccagaagggacgaaggtcggtcgtagggatgcttcaaccggatggaaagagcctgatggccggcgacaagaccaccgncgagcgncag

SEQ ID NO: 128524 - DNA, 370 bp, Glycine max
  Clone ID: PAT_MRT3847_87061C.1
gatttatatctagcataacacattatacaaagcgttgttttacttgagtaattccggatccggttcttttgtgataacaagaccggtatacatgctgtgatatcatagcttgcaacggttacgggactagaatgtttccgacttatgaagagagaaagacaccttctgcactcaatcaattgattagcttccttggcaataggagcatatgttgccttattaacaacttcacctttgcctcttcaatcaaactctgtgttacattgccttatatatatgcagcactaactgcccataaaatgagtagatccactttcggagactgtcacctcatcaaaatttggcaactcaatctaagcaagatgagaac

SEQ ID NO: 128525 - DNA, 381 bp, Glycine max
  Clone ID: PAT_MRT3847_87062C.1
ctttaaaactttcataacacaaagcacatagcaaagctcatccttgagttaaaaaatggcagcagcttcttccatggctctctcatccccatccttggctggcaaggccgagaagctgggcccatcagccccagaagtggtaagggtgcgcatgtgcctgaccgtgccctatctcgtgtcttaaaggagcccatggttccgtcctgatcgagtcacgtactcgtgcctatgcaacagcgagcggaactcctacataccagctctgttcaaaggcgcttgccgatgaggcgtcaagttccttcagcgtgcatagaagcacctctagcgtttcccataaaagcaagaacatgtcatggagccggactaaacatcgttagatgt

SEQ ID NO: 128526 - DNA, 371 bp, Glycine max
  Clone ID: PAT_MRT3847_87063C.1
attgacatccaagttatataatgcatgtttgatgtcttggtcttattttcaataagaacgactatttttctcttatgcgtatatagaataacttaggaacaagaaattagtattgaattagccgatcctagattaaaaaaaaaaactaacaaaattcgtcagaaattgacacggtatttaaaaattaagaagtttttttaaacaaaattggatcaataaattaaagttggctaagtcgactgaatttcaataactgaaattgtaattgtgacaatgatgacataatattgtatatgttacatcattacttaccagataaatattactggtgggtaactaggtatgaaaaaaaatattatatgtaccaacac

SEQ ID NO: 128527 - DNA, 116 bp, Glycine max
  Clone ID: PAT_MRT3847_87064C.1
tttcacgggagttgagagcattttctgtgcgcttaacgcaccctaagtgtgaaatgtgatacattggcgggggacgatcacgagaaaccagcctaaaaggtcaaggagtctaaggc

SEQ ID NO: 128528 - DNA, 131 bp, Glycine max
  Clone ID: PAT_MRT3847_87065C.1
gagacacatacgaacaggcaatggtccacgcacacgcatacgcggaaaaacacataggagatgccaaacagactaacgcaaaaacatgtagcaaaccacaagaaaacgatcgagggcgtcgagaaaatgaa

SEQ ID NO: 128529 - DNA, 1467 bp, Glycine max
  Clone ID: PAT_MRT3847_87066C.1
ctgctgttggttgttctgttgagttcctgcatttcttcttctctttcacgaagataaaacatctcttcatgaatggaggaaacagtatcctgcaacttctttagctctagctccattacatcaacttggccttttttagcaacattagaccaatctttggctgcaacacccgttttccaatcaaaatccacagtcaacgtttccacagggttgtgatccacagcccaaaagcaagtcatgtaatctccagcctccactgccgcaaacgcaaaatgccccgtctgaacgcgatccccgtagtgatagttgttcccataagacgaagtcaccctgacggtgactctgtgggaatcgggaagaggctgaccctcgttggagttaacaatttggtacttgcccacggtcatggaatttctctatgatcatgatgatgatgatgggttcaaacacaaaaccccttgtgcacctttctcttctaattttggttctcttttcttcttcaaccgaatccctcagattcgaactccaatctgggcacaccaaatgcatctccgaggacatcaagagcaattccatgaccgtgggcaagtaccaaattgttaactccaacgagggtcagcctcttcccgattcccacagagtcaccgtcagggtgacttcgtcttatgggaacaactatcactacggggatcgcgttcagacggggcattttgcgtttgcggcagtggaggctggagattacatgacttgcttttgggctgtggatcacaaccctgtggaaacgttgactgtggattttgattggaaaacgggtgttgcagccaaggattggtctaatgttgctaaaaaaggccaagttgatgtaatggagctagagctaaagaagttgcaggatactgtttcttccattcatgaggagatgttttatcttcgtgaaaaagaagaagaaatgcaagaacttaacagaacaaccagcagcagaatgttctggttgagtttgctttccctctttgtctgcttatcagtagcagggatgcaaatatggcacttgaagaccttcttcgagaaaaagaaactcatttgaaattttgtgatagtgattttacatttttcttcatccgtgcgcttgtaaaatataccagcattaatttatcctgaggatacacataacggtagtcagtataatctcagaatacttcctttgttaaacgcaaatcagagttatggcaacgagtttcagacgaaatgttgactttcttcagtttagggccttttttcgttttcttgttttaaattttaaataaaaaaccattaagatgtgggaatacttcgggaatcttattggggagtcaaatattctaattatgatgattaccttgtagatgattatgcaacacaacatatattcccccctcaaatcaaatcagaggggtgagtgaatagatttccaaaggatggatttaacca

SEQ ID NO: 128530 - DNA, 282 bp, Glycine max
  Clone ID: PAT_MRT3847_87067C.1
gggggggcccggaagaaaaagggggaaaatttaaaccctgggcctggccaaaaagggcccccgggggccccgggcccatgggggggaaattaaaggtaaggctttccccaaccacggggatcggggctaaaccgccccaaggggggggccccaaaaaacccaaaaatttcctgggctttcaaacccaatggggaaaaaacttgccccaaaagaccagcgggggaagggggaccaccatcgggaagtccccctttttcagggcattggtaagggccaaaaaca

SEQ ID NO: 128531 - DNA, 335 bp, Glycine max
  Clone ID: PAT_MRT3847_87068C.1
gaaagctggcacgcctgcaggcgccgatcccgaattcccccacccacccacgcgaccgctaaatctttttcttttctctgcaaccattaggattgctcactagggcgagccagcataacacacatagtggcgcatttccttgcaaaagcactaaaatcaacacacatggaaaaaggacgggaaggaaccagaagcaccctcgtaaaacacccctcgagctgaacaggccagatgcgcacaagtaatgcactaagcctaagctacgtcatgccgtccagcaggagaacatgaccaccaaaccctccaatgcagacaaaaacacctcccggcaagga

SEQ ID NO: 128532 - DNA, 453 bp, Glycine max
  Clone ID: PAT_MRT3847_87069C.1
cttgctttgccgttgttttccttgttgtttggtccatgagatcactcaggaaaattacagaaggcgagcctgcagcagctatgaagtttagtcttatcaagcggttcaacctcgttgtcatcggctacttgtttttcacgcgctttgtcatgtttgcgtttaagacagttctttcgtatgagtatcagtgggtgagtaatctcgtcgaggagactgctactctggtgttttgcattgccatgttctacgtgtttggccttcttgagaaagatgaatactctgtgatcggtgacgaggaagaacaagtgtccgaaatcgttgttaaggaataaaaatacccaagttgagctttgaaactatttcgctgcagacacagtttgtatccaagatgaatatgcctcttcacgtactctctactactactgttagagatgttattaggtgtagatactg

SEQ ID NO: 128533 - DNA, 511 bp, Glycine max
  Clone ID: PAT_MRT3847_8706C.1
gggtatggcgaggatgggattattttcaaatttaaatatcaattaaatgggattttagggtatatcaaggattagcaattaaaaatatattaattattattataaggagggtattatcttcaaattcaaatccttttctactttatttaaaggtctaacaaaacctatgggctttcaataataataataataataattattataatagggaaaggaattttcttaaggcaggggagaattaaaaaggcttgatgtatgttaaaaacaaattatttttacaaaaataaaagcttgattttttaaagccctttgaaacgaaaaatttttgcaaatttttctttaaaataaattaaatcaaatatgcgttcatcaagccagcacctatccagtaaaaaaaacattctcggggaggtttccaccaaagggaattccatttgaaatttatgaaatcaaaatattttttgaattaatccctaaactagggagcagtaagattttttatgacttttag

SEQ ID NO: 128534 - DNA, 680 bp, Glycine max
  Clone ID: PAT_MRT3847_87070C.1
ccacgcgtccgcgtcactctctggcctctgcggtttgcttgctgtgaaacggcgacgttttgatatctctgggagtgtgtaactcaggcacaaatcccaataaatatattaggaaccagatacctaatttgaatacatcttgtagtactcaatttcggatttcttagctacgtgtccggattagggttctaggaatgagaatatactttgttgcttagtttcacttcaattttctgtagagtggcgcttggattggaatttctctgttttcatcttcaacgattttggggcaaattttttaagttaaatcacatcatggagaaggatggagctggagctggtgctggtgtcgttgacatagacaagatcacggcgacattggaaccggaaaaacctaccagtggtggactctatgttcctggcaaggataggatggtttacgtgcctcaggagagaaaatcgcgtttaggactcgatgcccttgccagcgcaaaacggtctcaacatgatgcgggattcaaggtgccaaaagaaagaaccatttccattgcagcatctgcagaggatgaagataagtctgagttgtctgtttctgaagaaagcgggcatgatgggattgtcaacagacgcagacacactaatcggagataccgtgatacgaccaatgaaacatctcattc

SEQ ID NO: 128535 - DNA, 1698 bp, Glycine max
  Clone ID: PAT_MRT3847_87071C.1
taacttgtgagacttgaaaagtctccatcggaaaatgctgacatctccggaaagggcgcagatgaccatattggtctctgctcgtgaatcacacttggggtcactgaatgacgaggtgcggataaccgtaaggtgtctccgcgggctaccagctcttgagtcatggcaacaaaaggcagtgtggtcgacaaaagcgaggctcttgctcctacgtatcctccaatgaggaactcagacctacgtagttctggataacttgtgagacttgaaaaagtctcggtgttttctccactaaaatgcaaacatgctttagcaaagagacaaatattccaactgatttagagcagcatatgcttttttgagtgaaaaacaatgcgtctaccggggaaggagagtctgctgatgaaatctcccataaccataaatgagattttggatgttagcattttgtttctaaatgaccatttagaggaaagtgtatcaatctcgcacaggtaagtgttttatcctaattccgaaccatagatatgtcatgacttaactttgcaaattatttcctatcaaatcaaaaattacatgtgtgatcatggatcaataggacttcctttgggaatgggttcttttggtggtttcttctttcggcttttgtgtgtttttggcttttgattttttgttggcttttccttttctgtttttgtttagtgcggggcgagaaaaaaaagtcgctagcgcacgggattttggttggtaatcaaagggagaagactattttaggtcatggttccctttccttcttttttcgttcatttggtgacaattctgtattgttcagatattgtctggtcaaaagacctttctgcacatttcttctagtttctttgatcaagaactttctttccttccttttttttactttctcctattctttggttgggaattttctttcttttctttttgctttctcccactctttgattgggaatttcctttcttttctttttgctttctcccactctttgattgggaatttcctttcttttctttttgctttctctttgattggaaattttccttcttttctttttgcttccgagggtaaggattatggtgagtcaggattttggctcaaggtttgtagaatggctagacatgatacatgtcggggtttggtttggctcaaggataaaagggatgccccacattatttccatgacacaaaatgcaaaaatgatgatttggaaactttatgcaaaactggtcgtgcatgcacctatgcggacactcaagtgtcaaatttttatggtcatgtgatgctagggctcaggattcatttcctctattttaaatcaacccaatgtttccaaaatatgttcttttatcaatttgtgcattcatccgagtccatttcgggcgtctgggaaaatcttcacagcattcacccttcaggtgtatacacatttttttcaaaaactagttatgatcaatgaatttttttcaaagaaaagtttgaaatcatttcttttcaaaagcatgttggtttttcagctagacaacctatttttttcttttttctacctttttccttacttgcccttcttcccctatttgccctctttttcttttcactttcttttcttttctatttcattttcgttccttttctatttcattttctttccttttctatttcattttctc

SEQ ID NO: 128536 - DNA, 1012 bp, Glycine max
  unsure (1)..(1012): unsure at all n locations
  Clone ID: PAT_MRT3847_87072C.1
ggagaatactattttaggttgtggttctctttccttctcttttcgttcatttggtgacaattctgtattgttcagatattgtctggtcaaaagacctttctgcacatttcttctagttctttgatcaagaactttctttccttccttttttactttctcctattctttggttgggaattttctttcttttctttttgactttctctttgattggaaattttccttcttttcttttttttgctttctcccactctttgattggggaattttccttcttttcttttttgcttccgagggtaaggattgacattctcaccctaggtcaaggttcatggtgagtcaggattttggctcaaggtttgtagaatggctagacatgatacatgtcggggtttggtttggttcaaggataaaaagggatgccccacattatttccatgacacaaatgcaaaaatgatgatttggaaattttatgcaaaactggttatgcatgcacctatgcggacactcaagtgtcaaatttttatggtcatgtgatgctagggctcaggattcatttcctctattttagatcaacccaatatttccaaaatatgttcttttatcaatttgtgcattcatccgagtccattttgggcgtccgggaaaactttcacagcattcacccttcaggtgtatacacattttttcaaaaactagttatgatcaatgaattttttttttttttcaaagaaaagttggaaatcatctcttttcaaaagcattgtcggtttttagctagagaacttattttctctttttccaccttctttttttttttatcattatcatttgtttatttctttttcttggttggtttttttnctttttttctttttttttttcatgaggtattttgctacctaaacatgtgcatatttttggtgagggatttttttgctatatacatgcatattccaaggtatctttgccacctaaacctacaaatatatattttggaagggaattttt

SEQ ID NO: 128537 - DNA, 590 bp, Glycine max
  Clone ID: PAT_MRT3847_87073C.1
tcctttactctgtatatcaataagcttgacggaggtaagcgtagctcaagaaagcgtggagccaattcagagatctatagtgcctgggccatcgccctccgccaagtcgggagaaacagccttggtagaaaaagatgagctttctgctattaaagctggtattaggaaagtaatgattttgacggagtttgtatcttccaagaaatcaaaaaagggatgtcgtgaggaagaaggaagtgaaggtaggtgctctagaagtgaggatggtgaatacaattatcctttggattctgagtcaattgatgattctgaggaaggtgaaacagatgaggggaaggaggattccagcattaggaagtcattcagttatggaacactggcctctgcaaatgctgggggattttttcattccaatatgagagtaaattgtaatgatgaagactgggtttattacagccatcgaaagtctgatgttgggtgttcacggatggaggattctacaacttcttcttctgatccatatttacaaagttctaagcgcagcatacttccatggaggaagaggaagttgagtttcagatcttctaaag

SEQ ID NO: 128538 - DNA, 407 bp, Glycine max
  Clone ID: PAT_MRT3847_87074C.1
ataatgggtgatgtggttacagtttgtgatatctgtggggatcaaggatttgaagagtatcttgctatttgtaacaagtgtcctgatggggcagaacacatttattgtaatgatgaaaagttggaaaaagtgccagatggtgattggtggacctgcgaagactgcaggaagtcaccaggtaatgaattaccaacattgggctcacaaaccgagatagaacatgctcaatgctctcctctattgaattcagaatttaatggacagctgaccaatcgggaggttgagaaaaatgtagctattcatgatactagaaagaggaaaaatcttggattgctgtccaaatctgtgtcatttgataatgctagctcagcgaaattaaatggcaaatgctctgaagttattgcagc

SEQ ID NO: 128539 - DNA, 1715 bp, Glycine max
  Clone ID: PAT_MRT3847_87075C.1
attttccgtgtgaagttggacttctggaatcagtagatggccttgttgaacccaaaaattatacgaactttacatggttttctctagagtatgttgaccgtgaagatagaacatccaaaattgatttatttgaacctcgatttggaggacatcagactctagaggaaagagaaacttcattttatgcaaaaaaccagactcttcattgtggttttgtaaaagggccaccaggacatccaagcactggatttgatataaatgaaaaggataaggcatatatgtacagatgtaaggttgcagtttcttcttgcatttttggaagctctgatttcctacggaggcctacaagtagactgatgagtcaatattcaaaggacaatgtttgttttgttatgttcctggatgatcaaactctatccaaactttcatcagaaggaagcagtcctgatgagagagggtacattggcttgtggaaaatagttgttgtaaaaaacttgccatatgaagacatgcggagaactggcaaggtgccaaaatttttatcacatcgcctcttcccacattctaggtattcaatttggcttgacagcaagatgcgactcaactctgaccctatgctgattattgaatatttttttgtggcgaaggaaggcagaatatgccatttcaaatcactatgatcgccacaatgtttgggaggaggtactccaaaataagcgcttaaataaatacaaccatacagcaattgatgaacaatttaacttttaccagtctgatggcctccccaagggtgacccatcaaagccaaatgatcctcttccgagttatgttcctgagggttctttcataatcagggcacatacaccaatgtcaaatttattttcatgtctttggttcaacgaagttgatcgatttacatctcgtgatcaactaagctttgcttatacctatttgaaacttaggagaatgaatccagagagaccaattcagctatatatgttcaaggattgtgaacgtagagcattactgaagctattccggcatagggaacttccatctccacgagagactgcttgatcagttccagatatataagggatgcacactacactaatggcacaggtcatcatatttgacatcccttccagcttgattagcctgacaagacatgcatgatatgttttaagctggaccaaacagaggcaaactcattccttgttcgagttatgttcctcagggttctttcataatcagggcacatacaccaatgtcaaatttattttcatgtctttggttcaacgaagttgatcgatttacatctcgtgatcaactaagctttgcttatacttatttgaaacttaggagaatgaatccagagagaccatttcagctatatatgttcaaggattgtgaacgtagagcattagtgaagctattccggcatagggcacttccatctctgccagagactgcttgatcagttccagatatataaggtgccttttgctgctgcatgatcatgtactgttcattttgattattgagtgccattataagaatatggctctttattatttatttgttatcactaactgttttctttgatgaattagctcactcaagcaaataagatttttaggaagtatctcataaattgtgtaatgatagaattcatgtcatttaaagttatatccattgcttgaattaggaagttg

SEQ ID NO: 128540 - DNA, 471 bp, Glycine max
  Clone ID: PAT_MRT3847_87076C.1
atagtttttttttatttttttttttttttttggggtttttttatagaatatttttggggtttttttcaaaaaaacaaacacacttttggttacaaatatttagactttgtaaactttgaaacttgactagttggaaaaccgtcaacctggaaaaaggggccgaaactgaaaaaaaagaagcaaagggggaaacaaccccaagagaagcaaaaccagagctatgaggtggaggtgtgacatccaacttttcctgcatgggcatcaaaccaaattttttcctgcccccaaagagggcaagcccatggtgcttttttggcctaccactctggcccacagttttaggaaaaatcggacccctattctcaaaccaagggaaaccaaccttccacaagtgcaaagatatggttacccttaagacactggtgccataggctcctgggagccaaaaacttcagcataaaaactttggca

SEQ ID NO: 128541 - DNA, 270 bp, Glycine max
  Clone ID: PAT_MRT3847_87077C.1
tggaattttgagcctttccctcgaaatcaatgcatgtaaagactcaagctttgatgccgcatattggtttttcatttgcacattcatgtgggtcattgtgtgcttctcttagtttcagcatagtggcaaaatggtctgtgtttgtttgatttgagggtagtagctttgtgctctttttcatattgaggcatgaattttcgtgtggggtagattttgatcttcaaaccttaagtgatagcaccccattcggcaaaagtgatgatttcagtg

SEQ ID NO: 128542 - DNA, 659 bp, Glycine max
  Clone ID: PAT_MRT3847_87078C.1
cccacgccgtccgaaaaaaaaaaaaaaaaaaaaaaaaaaaaaaaaaaaaaaaaaaaaaaaaaaaaaaaaaaaaaaaaaaaaaaaaaaaaaaaaaaaaaaaaaaaaaaaaaaaaaaaaaaaaagggggggccgttttttggggttccaattttttttccggggggtcgctggtttttggcttttttttggggtcccctaatttcctttttttgcccgtttttttactagctcatatttgggaaacccttggcgttcccaactttagcgcctttggagggaatcccctttccccccctttgtgtattctttaagggccccgcccctttcgcttttcccaacatttgcccatcctgttgggagattggtcccccccctttctcgccccttttaccgtggcggttgggctggttcctcccagtttcccttttcccttgtgaagggccttttcccccgctgttttcgtttttttcctttcctttttcgcgaccccggaagttttttccggtgagtttttaattggggggctcctttggggtttccgatttatttttttccgtgccctttcccccaaaaaatttgattagggggatggtgcgcccaaggggcccatacacttgatagtggttttttctccttttgccgttgaaccccactttttt

SEQ ID NO: 128543 - DNA, 356 bp, Glycine max
  Clone ID: PAT_MRT3847_87079C.1
gctagctattagttcgatgttgtcgtaagtgaggggccaatatggtgaagatagctcgagtgactttgcatgactatattagcgctctctctttaaaggctaatttcgcagagttccacacaactttgattatgaggtccgctggtgttggatcagccatcgcttacaacgagcttacaaaagatgcagcacttgtatccaacgacgctggaggcagcagctggggcacatgcatacgcactggaaggaggtgtgtacgacaccggctatattttacgcggacatattgacccagcctgaacattttgattgggcgctggggggacataactctcactactggtagaaatactgga

SEQ ID NO: 128544 - DNA, 115 bp, Glycine max
  Clone ID: PAT_MRT3847_8707C.1
gctgaagttgatcttgaaagtgggttggttttgactgattatgagtcaaaggatgtctctactcaatggcacacaaaacaaggagagataatacttactcagagatctcgtgggg

SEQ ID NO: 128545 - DNA, 311 bp, Glycine max
  Clone ID: PAT_MRT3847_87080C.1
ctatccatactggaacgaatggttgtggtgactcatgagaaactggaccggtactgaaatgctttgcagagacaccagcttactcagacactaatatacctggatcaaaagaaatcatatgtgctaccaagacatggagtggggaagcagaagtcctttggaaggaagctatgcaagagcacacggaactttctgtactacatgaacacgtagaaaaaaatcgactgatcattgagtgtctgtatgataacactttaaaatactaatcacaagtatcttttaagatctgtatatgccatttgcatataata

SEQ ID NO: 128546 - DNA, 801 bp, Glycine max
  Clone ID: PAT_MRT3847_87081C.1
cggccgcttcgaggcggcgggccgggatgctacgcaaaaccagaagcgccaatggccaagggtcgcaaattccccaccacgaccggaagcgagcgcttcttgggattgggaatgggaacaacaacaacaacctactcctcccagggctccgccgccgccgaccggtcggagttctgggaagaggacgtgtggtccacggcggaacaccgtgacggagatgtgaatgcctgccccggcgagtgggaggcatgcgcgccgccgcggcgtcggaacaacagggagaactgcaacgtggggggtttgtcgctggcgttcgaggatgggtccggtggtggtacgaggatagtgcaccaccagtaccgcgcgcagcacgacgccgtttcgcgccaacgccaaatggccacgtcagcgcccgtgaacgtgcccgactggagcaagatcctccgggccgactcggtggaatcgctgcacgggatggacgacggcttcgacgagaacaacgagtcggagatggttcctccgcacgagtacttggcgcgcagccgcaagatggcggcgaactcggttttcgaaggggtgggtcgcacgttaaagggccgcgacatgagaagggttcgtgacgccgtttggagccagaccgggttcgacggctgacttcctcgctccggttcgcaacttgtaattcaatcgataatcctttttatttattatggttacgggggtggcggtggttaattaaaaattttggggaattttcaaaaatgaaaaattaggaattagtttgttattttttttttcttt

SEQ ID NO: 128547 - DNA, 139 bp, Glycine max
  Clone ID: PAT_MRT3847_87082C.1
ggctcgaggtgtcggtgaacctggagctgcatctgttttttttttttggggccctcagatgacgaaaagtgtggtgagtctccttggcagtggaggaaaaatccatggaccattcaccgacacacatcaagacattgga

SEQ ID NO: 128548 - DNA, 231 bp, Glycine max
  Clone ID: PAT_MRT3847_87083C.1
caaattctctgtgttgtgttgtgtacttgtgttaattgtgttgttgttgtaggaaatttaagtgaaggagaatgatgatgaagtctgctatgtgtgcattggtgcttgtggcactggttgtggttgaagtggggcccatggctgaggctgcgagtgacttgcaacccatacacagttgactccttgatacttccgagcaatgtacattcaggggttctgctaccttcgagt

SEQ ID NO: 128549 - DNA, 573 bp, Glycine max
  Clone ID: PAT_MRT3847_87084C.1
ggttggtgccccctgcccattttattttgcataattcaatcgtctaaagtatttgggaaatgcagtttgggctgtaggttcatcacaaccttttttagttcttgaagtccatgcgtgtgtttattgggaaaaacccaagtcctacattggctagagataaaaccaagatatagtatataagtgagagacaattctaaccctatgagctagcttttgggattgagctagacccaaacccacattctaaaatggtatccaattctatcctagatccattcaaagggccacccaccatgttatccacacaccattctaagagtgtgtaaggtgtttataatagtttgatgtctttgattgcatcagaacaatatgctgcagaggatgattttcttaaactttgcttgatgttggtttacttttgatgtttcttgggaattttgtttgatgtaatgtgattgaaaagcactcttgtgattatgttttctttgacccttgtaccattaaggtgttttctcttctaaaggcttagattattgtcatgataacaattgattcatttagtcgaggtgatac

SEQ ID NO: 128550 - DNA, 319 bp, Glycine max
  Clone ID: PAT_MRT3847_87085C.1
tggtactctccttcactcttaaacgttgaggtaaactttccacaagttttcctttttctaatatcctacaccaggaaacattattctacacacattatgattcaaacaaaagttttatgtagaacatctctcccaaaattaatatccatgaatactacacacatccattgtaagataacaaccgattctgcactctctggactagcatctataactattctccaattttacacacattacacacctgtactcatcaaatccccaaaactacagcttcgcatgatcattggctacatagactttcactccatactatatt

SEQ ID NO: 128551 - DNA, 182 bp, Glycine max
  Clone ID: PAT_MRT3847_87086C.1
cgcacagttacaagaatacttcctactacaaccaaactctcgtgtctaacaaggtgcgtgctaatagcgagatgctcatggggaacttcaacgttttggacttgatttggtacccgtagccttgggatgctgggggggttcaacagggaagtgcaaagacacctccgacaggtgcgacgctt

SEQ ID NO: 128552 - DNA, 493 bp, Glycine max
  unsure (1)..(493): unsure at all n locations
  Clone ID: PAT_MRT3847_87087C.1
gcgcccacgcgtccnacggcgtgcnaaaagaggacagaggggggcaacacataacaaaaacaaagaaaaaaaaaaacccttagccaacacaaccatcatgggcacctctgcgattcagcaatcagcattcactggggaaactgcgctgaagcagcgcaatgaggtcgtccgcaagaccgggggggccggggaagggggcactaacatgcgccgcaccgtgaagaggactcctcanangatttggtgtgggcctgaccgtgccaaggacttggggccattctcggagcagattccatcatacctgaccggggaattccctggggactacgggtgggacactggtgggtgatgagctgacccggaaaccttcgccagggaccgggaggtggaggggattcacancanatgggcaatggttggggcgcttgggtcgccttcccagagatccttgggaagaatgggggcaaattcggcgaggggctggggggtcaag

SEQ ID NO: 128553 - DNA, 365 bp, Glycine max
  Clone ID: PAT_MRT3847_87088C.1
ctctccgctaatctaagcccatcgagcctctccagccgatatgtcttgaggaacctacccaagtttcttttccctataagcatgaaaatctctgctggaagtagggattttcaacctaaattttggattattatctttagggctaagggaaattatatggaagacattctaagccctaaggtgggttgttaattaatcatcccaaccttttcttgatgtacatttcacccccccactcaatttcactcttttacgctgcctttttaaaaacctttccctcatttatttttcttgggctactgaaggtagtactgctcctttccttttcccatttttttcctttccaccatctgttaaaggctaat

SEQ ID NO: 128554 - DNA, 419 bp, Glycine max
  Clone ID: PAT_MRT3847_87089C.1
gcttcgcctcaatgttatgggggaaaaagtgattaaaggaaggttctgttttctttgggtaaagggtagttgcggaatcgaaatgacggcggcggaggcagcgatgttaaagaggaagggggtttaactttttctagagaagtcagctacagcaatggaaaatttgattgcttaaagaacatttttttcctgttgagatggtttttggcacaaaagataatactgaaatagaaacgtttgtgtggatcgatgcttacctgttatctatctgcacgttgttgaaactttaaagttctgtttgtctcttcttagtattgctattctgaagagctgaacttgccttgttgtcttggtttagttattagtaactaggaaattggaacttactatctcagtagctcgtgatgctgacatgtttt

SEQ ID NO: 128555 - DNA, 2991 bp, Glycine max
  Clone ID: PAT_MRT3847_8708C.1
atgtcgcaaggacaagcagttccgtttgctgggaaatggcaccgttttacagtcaggaacgacggagagaaggtggttccagaaccacaaggtgacgccgaacacacagaaatctgggaatcggaggtgatgatccctttcgcagtagaaaggacagtttacgctttcggtggacctctgccagaccaagagtcactttcgagttcaatgaacaaggtatttccctgctacccaacttgcgaacctaggatctttgatagtgagccttacaacttcaattgtttaagcaaaccccataaactctttcgatccgccccgtcaatagcccataaggattacctaccttggcttgatcgagtcgaacaagcgtatgaggatttctggaagacatatggcatatttgacttgatacaattctctcgatttggtcctgaatatcgaccagaaatgctgatagcagctatgcattttttcgagtcttctaccaacacctttcaatttaaatgtggtatgatgacccctactctcttagatgtagctgccctcacaggccttaggcctagcggagaaacgtatgatcccactaaatctagtgataatatcaagctagtatataaggagaacaccttttccaaatatatagctgaacacaaaggatcggtcgaagaggaagtctctgatgaagagcatgtagccttcttgaccctatggctatctcactatgtcttttgcacaaaatccttgcaagtagccaaaagatttattccaatggcaatacaaattcatgaaggtcagaactttggatttggacgcctcttgttagcagtgctatatgaatcgcttggagaggcatgtgatgacctgaagaaatcgaaggatgggtcttccttcttagtatctgggcctatgtggcttctccagttgtggcttaacgccactttcgaacaagaaatgggattaataatcccacaagattatgctgaagaagttgccaatcgctcgatcgaaggccagagagcacttcgattaacacccaagaccttcgatcaaaatccacaaaagcttttcctcaagtacatgaagatttttctgagctttgacaagtttcttccccaacatgctccattcattagtcgagaggtcggcccggcctggttcactgactattttcctgttgtcgatccagacaatgaagaagaagtgaacgaaatatggtcattttacttgaatccacagatcctgtcttgtcgtacaggtgttcaatcgaactatttaggcctggttggataccagcctaatttggtttcgagacaatttggcctctcgcaaatccgtcctaaaagcttgttcgaagatcctcgagacgtcatacgaggggccaatctttcggaaaaaactttcaagaaatttttgaagatttctctagatgaaaactataacctgcatccttttgagttcaaccattcccacttctgcaccatagggtttgttacctggtgggagaaatattactcgggccgttcagttggagacactactatcatgatctccagacttgagagtggttttacacaaccaacggtcgagaatatccgctcaaaccttcaagctcgaggcaaaacaatcatgtcaaagaaaattgctgaaacgtctcgagctgatgtgagacccaagaaacccactggggtgaagatccaagaatggaaacaagaagagaaggaagaagaggaaagacctcttataagaaaaagaaaatcacctgagacttcaaccaaatctgctgaccaaacagaggcaggcaattcccaggctcaaatgcctaagaagaaaaagaaagtgaagcaggtcgagcctgaaccttctgtgactgtcgagggtggcgagccagccaggaagaaaaagaaaaagaccaagtcttcaaaagaacaaggtgagaatcaacctgttgacgtccaaccaccttcgactgatgttgacggcactgaagcagaaactactccctctattgctgagatgggcaaccctgtcgagcaaccggacttaccacaagaacaacctaccgtcgaggtacaaaatgtttctgtagaagaaataccctcatgtgctcgaacctctcctgctcctgagacggatgcagtgaatgttgaggaacaaggtgaaggtcaaggtattcgatccagcagtcctcatggatcgagtcagaaaagttcatctgaagaacacttttccgatgaagaggccatacaagaggctgaagctggaggttcagacattttcccggcgtcttcgacatctaagctttccgctagcatagggatcgcagaggatacattcattcaaatgcaagacgaagaccctgctgcagcccttcgactcctgctgaacaccagtcaagccaacacctcaagtgaaaagattcctggtgcttcgtcctcatctgatgctgacataacctcttcagtacgccaagattgcctgcttttgaagttatcaatggaatacgcacgggcagacaaattgcacaacccccttacctctgatgagattctaggcaaagttattcaaatcgaggccatcatcgaccagtttgcaagtgccgtgcagaaaaaacgagaaaatgacgccagactggatgcccagaaacaggcacatatccttctgctcgagaaagcccgagctgctcaacaagaagtcgaacgtctcaccaaagaggcaaaagaaaggtcttctgacgtcaaagcctgtgatgataacatttcctcctgggaggcaactattacgaatttactgtctcaggtcgatgatcttaggcagaaaattgtaacagagcaggccaaacgcaaggaactccaggagaaggacgctaactcgattcagaaactggttgctgaaaaagggagggaaggcctgaaggcctttagtgcatctcaagcggtagcagatgaggcgagagctatggagagtgctgaccaggataaccttccaaactaa

SEQ ID NO: 128556 - DNA, 706 bp, Glycine max
  Clone ID: PAT_MRT3847_87090C.1
gaggttggctgtgacaaaacacaagttgaactccaattttgctcaagaaatacagatggacgtcttgttgaagatactagtttcgttttcttgcgtggagtattttcgccatgttcgcttgccagagtatatggagaccattcgcaaggtggttgcgggtattaagaacgaggatgcttgtacttcttttgtgaactccatgccctcttatgccgacttgacaagcagcccagaaaaccaattacttatggtccaaggatgaagtgcaaacggctcgcattttgttttacctacgagtgattccaacttccattgaatgtttgcccagccttgtgttcagaaacatggtagctccgactatgttcttatatatggaacaccctaatggaaaagtagcccgagcctctcattctgtgttcatggcatttatgactatggggaaggattctgaaaagaacgatgaagtttcattgaaggagcaacttgttttccattacatgcaaagatccttattgggatatcctggcattactccttttgagggtatggcttctggggttgtaggaatggtccaacatcttcctgctggaagccctgcccttttttattgcgttcacagtcttgttgaaaaagccaaccagctctgttctgaagttttcactaatgaggctgatgcgtggaagaagtggcaaggagagccagaacc

SEQ ID NO: 128557 - DNA, 360 bp, Glycine max
  Clone ID: PAT_MRT3847_87091C.1
aaaaccaaacattacttatttcatataggatacaagaacatagtcggagctaccatgtttctgaacacaaggctgggcaaacattcaatggaagttggaatcactcgtaggtaaaacaaaatgcgagccgtttgcacttcatccttggaccataagtaattggttttctggtctagaagacatacacaatctcaaaaatacaaaacaataaaaaaataaaagagcaattcacattgaaccacataaatcacacctgggctgcttgtcaagtcggcataagagggcatggagttcacaaaagaagtacaagcatccttcgtcttaatacccgcaaccaccttgggaatggtctccatatac

SEQ ID NO: 128558 - DNA, 471 bp, Glycine max
  Clone ID: PAT_MRT3847_87092C.1
ctcgagccgaatcggctcgagcgaccgtgtcacacattgctcattcataagttttcttgctttcccaattcagtcaacacatcacaaatcatggcaggagcactgacagatgatcagattgctgaattccatgaagccttttgcctcattgacaaggactctgatggattcattactgtggatgaattggcaaccattatccgatcattagaagggaatccaacgaaagaagaaatccaagacatgattagtgaggtcgatattgatgggaatgggagtatagattttgaagagttcttgaatattatgggaagaaaaatgaaggaaactctagctgaagagctgagagaagcattcaaagtatttgacagagatcaaaatggatacatatccgccactgagctgaggcacgtaatgatgaatctgggagagaggctgacagatgaagaggcagaacaaatgattagagag

SEQ ID NO: 128559 - DNA, 119 bp, Glycine max
  unsure (1)..(119): unsure at all n locations
  Clone ID: PAT_MRT3847_87093C.1
ggtggagcgatttaggtggctnatgtcctataacgaacgtgacctcaacctgctaaatagctttgtggaggtaaccctccacggcctggttcttagacggactatggccgcttaggcca

SEQ ID NO: 128560 - DNA, 518 bp, Glycine max
  Clone ID: PAT_MRT3847_87094C.1
gaagcctttagcctcattgacaaggattctgatggtgtgttttcttggcaccttgatgatttgttgttcactttttcattttgatgtgaaaaggggttttagcattgattttgacttttttttttggaaattgttggtgatgtctaggattcattactgtggatgaattgacaaccattatccgatcattagaagggaatccaacgaaagaagaaatccaaaacatgattagtgaggtcgatattgatgggaatgggagtatagattttgaagagttcttgaatattatgggaagaaaaatgaaggtaagataaactagtcataagattgattaaataatcagtaactaaaaatgagctgtttgaggctaacgatcataatattataggaaactttagctgaagagctgaaagaagcattcaaagtatttgatagagatcaaaatggatacatatccgccactgaggtaaattaacattcttagttacacgtattgcgatgcttgagtaacagaatct

SEQ ID NO: 128561 - DNA, 249 bp, Glycine max
  Clone ID: PAT_MRT3847_87095C.1
gctaatttcattgtcaatagacccacagtcttggggcatgagtctggtaatattgtagatgatattgcactgaatcagttggctttgtagcctggaatcagttgcccaagatgccatttctataaagttggctgcaataatccctgtcccctgatagaatcttcattctacttcctctgcataaaccacagttcttgtgccaataagccttggcatatcctatggcatgtttttatgatgctgttgagg

SEQ ID NO: 128562 - DNA, 415 bp, Glycine max
  Clone ID: PAT_MRT3847_87096C.1
tttttcggttgcaaaaagacaacagaaggggctgcatgcataagccatcttactgaatctgttttcttacccatacactacgccaatatatatattatcttgttctgattttattttcactgatctctgataacaacgttgttagttgacaacataattgttctgtctcagccatcattaaaccaattttttcttctgaaaacattcaagtacacgcccttgctcgcggggataactgtggtagacctaacagaccccgatgccaaaacccacatagttaatgcctgaagggactttcgcttcttcaagctcgtgaaccaaggtgttcacctacagttcatggccaatttggaaaacgaaacactcggattgttcaaaaaaccttaatgcgagaaaaacagggctggttcccctg

SEQ ID NO: 128563 - DNA, 157 bp, Glycine max
  Clone ID: PAT_MRT3847_87097C.1
gcgtcaatcgggaggccgaaagccggcaaaagggtgagaggtgctcctagatgatcatccaggatactgtgatccattcaacagcaagcatagactcacgggaaggactatagttacatgcagctctatgagtgctgagggaacgtcaaagttgtcc

SEQ ID NO: 128564 - DNA, 472 bp, Glycine max
  Clone ID: PAT_MRT3847_87098C.1
taccttgttgaaagacctcatttatggggggacagagaaagtagacttattgattgtttgaatgcccttgagtcagagcgtaactctatatcttgtatccaacgaatgcgatactgttgagcctggttacaagataccaataatgtctcaaggtcatgctgctgcaactcacgttgacccatcagaaactatatatgggaaagatgctcctcaagcgtccgaaaatgttagcgaagagaataaagcctccgatagtaaaaactgctcctgctcaacagaagaccaacacacctcctgccattctgaattcaaccactgagccccagtcttactcctaaagaaagacaaaaactagttactatgacaaggttacgaaaactagtagtgtcacgggtgaaagattccctaaacacattagcatgctaactaccttaatgaaatgaatgataactgatcatctcgcttgagataa

SEQ ID NO: 128565 - DNA, 328 bp, Glycine max
  Clone ID: PAT_MRT3847_87099C.1
catacaagacaggggattgtactctggcccattctttgttgacctcccgtgctacctactcgtggaattgctgggcgactacatctgggacactgctggacttgccccaaacccagagaccttcgtcgagatccgtgaactcgaagcgatccactccatgtgggccatgctcagagccttgggctgcctctttctggagttgctgtcccgcaacgggctgaagttcgggaaatctctgtggattcatgccagctcctccatctttatcgatgtttgtgctggtcttagtggcgtacccttgcgtccttcccgtccagtgctttctctc

SEQ ID NO: 128566 - DNA, 3505 bp, Glycine max
  unsure (1)..(3505): unsure at all n locations
  Clone ID: PAT_MRT3847_8709C.1
aaagggcatgtgtcaatattacatcnnnagtagaatcgaaatacagaattcgaaataaaagaaattataagttctactaatgcatgactaagtcctcatatagtttcttcagggtggccatctctttgcttaagacctggtcagcactctccatagctctcgcctcatctgctaccgcttgagatgcactaaaggccttcaggccttccctccctttttcagcaaccagtttctgaatcgagttagcgtccttctcctggagttccttgcgtttggcctgctctgttacaattttctgcctaagatcatcgacctgagacagtaaattcgtaatagttgcctcccaggaggaaatgttatcatcacaggctttgacgtcagaagacctttcttttgcctctttggtgagacgttcgacttcttgttgagcagctcgggctttctcgagcagaaggatatgtgcctgtttctgggcatccagtctggcgtcattttctcgttttttctgcacggcacttgcaaactggtcgatgatggcctcgatttgaataactttgcctagaatctcatcagaggtaagggggttgtgcaatttcttcaaaaaattcaggtgtccaaaagcagcagaggggttctcttcaatggatttaagtacgtctgcccgtgcgtattccattgataacttcaaaagcaggcaatcttggcgtactgaagaggttatgtcagcatcagatgaggacgaagcaccaggaatcttttcacttgaggtgttggcttgactggtgttcagcaggagtcgaagggctgcagcagggtcttcgtcttgcatttgaatgaatgtatcctctgcgatccctatgctagcggaaagcttagatgtcgaagacgccgggaaaatgtctgaacctccagcttcagcctcttgtatggcctcttcatcggaaaagtgttcttcagatgaacttttctgactcgatccatgaggactgctggatcgaataccttgaccttcaccttgttcctcaacattcactgcatccgtctcaggagcaggagaggttcgagcacatgagggtatttcttctacagaaacattttgtacctcgacggtaggttgttcttgtggtaagtccggttgctcgacagggttgcccatctcagcaatagagggagtagtttctgcttcagtgccgtcaacatcagtcgaaggtggttggacgtcaacaggttgattctcaccttgttcttttgaagacttggtctttttctttttcttcctggctggctcgccaccctcgacagtcacagaaggttcaggctcgacctgcttcactttctttttcttcttaggcatttgagcctgggaattgcctgcctctgtttggtcagcagatttggttgaagtctcaggtgattttctttttcttataagaggtctttcctcttcttcctgaaagagagttataatattgacattagaaataaaacttgcatctttttcttcgtcgaattcgatgaccacacgcttcgagcgttttgaggtcgtggtagtctcagtgctatcatctttctttttactcttctcttcttgtttccattcttggatcttcaccccagtgggtttcttgggtctcacatcagctcgagacgtttcagcaattttctttgacatgattgttttgcctcgagcttgaaggtttgagcggatattctcgaccgttggttgtgtaaaaccactctcaagtctggagatcatgatagtagtgtctccaactgaacggcccgagtaatatttctcccaccaggtaacaaaccctatggtgcagaagtgggaatggttgaactcaaaaggatgcaggttatagttttcatctagagaaatcttcaaaaatttcttgaaagttttttccgaaagattggcccctcgtatgacgtctcgaggatcttcgaacaagcttttaggacggatttgcgagaggccaaattgtctcgaaaccaaattaggctggtatccaaccaggcctaaatagttcgattgaacacctgtacgacaagacaggatctgtggattcaagtaaaatgaccatatttcgttcacttcttcttcattgtctggatcgacaacaggaaaatagtcagtgaaccaggccgggccgacctctcgactaatgaatggagcatgttggggaagaaacttgtcaaagctcagaaaaatcttcatgtacttgaggaaaagcttttgtggattttgatcgaaggtcttgggtgttaatcgaagtgctctctggccttcgatcgagcgattggcaacttcttcagcataatcttgtgggattattaatcccatttcttgttcgaaagtggcgttaagccacaactggagaagccacataggcccagatactaagaaggaagacccatccttcgatttcttcaggtcatcacatgcctctccaagcgattcatatagcactgctaacaagaggcgtccaaatccaaagttctgaccttcatgaatttgtattgccattggaataaatcttttggctacttgcaaggattttgtgcaaaagacatagtgagatagccatagggtcaagaaggctacatgctcttcatcagagacttcctcttcgaccgatcctttgtgttcagctatatatttggaaaaggtgttctccttatatactagcttgatattatcactagatttagtgggatcatacgtttctccgctaggcctaaggcctgtgagggcagctacatctaagagagtaggggtcatcataccacatttaaattgaaaggtgttggtagaagactcgaaaaaatgcatagctgctatcagcatttctggtcgatattcaggaccaaatcgagagaattgtatcaagtcaaatatgccatatgtcttccagaaatcctcatacgcttgttcgactcgatcaagccaaggtaggtaatccttatgggctattgacggggcggatcgaaagagtttatggggtttgcttaaacaattgaagttgtaaggctcactatcaaagatcctaggttcgcaagttgggtagcagggaaataccttgttcattgaactcgaaagtgactcttggtctggcagaggtccaccgaaagcgtaaactgtcctttctactgcgaaagggatcatcacctccgattcccagatttctgtgtgttcggcgtcaccttgtggttctggaaccaccttctctccgtcgtttctgactgtaaaacggtgccatttcccagcaaacggaactgcttgtccttgcgacattgtaaatctgagagaggatgattcttacaaagggttttgtaactggtagaatcagtaagtgaaagcttgggttcacgaagaacaatggcaaagctcagagattcggtgagtttgatgatgaaaggagtagcaagttgttatctgagaataaggaagcctcgccggagataatggattcgaatcagcaaagaagaagggtttcagaag

SEQ ID NO: 128567 - DNA, 1401 bp, Glycine max
  Clone ID: PAT_MRT3847_870C.1
tacggctgcgagaagacgacagaagggggcgatggtgaaaatctcacttggtggatacgatgatggggaaggacccagcaaccgaacccataagcgacgcaggggagagagagagagagagagagagagagagagagagagagagatggtgaaaatctcacttggtgggtacgatgatggggaaggacccagcaaccgaacccataagcgacgcagggaagaggatgatgatgatgaagaagaagagcaacaacaacaacgaagctttgaaatggtggacccttcaattggaactcaggagcaagaagatcacgctgctccaccccacgatggatcgaattctaacgcaaatggggctggaaccagtagcagggataggtccgttcctatcttcgtttccgaccctgatgtccttgattgctgcatttgctatgaacccttggcttcccctgtgttccagtgtgagaatggacatattgcttgctctacttgctgtgtgagactcagtaacaagtgtcctatgtgtttaatgcccattggttataaccgttgccgggctattgagaaggtcttggagtgtattaaaatgtcatgcccaaatgcaaactatggctgcaaagagacatttagttacagcaggaaaaacaaccatgagaaggaatgcatctatctaccatgttcatgccctcttactggttgtgattttgttgcctcatccaaggagttattcctccacttcagccatagacatgtaggcatgggaacacggttcgcatatgataaatttttcactgtattcttaagtattaaccagagaacaattgttcttcaagagaaaaatgatggtaatctgtttattgttcacaataaccatgagcatctggggaacatagtccgcattagctgcattggccccaagtccatggcagagtttcagtatgaagtcttggctaggcatcaaggaaacgctctgatactacaatcttttaccaagatcgtgcaagggcaatatgctgatgctccatcaagtacgttccttttgattccgtcttgtttgtttggctctccacaactgaaactggatattcgcataaagtcacaccattaaaccttgggtggagattgatggaggctgtattttcgtttattgctgtatgtactggttttcaaatagtttattccatgtagctcagttgacttttgtcaagaaggttgcagtcattatgtaggaaactaaagaacttttttatgcatgcatatcatgtaaatatgaatatgcttaaactctattattacatatggatttgttcgtgtcttaaaatacacaaaatgtgttaaaatgcaacagttgttgttggtaaagtttttgttcacagtcacagtgcgcagagcttttaattg

SEQ ID NO: 128568 - DNA, 425 bp, Glycine max
  Clone ID: PAT_MRT3847_87100C.1
ctgttatgacaagaatttcaaaaagaattatcttctctctaatgtcaggggagctgtggaaccaatcactctcgtgcccatagaagagaagtcgtgaagatgcgttctgatctgacatatgaactcttgaaaaggatggagctagatctcgaactatctcctattaccagacgtgggggactaatctggtgtgcatttctaccttatgagtcataccatttgcagttgttaaacatgcattttctgataacactaagcagtcactggctgttagggccactcccatgcaattggagccaattgagggctaccgaatggatctgatggagattcatgaaacattacttcaggtgcttgcaccatcccatttggtagaggagggcggacgaagacgaaaaggcttggaatgccgggagtcggttgat

SEQ ID NO: 128569 - DNA, 343 bp, Glycine max
  Clone ID: PAT_MRT3847_87101C.1
cggtcgcgcgtgcatgaccgggcgatgtgcttgattgagagattaattcaggcctgctggggtgtgaactaattgaaagtgcgatactgcgaatggatggtggagatagtgatgacctgctagaagggaactactgctcgcctctacggccactgtctagaggtcggactcacaacaaaccccaacatggtgatgagagaagcgactacttcaatgaagacgggaccacaagttttggctgaggctttcatgaagcatcgatgaactaccaggatctcacgcccactggttacacgatggacgatgaactcaagggtgctgtcacctctgaagggctggatac

SEQ ID NO: 128570 - DNA, 364 bp, Glycine max
  unsure (1)..(364): unsure at all n locations
  Clone ID: PAT_MRT3847_87102C.1
tttcggtttcttcaagctatcaatgagatacctgacataacttaaggattgaagagattaaaatntcgtacgcttatttttgtcggaggcgggtctcctttccattccnangctcttcatataacttcaaaacttgatacgacatacactccattncttgaacttcatcgtttcccatcaatagatacacaggaacanccacatgcaatgcttgtccctatggagtactttttaatgggatatcgcttctataggccatgccatttcattcacatcccaagaaccccacttactccatcttacatctctccttatctaatttctccagagatcatggcatctaacctcaatcctataaagacac

SEQ ID NO: 128571 - DNA, 429 bp, Glycine max
  Clone ID: PAT_MRT3847_87103C.1
tacgcctgcgagaagacgacagaaggcggcgtaggcacagagagagtgagaaaagcgcggatcatgtcgctcgaagagcatcactcttattctcacgctgatgcctgagctgtccatacgtatccttagcaggctgctaccatcctgcatgattcactacatccctatcaaatccattccttgcaaggttgtagcggtctctacttcaaagacaggcaagcatgcacatccaaagcagtcactttgttgcatgaagcatattgacttatgggacaaaagcttcgaagatattggtccatcatcccacatctgtgatggaccacatgttattcgcactgactattagcttattgttatccataaagacttgtctgctagtcaattgtctgatattgcctataccaggattcttcgaatgctctctactta

SEQ ID NO: 128572 - DNA, 479 bp, Glycine max
  Clone ID: PAT_MRT3847_87104C.1
actacaaaaccccttcttaattcttctttcgccatctttacatttcattgtcaaaagcacaaagatacgaaggaagaaaaaagccccagtttgtggaattgagacatggagagcagcagtgggattgagagcacgggggggcgtgcgccactgtcaggggtggtggcagattgtgtgaagcggtggttcaaagacactctgaaggaggctaaggcaggtgatgttaacatgcaggtcttggttggtcagatgtactatcatggctatggtgttcccagagatgctcagaagttgtcaggggtttgattcctgaccatgtgattggagaagactctgttgggagaaacaaaatccacttatgtttcgtagaggagttagtttctgactatctgttggggatatccttggtacacaaaaaaacttatatgcagtttcttaggtgcttttgatgttgtacttccaataattggagttttact

SEQ ID NO: 128573 - DNA, 298 bp, Glycine max
  Clone ID: PAT_MRT3847_87105C.1
aatgaatctgctgcgtgcggatcgctagaacgcctacgagggacgacctggcggcctcaatgactttgaactcacctgactcagctcaaaggctaactatgtggtaatgacactgatacctaattgcactaaccctattgacaggaagattgataagggtctaagtcggcctaaagggctctccagaacctttagatactataccttgcactgatctggctggagaagtagctgatatctgaactgaagttaaagatgctaaagctgcgaacacaagtacttgctaaactcactcatc

SEQ ID NO: 128574 - DNA, 741 bp, Glycine max
  Clone ID: PAT_MRT3847_87106C.1
acgagctctctttctgtctttgctaactacaaaaccccttcttaattcttctttcgccatctttacatagcattgtcaaaagcacaaagatacgaaggaagaaaaaagccccagtttgtggaattgagacatggagagcagcagtgggattgagagcacgggggggcgtgcgccactgtcaggggtggtggcagattgtgtgaagcggtggttcaaagacactctgaaggaggctaaggcaggtgatgttaacatgcaggtcttggttggtcagatgtactatcatggctatggtgttcccagagatgctcagaagggaagaatttggctgactaaagcgtcgagggttaggtcttcagtttggagagttggtggtaaacgtccaggttataatgcaagcgactctgagtctgacgaagaagaagattcttaaacagactaaatttgatttcatgtccaaaatttgaaaggtaggtgtggcatcctgcttcttcatagccaccacatatgttcttgtgacttccggttatcattttgcttcctgatctgtgtatgatatgctacatcatttttctgaatcaaggaaaaagaaaaggaaatattattactttttgtgaaaattgttgcttgttaattgaggggcattttccctttccttgacacatcaccatatcatgcaaatagaataggaacgtatataagttaatactttctaaatccgaaatgaagattcaggcttcc

SEQ ID NO: 128575 - DNA, 237 bp, Glycine max
  Clone ID: PAT_MRT3847_87107C.1
atgagactggtgcagatatagcagggatcagtaaaactataagtgtagctttggcaaagaaagacaatgatgttccatctcatcgtaaaacaagtcaaagaagaggagcaagagcagacgttcttcgaaaggtaaatcacgtggtaagctgaaaccaactacagaaattaagaacactgatatagaggagcaggagccagaaattcctacaaccaataatacgtatggattgcttgt

SEQ ID NO: 128576 - DNA, 183 bp, Glycine max
  Clone ID: PAT_MRT3847_87108C.1
atcacgtatgggtctggacctttcaacagggctcctcagaaacatctttgctgctggagccagtcaaccgccatctgcatagtactaataattcaatttccaactgaagctaccattactatccttcgaaatccttacatgttcaagcttatccaggatgatcgtccaaatgctgattaaagt

SEQ ID NO: 128577 - DNA, 935 bp, Glycine max
  Clone ID: PAT_MRT3847_87109C.1
gcctgcaggtcgactctagatgttattttctagttctcgagataaatatttctcaatgcctaaaccttataacactacatgagcataagtgatcaagccataaacacgataataagcacagaaaagagacaataatatcaaaataatattaaatagatagttagaatcattatatcaataatgtttggttgttaagctcccaataatgagaagtttaacatctcattgtcatgaaagacttataaataaaataaggggcaaatgaagtggaagaaaatggaggaagatggagaaaagtgaaggtggaatgctccaccgatcgtgccccaactctctggtgcccaatagaatgaataataataagatcccttctttttttcttcttaaaacgcaatacaatcatgtttttcgacattgactatgcgctgagtgagatggaatgttgagcgtgacaaaaaaaatccaattggtttaagtgaccacgcactaagtgtgcatcatgcggtaagtgcgcttgcacgtgacaactgtcttcccatatacttcttgcactaagcagggctgtcgcgatgaacgatcctcatgcgctgagtaaggcagtcgcgttgagggcgactctccagctcttcttccatgtattctgttgtatctttacaaaaagtatattactaaagacactatagatttactgactttaatatcgaccggataaaaactcaaaaagacattaaatttctaatgtttaaacacgcagaaaaagcaataacaaaaagatacaaattagataattattatatgatttaaatttacaaattacacatacataaccattatcacaagggaatacgctgattagcaattagcatataccagaaatttgctacgggcacagggcaagcaggactgcatagaaatagaactaaaagttggaagct

SEQ ID NO: 128578 - DNA, 171 bp, Glycine max
  unsure (1)..(171): unsure at all n locations
  Clone ID: PAT_MRT3847_8710C.1
attnaagggtagatttgatatttttttaaatgtttatttatatttttttgctataaagggggcatggtcgggttatattctccattttagtaactgggaactctccaaagatgctggtatatatcgcttttcaagggtttcttgtgctgcatcttctgtggttggtgcaga

SEQ ID NO: 128579 - DNA, 508 bp, Glycine max
  Clone ID: PAT_MRT3847_87110C.1
gcatacagaatgaaaagactcgcaaacgagtttcatgtattgctaaggaattgaagaaaattcatagagaggcagttcaaaacaccatcaattctgtcacagtagtagctgtcctttttggctcaatagcattcatggccttattcagtctacccggtcaatatcgaaagaagcaaccagaggcagggaaggcaaatatagccgatgatgctgccttcagtgctttctgccttttgaacgctacagctcttttcctttcacttgcagttgttgttgctcaaatcactttggtggcttgggatacaaggtctcaaaggcaggttgtgtcagtgattaacaagctaatgtgggctgcatgtgcctgcacttgtggtgcttttcttgctatatcttttgtggttgttggagatgaaacatggctggctattagtgtcacagttttgggggcaccaattctacttggtactctagcatacttgtgctactttgtttttaggcgacgctttgg

SEQ ID NO: 128580 - DNA, 462 bp, Glycine max
  Clone ID: PAT_MRT3847_87111C.1
gttgaacctcacttgatgattgtctatcatacaatgattttgttacttgttttccttttttttttttcgctctcacaataatatgtaatataagtggagtggtaggctttcatcacatctataatttatgtattgttttcttttgaattgaaattttgatatcatattagatggagctatttattttgaatgtttaaatgtctcctttcattggaaataggagtactacacagtttgagggtgctgttttatgacttttgtttggttggagtaagatgttatcctctatatatcttaacacaggttacataatactcagaatgggatgaaatatgaatctttaacatttaagtatgtaaaattctatgtagtttcctctaggcttaaatgtgtttttcatacctgtgtttttcatacctgtaatatatccccttttcaatttactacgtaactttttctact

SEQ ID NO: 128581 - DNA, 239 bp, Glycine max
  Clone ID: PAT_MRT3847_87112C.1
tcaatattgtatataaattttaacagaaatgcagatacattcattttgtaataatttatatacaatattgatattgtctgggtgcaaccaaaaacaacagaccggtgcatgatgcacggcatgaaaaaccggtatacattcaaaatatagaagcagacaatatcaatattgtatataaattattacaaaacgaatgtatctgcatcactgtcaaaatcttaacatcactaacatcacgc

SEQ ID NO: 128582 - DNA, 493 bp, Glycine max
  Clone ID: PAT_MRT3847_87113C.1
tttaaggcttcactctaaacacaaatcttggtatctcgcagggagagagcttacaactctagagatcagggatgcacttatcccttatcttgaatctctttttgaagagcatggagacatcctagtggatgtagtggaaaactatccaaatcctcctggtaaggataaatcggctgtgctggttcctccttctaatccagtgttagactaagaagcttaaagctgtgtctcgagtgagtgagacagaccccgatggtggaaatcttcgccctcatattgtctatctcatggaacttggtatggatattgagcagattaggagtatcacacgacgattcccatcttttgcctactatagcttggagggtaaaattaatccagcggttgagttttttcttgaactgggagtgccaaaagagaacattcccactatcctcactaaaagacctcaattatgtggaatcagtctatcttgaaatcttaaacccaccat

SEQ ID NO: 128583 - DNA, 308 bp, Glycine max
  Clone ID: PAT_MRT3847_87114C.1
cttgacctgtatgagacagcagaagccgtcgaagaaggtatcaacaaagacctcgacgctacccgcataggcaagttcgccgacatcaagacttccacacgggaaaccatcttactggcgatgatcgggctcgtcgaccacaagaagctgaagcccggtgacctcatcggtgtcaacaaggattcggatcttgttctagacacgctccccgtcgagtacgatagcagagtgaaggcaatggaagtcgacgagaagcccaccgagaagtacacggacgtccgaagactggataagcagatcgaggagat

SEQ ID NO: 128584 - DNA, 311 bp, Glycine max
  unsure (1)..(311): unsure at all n locations
  Clone ID: PAT_MRT3847_87115C.1
tcgcngcacgcgtacgtnagctcggaattcggctcgagnttgagttctctttgtaaaaatcagtaaatggaagtcacctnaatttaaaaaaannnnanaaaaaaaaaanggggggcngccgattagngngctcgtngnccnggganttanttcnggncgggtacctgnnggggtacnngttttccctanngngngtngtnttanngnttggggnantcnnggncanngnngttnccngngngaanttnttatcngctcaaanttcnanaaaaaaggnnncnngaaaaaannnnngnnnnnnnnnnngggnc

SEQ ID NO: 128585 - DNA, 190 bp, Glycine max
  unsure (1)..(190): unsure at all n locations
  Clone ID: PAT_MRT3847_87116C.1
gaggccaagccaancccgcccttttcccgatcctctctctcatctcactgcttttcccttttcattacgtgttgatcgagaaaggtgtaaaggaaggatcaacggaacgccgaaatttaaatcacgggatcaggaaagctaggaaacggtcctggattatacttcacttgttcggtagggtagaagaaga

SEQ ID NO: 128586 - DNA, 276 bp, Glycine max
  Clone ID: PAT_MRT3847_87117C.1
cctcacttctccaatcgtcgtctccaactttccgcatccctgctccttccgtcagcttcgaaagtgcaagcatctgccgaaggaataagtccgaactatctccaggtatcgggacaagagtgacaggcccctccaacaagctaccccgcgtgcataataaatcgacatcatcagccgcccgtatctttcccgcccaatttcttccttctccttctcaactcctctcccagacaagcaaacaatcatacgctacaatgtctgccgataccgttggaa

SEQ ID NO: 128587 - DNA, 500 bp, Glycine max
  Clone ID: PAT_MRT3847_87118C.1
ggctcgaggatgattcaggaaagattcgcatgaagggtttgtgtcatggaagttgattgtgatgaaactggaagcattccaactgaactttgaagacacaaacccttcaagatgattcatgaaagattcgcatgaaaccccgtgatccccggcgcattctccacactaataatactatccagaagagtgggatcttggggaatgagcaattcaaagtcattgtatcccccgtgtctaacaaccagggaactggggacaatgtcaatgcccagaatcttgagggtagggtggatagtaaattagtgcctactcaaccaagtgcacaacctgatattgctcgacaatttcgccggaatctgaaaaacattgctgatattatgtctgtttcccaagaatcatgaactcacactcctgctgctcaaattttttcttcaacattttgttcccttacttcagatagaggggaacagaaaatttgatgggtcaaactcttagaacct

SEQ ID NO: 128588 - DNA, 137 bp, Glycine max
  Clone ID: PAT_MRT3847_87119C.1
gtaaccaacatattattgaattgcaaacgggatataaggctataagtatcattaccagccaagcatgacattatccacatatatgacggggttacattggaccaaccattttaactaatcaaacattctctataatt

SEQ ID NO: 128589 - DNA, 369 bp, Glycine max
  Clone ID: PAT_MRT3847_8711C.1
ttttttctgttttttgggtaaattgtaatttttttattggaaaacaaatatacaacttggaatggatttgaggcaaattgtgccataagcagattttctttaagtggctaaaacaaagtttaaaaagcaagttaacaataaaagaaaatgtttctggtataggaccagcagtacaaaaaaatagtgtacgagtacctggataaaacacccgttttgcaatagtgcaacttttaagtacatattgttgactgtccgtagtccacgcagagttacaactccacacttcaacaacaacatgctgacagttcctaaagaaaactactcaaaaaaaaaaaaaaaaggcataacccagatgttccctcatttgac

SEQ ID NO: 128590 - DNA, 288 bp, Glycine max
  Clone ID: PAT_MRT3847_87120C.1
ctaaacttctggggtgcaaaaatgaattttgacattacttcctattgctgctacagctgtgcgcgctttgttgacatacgggaacagaacgacgtcgattgcccgtgctgccactgcggattcgtagaaaaggttaccgcccctcaatcgacaaggcaaggcttccgccgtcgactccgcaacgccgtgaaccactctgtgttgaacccggtgatcgtgctctgctgaccgggagaggacgagcagagcagctgtgagttatactacgactgcttcgacggcgagggg

SEQ ID NO: 128591 - DNA, 223 bp, Glycine max
  Clone ID: PAT_MRT3847_87121C.1
tgggacagctacttagagtcacatataaaagcgctccggctgttagaggtactctcacccgatcgcgggccaggtctgggctctaatcctcactccttttgtgacgggtccctctttaattgcagtcatccgtgggttcactccttactacttccgcgtctctccctgttctgtggacctcccacggatccctctcttctcaagttcttcccttccgtgttcc

SEQ ID NO: 128592 - DNA, 185 bp, Glycine max
  Clone ID: PAT_MRT3847_87122C.1
tcgccctttcgtccgggaaaattggcataccagaacagagagagctcttctcttgctgcctctaatatttagaaggaaaataaaagcatgtccaatggatgcctttaagttcctgaccagctatctgtcaacttttttgggagatgacttgcatgtttttgatgtgaacttcaactgtggaggct

SEQ ID NO: 128593 - DNA, 500 bp, Glycine max
  Clone ID: PAT_MRT3847_87123C.1
ccacgcgttcgcccacgcgtttttctaaacaatcggatgttatggatagggctgattgtatttgggtctaaattgaaaacatcactcttttaaagctatgtgcttgaaatctaaactttgacacgttcactattcattgggaagatccgtactaccggtataactatgtctgtctcattgggcgggaaaacggatggttcaacatatggaatgtaaggattaaactacatcaatgcaggtataaatatgttgaaggcgtatcaagctatggattggttgacatcctgcgtggcgctacatggtttccaatccatgaatgtgtactggtgtctacgcactacattcatagagggacagattcacatgaatgacggggggacatactaaaagccatggtggcaatggcaaccgttggaaccgcataatgctgatgtgacttgtaaccatactgtgcacttgaataaaactggcgaacttgctttgactcatgaccgcatttt

SEQ ID NO: 128594 - DNA, 115 bp, Glycine max
  unsure (1)..(115): unsure at all n locations
  Clone ID: PAT_MRT3847_87124C.1
catttgtngtngcanagattctntgttagcagtgtacagtacacagattgggtanaagagtgattgaattggggttcttcattattctttctgtagagttttttcttcngtaaag

SEQ ID NO: 128595 - DNA, 216 bp, Glycine max
  Clone ID: PAT_MRT3847_87125C.1
caaaaaaaaacacacttatacttaatttacagaaaacagtgacgcaataaaaagaacagggcttgaaagtacatataaaggcataaacacatataacacaagcagcggatactacgaagacacaagatctcaacatgaatcgaaaaaacatacatgctttaaatgggcccgagtacagtaccggctgtctgaaaacccctgtataaacctaagcct

SEQ ID NO: 128596 - DNA, 380 bp, Glycine max
  Clone ID: PAT_MRT3847_87126C.1
tataacattaagttaaatatcaaatttgtttaattatcaaattttgtaaataaattaatgtataaaaaattctaaataaattataattaaaaaaattcaaaacatacggattgccaatctgtatgttttgaaaagaaaatacgcacatcttcttctccggtgatgaaaaactatcgaacttcatcttatatccgtaaacaacgcacatacaccactggcgataacatactcacaaaaggacgctagtgaaagcaagttacgattagggagtgcagttttacgaaaaaaaggtgctgcagaaattaaaaagctaatttgctatttataactgaaaataccgaacaggacattttcgatattttgaaaaattgttgggtgta

SEQ ID NO: 128597 - DNA, 838 bp, Glycine max
  Clone ID: PAT_MRT3847_87127C.1
ctgcctgccgcaccttctcccctttccttgtcacccctccttttcgtttccccgttctccactgcttcccttaactccaattctagaataaaattcctattcttcttctcatttcaactctttgcaattgcgatctttcattccttttttttactcttggtaagcgtagttcggtgttggagaaccagcttccagttccagaatactgctgaacagagttcggcttcgctttattgggactcagttgtgtttctactaggttatcttctctgaattgcaaatgaatgatcgttgaaaaaccatgaagaaggtgaggagaaagatcggcaagtatgaggtgggtcggactattggcgaaggcaccttcgccaaggttaagttcgcaagaaactcggagacaggggagagcgtggctattaaagtcatggctaagaccaccattctccagcacagaatggttgaacagattaaaagagagatatccattatgaagattgtcaggcatcctaatatagttagattgcacgaggttttggctagccagaccaagatctacataatccttgaatttgtaatgggaggggaactatatgataaaattgttcagctgggaaagctttctgaaaatgaatctaggcactactttcaacaacttatagacgcagttgatcattgtcatagaaagggtgtgtaccatagagacttgaagcctgaaaatcttcttcttgatgcttacggaaatttgaaggtttctgactttggattgagtgcattgactaaacagggtgctgaccttcttcacaccacttgtgggaccccaaactatgttggcccctga

SEQ ID NO: 128598 - DNA, 343 bp, Glycine max
  Clone ID: PAT_MRT3847_87128C.1
taagaaactagaaaagaactttcttatttctgggaagcccaaacatcggggggaaaaaatcccattgtactatatcccataagaacactaaaagagggcaccaccaatgattgggttataaaaagaatgctttttttttttttttttcaccttggcctgaatggaacattagtcacaccccccttatggtgtcaccctttagagccaaaagctggtaaaaaggaaaaaaaagggggtggtttataaaggcgcctggataataccaaccacccaacccgggggttgcccttgttgctcctgtcaaaaaaaaagataattttaaattgcaaggggggcgaattga

SEQ ID NO: 128599 - DNA, 320 bp, Glycine max
  Clone ID: PAT_MRT3847_87129C.1
agcatatctttagatcttgacccacagtgttaccgcgcgcgtgctacgcagcccctcggttttattgacgtgtgtgcggggacgcagtccaccctacgcacaccgcctgcaatgctccatctattgatacctccttatgctgtatgcaccaatgactctcaactatccctttttgtcgctgactaccggccttatcggaggcgagctgctctccgcctaccctctgcgtggcaaagcatctgaacaccaggtgcggccattggtagagacacatacggtttcgcgatcatggcttcataatctactcaatcaatttcaac

SEQ ID NO: 128600 - DNA, 784 bp, Glycine max
  Clone ID: PAT_MRT3847_8712C.1
tgaatatgcttgtggttgtaccaataattttaaattgagagtaaggagctcctattgaatgaaccatttccatttcttacaccgtcaacacatcgcaattctgaaagggaatggaaggagatattaagcttttggatggagatgacactcacaaaaagaaagaaagttctctggtgaagataaaagtattgtttttcgccagagcccgtgatctcactggcctgagtgagttgccactggaggtgtcatctggaagtactactcatgattgtttgaaaaagctttttgtcaagtttccaagtttggaagaaataagaggctgcatggttttggctctgaatgaggagtatacaactgagtcaaccattgttaaagacactgatgagttggccataattcctccaataagtggtggctgaatcacttaatatcactgcatggtacttctacttttgtaatctaatactgattgataagttaatatctcatgtagggtaaattttattggtggtgtgcagttctcactcaagaggttaacctttctcatcatacaattaggagatttctactaagtttttggataacggttcaatcatgaagttaattaaaaaataattttaacaaaaaggttcaaccttcgagaactcaaaactctgtaaaattaccctaccagtagattgattgtgatttgtgaacttcaataaatgattgtaatgctagatttattgtaaatgaacaccagaaattttcttgttctagggaaaatgaagaattttcatttgtc

SEQ ID NO: 128601 - DNA, 504 bp, Glycine max
  unsure (1)..(504): unsure at all n locations
  Clone ID: PAT_MRT3847_87130C.1
tgcgagaagacgacagaagggtggaagagggtgacgcaagttaaacggtatcttttcttttaggattttacaaaagtagtcacatagtaactgaaaaaggcttctggagtctggaagacttattggataaaatgtgagttattttaaattttttactactttcgtttaaggataaaaaaatacattataatctttcattgatatacctcatttgtaagtaattatgggattaagtctatttgaagaaaatgtttgtattcaaattctaaaagatatatatttacatttaatgtttcatagaatcttgaacataattactctgataaaaaaaatcatttgcaagtagtgtaacaataggtttttgttgtgatcagtgacatgtcttaatcatagaatgaaacaattcttccctttaatatttttctaaaattaaaaactcatgttattaattatgatattttaatacttaaattntattttaaagattaatatccttattttgat

SEQ ID NO: 128602 - DNA, 527 bp, Glycine max
  Clone ID: PAT_MRT3847_87131C.1
gaactagacaaaaaatttatttcacatcatgtacttaatcattgagcaggtacaacagaattggaggtagtagcattagtggtcgaggaaccagttgaggcagatatgatagatctttaaggggcccttaaatttgactcaaaaaagataggcatcgaaggtctcatatgctcaagtaagtcagtgctactgagttggactactacttcagacatggctggccgcattgcaggcgatgcttgagtgcacaacaaagcaatgcctatcactttcttcacttcttctggatcatacttattagggtttaaggttttgtccactaactccaagtgcttgccactctcatacaatgtccatgattgtcgaagaaggtaatcatcctcaatatcatcatcaacaacattcacattagtactctttcgaccacttatgatttctagaactacaattccatagctgtatgtatcagccttttctgataattgaccatggagtgcatactcaggtgctgtgtatcccaatgtccc

SEQ ID NO: 128603 - DNA, 246 bp, Glycine max
  Clone ID: PAT_MRT3847_87132C.1
ccttcctctctatccaaatccgcgccacaaccaacctcacccttcaattcctcaaaccctaactctcctcccagcacaagcccatcctctgccgctggctctgcagcgccctctccatctactccctctccgtcctcctctcgaagctccccagaatcggcaccgttagcgcctccatcgacgccgccccctcctcgtcacgcgcctcgccgtcggctacgcgcacacgcgctcctctgggaggcc

SEQ ID NO: 128604 - DNA, 334 bp, Glycine max
  Clone ID: PAT_MRT3847_87133C.1
ggctcgagcgttcactctcagctctgataattgacctggtgcctaaaacaccctcatgaacaaaggacagcgggaactttcgataacgagagtgggggtcaattggagactacatgaaactcaacactatatgactctgacattgattcatcactagatgagaatgggaacagatagatatatgccttgagtgaaaccagcagatatatatatatatatatataaccactcatactagctgatcaaaggagcaatgtctgacactagctaatctaatggtgccacagcagatcgtgttcagctacagatccagatccagcatgtgatgaccaag

SEQ ID NO: 128605 - DNA, 405 bp, Glycine max
  unsure (1)..(405): unsure at all n locations
  Clone ID: PAT_MRT3847_87134C.1
ttaaactccctncttcctcactacacgccgtttctcttttattgccgttttttttatgtcgtcatgttctgagtttcgtgttgtcctgtttagagaagnagagctcttttcaactccctccttggaggggtgcggaaacccnnaaaaaacgccaaaacgcaaaacccccccngcagaggcggcgcgaccacccatttttgattccggcgagancgngacgagggtcaagaacgggggccggagaaggancaaaancaagcgaaggaaggacactnngccagacgaagaaccgcggcaggaatgacgccggcgctgggggagagnctcaaacgccggcgggggatcctgaaggagaaaagagagagattggccagcacggggagatatcgctggcgctgggttcct

SEQ ID NO: 128606 - DNA, 460 bp, Glycine max
  Clone ID: PAT_MRT3847_87135C.1
atgaccggcctcgcggattttgcaagcgcgggcacctgaaaaacgcaggcacgcagtggacgcgcgctggtaaccggagagccgggataataggagtgaggcatatagggctcaaacaacccgatagaacaacgaggttgacacaaacgaaaaacacggctaaaccaccatgggaagccagggaagccaccacaagcacaaggctggggagaactgtgaccactaaaccagccactctaagccgtgggatacgatgccttgtctagatctggaccagcagccgcatgcagggtggccaccggattcggctgggggtgcggaagccaagagtgaataggctcctcccatacgggagaatgacgtagccccgttaaagtccatgcgaaatcactctaggggccggacggaccacctggtggatcgcgcaacaagacgctgaaagaaaccaggttgacgagga

SEQ ID NO: 128607 - DNA, 259 bp, Glycine max
  unsure (1)..(259): unsure at all n locations
  Clone ID: PAT_MRT3847_87136C.1
aattaggctggagcgtctcttaattgttcgtaatgatagtcgtgaagtagtgtctatagttttagaaaagaaagaaaaaactaaaaaaataataaatgggcggcgcgcgccgactagatgaagctgggtagtaccctggtaattatattaccggtaccaggtaccctgtcatggcgtaccaaaagctttccctaaatagtgagtcgttattatgaagacttggcgtatatcattggtgcattagnncttgtttcctgtg

SEQ ID NO: 128608 - DNA, 237 bp, Glycine max
  Clone ID: PAT_MRT3847_87137C.1
gaccaaatgtcatcatgtattaatatgaaaaattaagaaaaacagctacccaaaaacagacaaagcaccagctatgagggaacatattaaaaacaacacagccattcagtactgcccaaaggacaaagacgtttcttcaaaaccctgttccccactttaaagcttccacgggaagcctccaaaaaggccatgggaaaaacccccctaaaaaatttttcccaacaaacttttttccaa

SEQ ID NO: 128609 - DNA, 423 bp, Glycine max
  Clone ID: PAT_MRT3847_87138C.1
cccacgcgtccgcccactcgtcctgatgtatctcgatcttcttcttttgttgtggtgcgcgtgtgcttgttttgggtctcacctgaaactgtcttgctgcggtggtcactgttgttgccgaagctcctgcccgtgccgcaacggctcctgaggctgcacgctgcacccacacttcagctaccctgaccgaaccaccaccgacacctcggtcatggtagtggcacctgttaacgctcaatttcacggcgctgaaacgggagtgcccgctgagaacgacggctgccactgtggaccatactgcatctgcaacacctgcactagcaactgaactgttaccagagcacagctacacgcatagctagccctaaattcgcaataatgatcaactcataatcgtgtaatcataacctatgcattatgtat

SEQ ID NO: 128610 - DNA, 127 bp, Glycine max
  Clone ID: PAT_MRT3847_87139C.1
cgacagatttcaatttagagctagactatatgaaactgataaatgtcaaagctaggctaacatctacatacacattaattagctccatcatcatacttcatatcctatccacataaccaatagccat

SEQ ID NO: 128611 - DNA, 629 bp, Glycine max
  unsure (1)..(629): unsure at all n locations
  Clone ID: PAT_MRT3847_8713C.1
gttcccatcagatgggactcttctgatcaagccttgttttgccttcagcttcaccattgagggagagattggagaaganccacatgcagaggacccagtttggtggaaagtaagtttgtgataatgttgtgggacagtggttggtggaaagtgtttcagtgcatgacaggtttctgagtgaatattgttgttagggctatctgtgaaggaagagaggagggatccaagaactggtgttgaagagcttcttagcatcatgttttctgattcaagataacaacttctgtgtgtctgtcccttgctttttgattataaatcactgggaaaatagaacaaaactgcaaattacctacttcaggaaaataagaaaaaaactagaaaaagagaaagacatattggtttttgaaacagaaaacaaattgacatggctacaaggaaaagtaatgatgctgattgctgatttgctgattgctgattgctgagtagaatcagtaaatttaacacaaaagaaatgtttggggttggtaaaggaagacagagaagaaaagaacaatacccttttgtgatgctgaagagttcttgatgaccctataaatcctatgtaatttcagatgatcattggaagggag

SEQ ID NO: 128612 - DNA, 459 bp, Glycine max
  Clone ID: PAT_MRT3847_87140C.1
tacggctgcgagaagacgacagaagggcagatgctttaaaaggagttaaaacttcaaagttttacaaaatcatattttattaataaaaggtttggcatacaaaagtaagcatagatgggaagaccgaagcagaagatgtaaccaagctggggaaatactagataaattgtgacctgattcaattaagacagaaaacaagagcatcaattaattttaaatttttaatcaaacaagtttaaaagaacatgatgttcaggctagagatggaggaaggaggatcaagcagaaaaaaaacttaaatcaagagaaattatttagtagaaacaaaataaacaaataaaaacctattgtgtagtgaaaattgaaagaaaaaatcgtacagaaccacattgtgaccaagaaggcaagaacaaacactaacacatagttagccaacctttttgacaaagtaactaaact

SEQ ID NO: 128613 - DNA, 182 bp, Glycine max
  Clone ID: PAT_MRT3847_87141C.1
ggggtgggaattggaaaacaggcaccagccctagcctgtcattctaatccagggacaggggctacgaaagccctgacaagtctccaccactattctcacacaattaaattctcaaaactctaaatgagccgcatacgatacccaattgctagagacgcgggcgggctcatccttttttcaag

SEQ ID NO: 128614 - DNA, 649 bp, Glycine max
  unsure (1)..(649): unsure at all n locations
  Clone ID: PAT_MRT3847_87142C.1
ggctcctacgttattaagtggcaggtgagcctgggagggcagaagcagattttggccgctttgatgttaagtcagttataaggaacatctacacactcttctctggaagtgagataccaatagcaggtgataatcaggaaaatcatggatttgtatgacccaactactcccctgccaccatgggttctctgaggaagaactggcaacctatgcatcactatacgaaaaatctggcttcaaatttgcattgcaggttccatacaggactcttggagtggatagtggcataagtgatcctaaaatcacagttccggcacctgctgatcaattgggtgaagaaaagacaattgtcttcaagtgttttggaatggaggactaacatccgaagtggcgcaatgaaacattttgtgccagacttggaaatcatatatattccaaaaagaagccattttgtgcatgaacaatttcctgaaaaggtgaaccagctcatcattgaattccttaacaaacaaagcatttgattgtctgaatctgaactcaaaataggatgcaatattgtataagaaagcaactctctgtggcggaatgaatnttaaggaatcacttatttccaaataaggcaataagtaacttgaatgagtacttattc

SEQ ID NO: 128615 - DNA, 623 bp, Glycine max
  unsure (1)..(623): unsure at all n locations
  Clone ID: PAT_MRT3847_87143C.1
ttgaaaatatttanngtcacacattgaagacttgtccaatcctccaccctctcctttctccaataacaccctcaacaaaccaaaagaactttaaaaaatgaatactgcaagccacagacattacttatcaggcctatatatatcctatttaattaatccctcgaaaggatataacaaaaaatagagagaaaagaataacaatgaaggggaaaagaataaagggatgaggatgacttcttctcctttggctttgcccgagtaaaacaatatttctaataaagtcatctaccgtcatcattgtttagtttcaaagacccgtccttgatcaatttctgacttaggctagagaacctctctcttgaatactgccttgatgctttcctccaatctgtgcctgccttcatcatcgcggcaaattcctcataacttattcttccatccttatctgtgtccacatcatggataattgcattgatgacttcttcactgtttgtttcaatctcatcagctannnnattatgtaactcctcaatttcaatatatcnactttgnnnctcatcaaaaaattgnannnntttgtgaaannnctcatcattnnctatctttctcnnnngaatggaaat

SEQ ID NO: 128616 - DNA, 217 bp, Glycine max
  Clone ID: PAT_MRT3847_87144C.1
actcggctcgagcacatttcttccccctccatctttttttcatatgtctctattcctatttatgaggaggagttacattaccttgtgtcaccaactactccgactcctttaccataccactaaactattgatccttgctcaccaaatttcattggtgaccgacgaggatatggacaaagctctgcgttcccttgagcccgcctcctttgtgaactta

SEQ ID NO: 128617 - DNA, 485 bp, Glycine max
  Clone ID: PAT_MRT3847_87145C.1
ttccaggaaggtttcccgtcatcactgtatgacgtcctccttctttggggggggggggggggagaaccaaacaagagtacgtggtaggaaggcgaaagtggatacggatacggaggtatagccacacaaaggggataaaacaacagtaataatacgcgacggtcaggaaaaatgaaaaaaaaccaaaccaaaaagagtacaggagccatgaggttagcaagggaagaaggtgcataaaaaagcatataggcctactaacggagaggtatacaacgtgaatattaaaacgaaaaaggggcatgccggtttggtgcggcgatataggttgtgaagtacaacaatgaccgagggtcgaggcggggtggtacaaaggcacacatgggcacgtatgttgccctagaagaggtggaagacacggggccaagtacggtttaagggctgggggtgattggctagggctaggttatgactacagggtaacgtgg

SEQ ID NO: 128618 - DNA, 570 bp, Glycine max
  Clone ID: PAT_MRT3847_87146C.1
aaaacaaaaaaggctaagcaaaaaaacattagactaaaaggaaaacaacaaacaagaagggcccggttaaaaaccaccggtgcttcccaaaattttttttttttaaaaattaccccacaaaattcccagggggagggggggaagccaacaaaaaaccccaaacaggccccgggaagactttgtttctaatccccacaacctttttggggcagttggggggcagggatgctacaaaaggggggctagctgccggccggaattaaaaaaaaagggggccggacctgtatcaaacaccacaagcattgcacagggtttggggacccaaaggcccctctctccatgggggggttttgggcaccccacaaggcaggcattttggggggggacccgacccgggggaagaggaccccgccatcccaacatcggataggggggacaaacccttttcccccgggttttttacttgggggggaagatccccaacaacatttgtcccaaaatctgagtcaaaggcggcggccctttgatcttttcccacggccgggaaattaacgagggggggaattgaaa

SEQ ID NO: 128619 - DNA, 437 bp, Glycine max
  Clone ID: PAT_MRT3847_87147C.1
ctggctcgcccgccggcacgggccgggccggactggccgggccgacccacgcgttcgcccacgcgtgcgctggaatatactccctactcattcccctatgtgactggcatgatccacatcatacaactcggaactcgggcgacatacctcagcgcagatatacggcgaggtcggcgggcttgtgtacagaataagaattgaagatccctgatgcaacagaacacggaatctgctgagatgctgtatctggagagagagagaaggcagcagatgatgctgtgcttgtttagaccggtgtgatatatgtatatacaaggtctgagagatcggatgttgcagaacctctatattcactcacacagacgcgcgcatttggggcatggatgagggcgatttccgattcatattggacacagacggcgtcagcctgaggatgc

SEQ ID NO: 128620 - DNA, 1321 bp, Glycine max
  Clone ID: PAT_MRT3847_87148C.1
tggccgcggctcgagatatatttttagccacaataaaaagggggaagttgtctgtgtatcccttccttccggtctgaaacaaaaggaaaggatgaagcaatcaaaggatccgttcgaagcagcgttcgaggaatcgccgccagaatccccaacggctacggagacagaggcagagacgcaaaaccctactcctcctcctcctcctcctcctcctccttcttctttttctggtgttgctgtagtagcactgaatccacaacaacctcagaatcagaaagtgaagaacaaagacaatgaggaagaggaggaggaggaggacaacatggacgtggagctcgccaagctcccttccaccggcgaccctcacaaaatggccaagatgcaggccattttgtcgcaattcaccgaagagcagatgagtcgatacgagtccttccggagggctggctttcagaaagccaacatgaaaaggttattggctagcatcactgggacccagaaaatttctgtgcccatgacgattgttgtatcgggcattgcaaaaatgtttgttggtgaagttgttgaaacagctagaatagttatgaaagagaggaaggaatctggaccaatccggccttgtcatctgagagaagcatatagacgactaaagcttgaaggaaaagtctttaagagatcatcctcgaggctcttccggtagatgaaccaaatatgaatattgtgtgcatcagcttcactagtttgctatagtggctttcgggtagattaaattttgtagtctgcaccttcttgttttcaacatcttgacgttcatttaactggagctagtgaatgtgaatcaatattagaagtaaattgggaaaatttccccatttctgcaaataagaaatgtgcaatggacacatgtttaggacccaacatcttttctcttactttgttagaaaacatagtgcatgtttggattgaagttaaaaatattatgggcacgttccaatgtaaatccaacagataaaaacaaaataaaagcaaaagccatggtcttgctcctttggcaaaattacttttgcctcaaaagtaatttttcacctgaaaaccaaacatgcacatagtcatcgtgaaaagttggttggttgattgggttaccattgggaatggatgctccccctatgtaggaggggagaagcataccatgagtatctcttgctccaaaagtaagttctgactcttcaaaacatatcactattctcttgtagcgcttaattttcttgttggttcctcaaatcaatatagtagaaaagaatctatccaaaaaaagcttaac

SEQ ID NO: 128621 - DNA, 134 bp, Glycine max
  Clone ID: PAT_MRT3847_87149C.1
gattgtgatgtgagagacccatgccattataatcagcaacaacgtttctgataatctgatctatggttttagtaatttatgtcatttttgtcttcgtattgcaacttgcaagttagtttaacttaattttgagg

SEQ ID NO: 128622 - DNA, 2802 bp, Glycine max
  unsure (1)..(2802): unsure at all n locations
  Clone ID: PAT_MRT3847_8714C.1
agggagctatagctaaagccttgcacaacctcctctttcctcttcaattaaaacgcatcctattcatccctcatagcatcgaatttgttcttgaagttcttggtattcttcctagcttcttctcatcttgagagagagaaagtgagagatggagagaatgttccctcccaagaagccctctactatgaattcccatgacagacccatgtgtgttcaaggagactcgggtcttgtcctcaccactgaccctaaacctcgcctccgttggactgttgagctccatgaacgctttgttgatgctgttactcagcttggagggcctgataaggccactcctaaaaccatcatgagggttatgggagtgaagggtctcaccctttaccacctcaagagccaccttcagaaattcaggcttggcaagcagccccacaaggatttcaatgatcactcgattaaggatggcatgagagcttcggctttagaactgcagcgaaacactggctcctcttctgccatgattggccgcaacatgaatgagatgcaaatagaggtgcagagaagattgcatgaacaacttgaggttcaaaaacaccttcagctaaggattgaggctcaaggaaaatacatgcaaagcatattggagaaggcttatcacacacttgctggtgaaaacatggcatctgcagcaactaacttaaagagtgctattgtacctcatcatcaaggaatccctgacatgggagtagtgatgaaggagtttggttcccctcttggtttttcttcattccaagaccttgagaacatttatggaggtaaccaaattgaccttcagcagaacatggagaagccatcccttgatcatggtttcatgccaatcaatgagagcttgtgtttggggaagaagaggtccaataacccttatagtgggagtggtaagaaccctttgatttggagtgatgatctaaggcttcaagatttgggagggccagcatcatcatgccttggccctcaagatgaccctttcaaaggtgaccagattcagattgcaccaccaggatcattggatagaggagctagcactgacattgatcccatgtcagagatctatgactcaaaacctgtgcttcagagtgaagagaaaaagtttgatgcatcatctatgaagcttgaaaggccttcaccaagaagagcacctcttcagcctgaaaggatgagccctatgatcagcactggtaccatggcacaaggtagaggctcaccatttgggtgagtcagaatatcatagtttttaattaattagatcatttggctatgttatgtgtaattgatgacttgatcatgtgaaactctcttaatagtagtaccatatctagggtttttgaatttggtcttggaaattagcagttcttacgagggttatttcccccctcgtcaagtactgttatgtggtataatgcctttacatggcaaattaaaccaaagtcttaattctgacaaatataattaaagcgtattattgtgcttgaatgtgagcattctcacttgtagcttttaaacatgagggtataagggctcctctaagtgctcggcaggattttatgaagccattttcttgtaatattcctcccctgcatgcctatccatcatttcctccagaacccaagggattatgatcaccaccaccgccgcctctacaaccacctatgccatcgccacaacactccacaccaagtccctttgcaagatacatttctttaccactaccaacctcttcctggtcaccaaaactcaccctacaaactccattcttcactctcacctcttcactgaatatcacatcctttccaccattcaccacactgaacccatcttcactctcactttccatttcttcatcttcctcttcttcactcaagccattgtgcttagcagtagagtaagaaggaattgtctccagcaccaagctcctgtgtctagctgaaaacctcttggaagggtctaaatactccaacctttcttcattgttgcaagaaaagtaggccaagtcttgcaagttcccatcagattggactcttctaaagcctttgttttgcctttcaagctcaccaattgagggagagattggagaagaaccacatgcaaaggaccgggtttggtggcaagtaagtttgtgataaggttgtgggacactggttggtggaaagtgtttaagtgcatgacaggtttctgagtgaatattgttgttaggactatctgggaaggatgagaggagggatccaagaactggtgttgaagagcttcttagcatcatgttttctgattcaagataacttctgtgtggctgtcccttgttttctgattataaatcaccttttttaatgctgaagagttcttgatgaccctataaatataatcctatgtaatttcagatgatcattggaagggagagaattttctagcagtcggcctgagaaaatagaacaaactgtaaattacttacttcaggaaaataaagctagaaaaagagaaaggcatatttggtttttgaaacagaaaacaaattgatatggctacaaggaaaagtaatgatgctgattgctgattgctgattgctgattgctgattgctgagtagaatcagtaaatttaacacaaaagaaatgtttggggttggtaaaggaagacagagaagaaaagaacaatacccttttgtgatgctgaagagttcttgatgaccntaccaatcctatgtaatttcagatgatcattggaagggagacttttgtagcagcccacgcgtccg

SEQ ID NO: 128623 - DNA, 183 bp, Glycine max
  Clone ID: PAT_MRT3847_87150C.1
gagtccagaaaacttgtaattgagagggttttcttaagttgtccaaaaaccttgtaatgagagttttatcaagtctgtacaaagaacttgtaaataggagggttttctcaagtttgtccagaaaacttgtaattttatttgagatgttcctcggacgtaggtaagaaatgccaaactatgtta

SEQ ID NO: 128624 - DNA, 241 bp, Glycine max
  Clone ID: PAT_MRT3847_87151C.1
atgccgttatgtccttcattcatggccgtcgtttctttcctgattgttcagatcgcacagaagaaatgccaagtctgcggaggctctggtcttgtaacgaagaacgactattacgttcgatgccaaaagtgtggtaagaagagccccacgatggcatacttgtggagaatcaaacgtgacaatggttgtcttccgcaggtggttttcttccgtggcagtcttggcgaagattcttcacggg

SEQ ID NO: 128625 - DNA, 252 bp, Glycine max
  unsure (1)..(252): unsure at all n locations
  Clone ID: PAT_MRT3847_87152C.1
agcaaacgctgccgaattcgttatcgctttgcactagcagctttnanngcatcctcnnnnnnnnnnnnnnnnnnnnnnnnnnnngctctcatcttcttctccctaaaccctcctcctgcaccatcacgtaggtcacttcnnntnaggggaagattgagatcaagaggattgagaacaccaccaatcgccaagtcaccttctgcaagcgcagaaacggcttgctcaagaaagcatatgaattatctgtgcttt

SEQ ID NO: 128626 - DNA, 427 bp, Glycine max
  Clone ID: PAT_MRT3847_87153C.1
attgaacccaaggctagggattaatgttcatctgcatgcaccttcacctatttgtgacacaccgaatttaccagacccaattcaaaattcacacaggacaccgtggcaatcatcaatagagacaaaaacagacaacagtagacaagaagaacccgaaatcggtttgacgtattctcacctcaagggaaataataataatgaaaccatggtggatgggcacaacaattctggagggttggattcttcccctttgtcacgttcctccgaggcaatgcttgaccttgaattcacccttggaaggcccaattggcaaaaagaccaccccgaatcatcaagagagttaactcttctcaagtgttagaatcaaattaagggtgttgttaattattattcttaaagatattagttaaggaaccaaaagaaaaaa

SEQ ID NO: 128627 - DNA, 1907 bp, Glycine max
  Clone ID: PAT_MRT3847_87154C.1
tacggctgcgagaagacgacagaaggggaccataaaatccatctcaaactcttggatcatatatttcaacctcctcagatttctttcttagtaaaccaattttcaaccacatgggtatccctcactttctcgttataccatatccagttctgggtcatgtgaatccccttatgcaattgtctgaggctctaaccaagcatggctgcaaaatcacatttctgaacacagagttcagccacaaaagagcaaacaacgctggtgctgaactagacaaccttaaggaatcaggaatcaagtttgtgacactcccagatggcttggaacctgaagatgatagaagtgaccatgagaaagtttttttgtctatccaaagcaacatgccttctttgcttccaaagctcatagaagatatcaatgctttggatgctgagaatagcataacttgcatagttgctactatgaatatgtgttgggccttggaagttggacacaaacttggaattgaaggagcttttctttggactgcatctgcaacttccttggctgcatgctattgcattccaaggctgattgatgatggaattatagactcagaaggagtagcaaccaagaaacaagaattccagctttccctaaatatgcctatgatggaccctgcagacctgtccgggggtggcctactcgagccgttcttccctcaaatagttaaagagatgaaaatcttggagttaggagaatggtggctttgcaacaccacttgtgatcttgagcctggagcacttgccatatctccaaggttcctcccaattggcccattgatggaaagtgacaccaacaaaaattcattctgggaagaggacataacttgcctagattggttggatcagcagccacctcaatctgttgtgtatgtttcttttggtagtttagcaatagttgaacctaaccaattcaaagaactagctctaggacttgatctccttaacatgccttttctttgggttgtacgttccgacaataataacaaggtaaatagtgcataccctgatgaattccatggaagtaaaggtaaaattgtcaattgggtgcctcagaggaagatattgaaccaccctgccatagcttgcttcattagtcactgtggttggaattcaactatagaaggtgtatgcagtggcatacctttcttgtgttggccatttttctctgaccaatttgttaataggtcgtatatttgtgacgtgtggaaggttggattgaaattagacaaggatggaaatggattaatactgaagggagagataaggaagaaggtggatcaattgcttgggaatgaagacatcaaagctagatcgttgaaactgaaggaattgactgtgaataactcagttaatggtgatcaatcttcaaagaatctagaaaagtttattaactgggcaaagtagtactacctcctgctatagtttggattggaagttgtctctctttaatttttctcaatttttatgtctgaaattcgtttactatagctaaacagcagattgcatctccctgttgggtccaaagatactcaaaagaatcttttccaatttcaaaagaatagaagttaagtccaatgacaaatttagtttctgctttgctttgcctattttatttccaagttggttggttgtagtcatatagcatagctaccagcttaaggggtggagatatgctgttgaattatgtggatttgttacttaaattgataactatttttttttggacagcaaaagataactaattaatattattagtgctcaaatattcattgtatataaataagaggaatatcatactcatttttggtgtttttaattataattaaaccttctgagttttaaaaaaaaaaaaaaaaaataaaacaa

SEQ ID NO: 128628 - DNA, 204 bp, Glycine max
  Clone ID: PAT_MRT3847_87155C.1
tcgcccactcgttcgatcaatcttagtgaactggtctaacttattctccctcatatagatgccgttatgtcttgtgcacactgtttcctgtactctatgataagtactgatgatttgattgatccacactcagataatagcagtcattgagaataaaaagctttatgtcgtgtttgtagctttggtctttagttatttcccatt

SEQ ID NO: 128629 - DNA, 421 bp, Glycine max
  Clone ID: PAT_MRT3847_87156C.1
ttctcattttcttttgtttgttaaaaaaaaaaaaaacaaaacaaacaaaaaaaaaaaaaaaaaaaaaaaaaaaaaaaaaaaaaaaaaaaaaaaaacaaaaaaaaaaaaaaaaaaaaacataaaaaaaaaaaaaaacattacccaacggtaatccccttaaaaaacatccccttatcgccagctggttcaaaagcgaaaattccctaaacgatcaccaaatccaacaaatgcgcaaccttaatagcaaatgggacgcgaaaaaaaacggcgcattaaaaactaaagctgttgtaaaaacacgcatttttaccgatacactttacaacaaaatagcgcccactaatttccctttccaaaaatttctttaaccccaaattcaaaaggtaacccccccaaactctaaaaataaaaccccctgtat

SEQ ID NO: 128630 - DNA, 288 bp, Glycine max
  Clone ID: PAT_MRT3847_87157C.1
aaatttctttcttgttttccaactatggatgttaaaattaatgttataacagcattgcacacgcttttgcaatgtcttcttttttctgccaggttgggactctctttctcaactcaacccctcaacgccaagaagctatcttcttataatcatcatcgcctttccttctcatctgttttcaaagttcaggcaaaagattaccctcttgttccttacacatagtctctcaacattttcctatcccccccaaactttatgacctcttcaatttattcttttagtttacct

SEQ ID NO: 128631 - DNA, 239 bp, Glycine max
  Clone ID: PAT_MRT3847_87158C.1
gatatagatcctgaagcaggatgtgatacgggcgtgcctttaagatgcacttaatgtactgtggcgtaagctcctaagctttatgatggaggttgaagagtgtgacacattgccaggaagtgtatcgcgagtcatgctgcagctccatcccaagataaagacattctggaggaaacttattactaaggtcctagatatgactctagagagtgctagaggaggctcccgaagagtccact

SEQ ID NO: 128632 - DNA, 324 bp, Glycine max
  Clone ID: PAT_MRT3847_87159C.1
gcttaaaggaaatcatatgcatttctcattaatactaatgaaactaaactgataatagcgatatgaaaaggtttgcatctctattgttgaaatgttattacattataaacttttcaatatgagctaataattattgctacatatttccaccttatgcagaatgagatgagcaccatgttggggtcctagagtcataacccatgttggagcaccattataggtggtagaaagttcaaacgagaaacgctgtatgaacattgacaaagcaacctttgctgtctaaacagctacgtcatgtccgatgcatttactaagaccccctcc

SEQ ID NO: 128633 - DNA, 620 bp, Glycine max
  Clone ID: PAT_MRT3847_8715C.1
cggtattcggctcgagctcgagccgctcgagccgctcttgctgaatcttcaggagttaaatttggagcccagtgggaagagatagttgtgaggctgaatgtacttaattacttcaacctctttttcctagtatcattcattttcacctgcatgtgcgttttatcacctgttcaaatatgagattcagcgtcacatactgatggtcattatcattaaatggagcacctgagataagggaggttcaatcagggtttatccattttcagcggttctgatcttgaatagtctctaactttgtcggatgtcaaggatttgatattgatatgttgtggctcaattatgttgcactgttgactcgatttgttgactccacctccataagttgcatatacttgtcctaattgtggtgctatataccctgttaaaataaaattatcctaaattgtattaagggtgtaacttatgtcgattacttatggcacaaatgatgagaacgagcccaatacatttcaaggaaaaccaagaaatattaagagggtgttttgctttcacttttttttttggaagtaaatgaccattgatttattaaacagaaactgaggctgaccaagtcctctttt

SEQ ID NO: 128634 - DNA, 384 bp, Glycine max
  Clone ID: PAT_MRT3847_87160C.1
ggagagagagaactagtctcgagttttttttttttttttttttttttttttgttttttttttctttgctgcattgtctttgctaacaaagccacagtcacacactatttcatattgaatattgaagaaggtacatcattcccatattgggaatttacagcaaaataaggaatggtattgtaaaaacaaacatgagtttaactgtaaaccagatatggcaaaagcatatgccatagtattgcttccctcaaaatatggactaaggtgcactgctggagcttcattctagtgtctgaaattacagcaacaagttcggtaaaatgactatcatttgaaacattcatctatcagcttcacagcatgaggacaatttttactatcagat

SEQ ID NO: 128635 - DNA, 259 bp, Glycine max
  unsure (1)..(259): unsure at all n locations
  Clone ID: PAT_MRT3847_87161C.1
tttattgatagttctatattctntaatacatgattgaaaattgtacacattcatggcttttcaaggtccgataatggaccccggatgcacgacatacacatagatcaggaacatataaaaagacatgaccagattattgactttcacatacttcgggtcacaccaaacaggggacctgccgaccattttcaaactaaaaacccacccagagaacccaagacaaggagaagaggagcttctctatgaatgtaggagtcag

SEQ ID NO: 128636 - DNA, 1075 bp, Glycine max
  unsure (1)..(1075): unsure at all n locations
  Clone ID: PAT_MRT3847_87162C.1
cacgaacatggtgatggcctccaagtctaattccctaacatttggagctgcttgtttcacaacttgcccattctctagaactaaaacctgctgcattcactttcttgccattccaaatgcaaaatccagagccactttttctctcggtcccactctgtccaagaggatgagcttaggtattctttctagtcccatcgagacaactcccacacatctcattacaccaatttcagctcttaattcaggtttggaagcatcaattacagattcgaacgatatttcagccatcttagcaaatgccaaaatagtagtagattctgaagatgaaaataagatacaactaagagtggacttgactggcgatcaaacacagaaggtattcgacaggatcctaacaaacttaggccgtactgccccaccagttcctggatttcgcatgcaaaaaggaggaaaatcatcaaagatcccaaaggacttccttgtacagatgcttggggaagaacgtgtcaccaagttttcaatacaagaaatactcaattctaccatggctgattatgtgaaaaaggaaaacttggatgtaaaggaccggaagataagcactacccaaacgcaagaacaactcaaaaaatcattcaagccaggaaatgaatttggctttaatgttataattgagcctgaaaattcataagattctagataacttgttatgggggatctagttgttgagcgtaaccagattggcagttattggggcaacaagatttttctctctcaatgatatacagcttaaagagttattttaatggtcagttaggtgtactcctgaaaatgggctgcaatattctattatgagctttgcaggaaaaaatgtttaaaaaactcatcttcaaatttttttcattctgattttaaagggataccaaactgactcagagttatatataactgtcttctagcgtgatatattacaaattctgaatctcttttatagccttttaaaaaaaaaaaaaaaaaaaaaaaaaaaaaaaaaaaaaaaaaaaaaaaaaaaaaaaaaaaaaaaaaaaaaaaaaanaaa

SEQ ID NO: 128637 - DNA, 289 bp, Glycine max
  unsure (1)..(289): unsure at all n locations
  Clone ID: PAT_MRT3847_87163C.1
cntgaagaaggaganatggggngaaattaaaanggnngnaggcatatnaccggtnncaatcgcgtttccgaattcagaatcactacgtttctcgnttctcctttcgttcgangcatgaatgcaggggcttnaccgcttcagacttcagtancagagtgacagancattagnaactcaaaaaagtangcgncacgatgtnagnaaccatggancgtgaaaacnacnacagcgccaaaagcgtgtcaacggtcngcgacgcgtgggctnctntacgacgnnnngagtgcaa

SEQ ID NO: 128638 - DNA, 1224 bp, Glycine max
  Clone ID: PAT_MRT3847_87164C.1
caattgtcgtttttgcttttgaaagggtctcacttctcttgtgtctgtcacactctctctttttctttttctaattttttgtgattgtccaatctcctgtgatttaagattgatgaaagtgacgcacaacatctgacggggcccatagaattgttaatttctctgatcccattgtgaatttgtggggatctgaattgcggaggaagatgattcagcttctgttcacggtgatattttcggaggcttcgatgatagcgttgctgctgttcaagacccctttgaggaagctcgtgataatgggcttggatcggttgaagcgaggtcgtggacccttgatggtgaagaccgttgcagggaccgttctcgtggtgttgttgtcgagtgtgtatagcatgttgaagattcagaagcgtgggatccaagagggtgctgttgttaaccccaccgatcaggttcttatggccaagcacctcctcgaagcaacgctcatggttgctgtccttttccttgcacttatgatagacagactacatcattacataagagaactgcggattcgaagaaaaggcatggaagctgtgaagaaacaaaccagagggactgaagatgggaaagttgcaaattcagaagaaattaagtctgtggaggaagaaagagccagattgagagctgaacttagccgccttgaatctgaactacagtcaaaaacaaaagacgtagatggtgctgaagccaatatagctgctctgagaaaacaatctgaggggttccttcttgagtatgatcgcttacttgaggaaaaccagaacctccgcaaccaactacaatccttggacaggaaattgtcacattcaggttccaagaagaatatgtaagaaaattgcaggtaagaatggcttcttttgtatactcttaaggaattccatggcagtttgttgataacagcttgtcaatccctgtaagcttgctcctaaaggaatacgattttcacttttgagttgaatttggttcaattttgttctgacaaattgtgaatttttttttagtgataacagaaaatatagtgctgatttgtttttttctgcacataatgtaacttctgcaacttctgttccactatttaagattcgacaactgaagggatgtgcccacgattattgtttgatgttatttaagttatctcttggtacttaattttatttttcttatcatttatcctattta

SEQ ID NO: 128639 - DNA, 365 bp, Glycine max
  unsure (1)..(365): unsure at all n locations
  Clone ID: PAT_MRT3847_87165C.1
gccagtcaatttcaaatgttggagagctatttagctgggtttttgagcacctggcgtttctttaagcacccaaattactagatgacattcttcggggatactcacaggatgaggctattntggggcttttaactatcttaaagagaaaaaagggttgggtgggggcactgggaatgaacgttttgaactatcacaacatttcttggggaggggtgccaagggaccatttccatttaatactgggaaggaaggtgttaaattttctgcatgggtggagggaagggggaaagacctcacagaaggggggcgctaatcttgcgtgagagctacaatgtgggggcatctttaatttgcttggtttaggc

SEQ ID NO: 128640 - DNA, 338 bp, Glycine max
  Clone ID: PAT_MRT3847_87166C.1
acctggttcagtgcattcagaacaagcccctgtattttgctgatcggctgtatgactccatgaaggccaaggggacgcgagataaggacctgatcagaatcattgtctaccgcagtgaagtggacatgttgaaaattaggtctgaattcatgagaaagtacggcaagtccctgtactattatatccagcaagacacttcgggcgactaccagaaagcgctgctgtacctgtgtggtggagatgactgaagcccgacacggcctgagcgtccagaaatggtgctcaccatgcttccagctaacaggtctagaaaaccacttgcgaataaagtcccgtgg

SEQ ID NO: 128641 - DNA, 237 bp, Glycine max
  Clone ID: PAT_MRT3847_87167C.1
aaggccgcccaaacttaacttattaatgccatttggttggggtaccttaatttttaggtaccttattcctggggcaaaatttggccgaccaaaaaatgggcttatgggaaaccttttgttcttccaaacccttttagggggaaaaattcatggtccaaccaaaaaattggaacccttctttggtgttccaccggggaacaaaaaccaggggagggggaaggaaccaaattccattga

SEQ ID NO: 128642 - DNA, 704 bp, Glycine max
  unsure (1)..(704): unsure at all n locations
  Clone ID: PAT_MRT3847_87168C.1
cccgggctcgacccacgcgtccgtacggctgctagaagacgacagaaggggatgcatcccaacggctagcccattcaatttgaatcggggagacagaaagaatagggcaaattttcgattttgattttccaaccaaaaaatccagggtttaccctcacaccccactccctccaaagcgtttgcaattcatcgttctcttaaaaaagttttcaattgaaacactgattttgaattcgaggtttgagttagttctcagaaagaattgcagcaatggatctccctcgagacgttgacgactacatcaaacaaaccctcgacgatacattaggtattcccgtatcgtcgaaaaccctagaatccaaacttcgagcttcccaagactcgcaattccccttccctcaaatccaaacttcgagcttcccaagactcgcaatggcgcctccgcgaacgcctcctttcccttctcccccaattgaaacagaaagaccaactcatcgatcgcctcatgtctgaagcgggaatgaacgcgcgagctctgaagagttcgttgaggagaatanagactggcgacggagtgtgagagattgttggctcgctgccatcagttggagaatgagtgcgcccctgtatgataaggacagagaagcgttgatgggagttggggaacgatgccgatgaacgggcacgcgaggctcaaacccgag

SEQ ID NO: 128643 - DNA, 506 bp, Glycine max
  Clone ID: PAT_MRT3847_87169C.1
gcgtacgcacgctcgcaattgcgctcgagtatggtgcaggtgacggctatccttctcatcatggaataactaaggatgctcatgctgcattggatcatcacttccaaaggtccgatattgacacatctacgatacatgcgtttgtgcgacctcttgggggcgcgcacaggagctgttctaacagatgatatccccgacaaggttgctgcactgatacttgaaaatacatacacttacatatagggtatcgctcgcgtgttcttaccttcattgacttggtcgattggacgaagcgctacaaccggtcctaaagaactcattctgtgttgtaccttctacacggacatctattgaatctggatggcatagtctacaacctattcttaatgtatgcggagcgcaagaccagatggcccccccatgacatatgccaatgctatattgctaaggagctgctcgcaaactcagagtctatcatggggaatgccacaggatgcatatggata

SEQ ID NO: 128644 - DNA, 1623 bp, Glycine max
  Clone ID: PAT_MRT3847_8716C.1
aattcggctcgagcgacccatacaagtcaaaccgtgcccacagacacgggaagttgtctccttctctttctccccgggcccacacacacatgacttcatctcttcctcgcgtccgctagcggaaacctctacaaacattgcctccaaggtgcgcgctacgtatactattgtttccccaactttgtttcctcgatgaattttaacaacgtgaatgctccaaaggttcctggtggcggagtcgctgctttgcttaaagttggcattattggtgggcttgttgtatatggggctgcaaacagcttgtacaatgttgagggagcgtccgggtcatcgagccattgtcttcaatcgtgttgtcggtgtcaaagataaggtttatcctgaagggacacatattatgattcctttgttcgagaggcctgtgatctacgacgtacgtgcacgacctcatttagtagagagtacatcagggagccgtgatctccaaatggtgaaaattggacttagagtccttacccgccctgttcctgaccagttaccaacagtttatcgaaccctgggtgagaattataatgaaagggtcctgccttctattatacacgaaactctcaaagctgtagttgcacagtataatgccagtcagctcattactcagagagagaatgttagtcgagaaataaggaagatattgactcagagggcctcccagtttaacattgctttggatgatgtgtcaatcacaagtttgacgtttgggaaggaatttacagctgctattgaagccaagcaagttgctgctcaagaagctgagagggctaaatttgttgtagaaaaagctgaacaagacaaaagaagtgctgttattagagctcagggtgaagccaagagtgcccagttgattggtgaagctattgccaataatcctgcgtttatcaccttaaggaaaattgaagcggcaagggaaatcgctcacacaatttcaaattctgccaacaaggtttacttgaattcagatgatctcttgctgaatcttcaggagttaaatttggagcccagtgggaagagatagttgtgaggctgaatttacttaattacttaaacctctttttcccagtatcattcattttcacctgcatgtgcgttttatcaactgttcaaatatgagattcagcgtcacacaaactgatagtcattatcattaaatggagcacgtgagataagggaggttcaatccgggtttatccattttcagtggttctgaattctgatcttgaataatgaatagtggctaactttgtcggatgtcaaggattggatttgatattgatttgttgaggctcaattatgttccactgttgacttgatttgttgactccacctccataagttgcatacttgtcctaattgtggtgctatataccctgttaaaataaaattatcctaaattgtattaagggtgtaacttatgtcgattacttatggcacaaatgatgagaacgagcccaatacatttcaaggaaaaccaagaaatattaagagggtgttttgctttcacttttttttttggaagtaaatgaccattgatttattaaacagaaactgaggctgaccaagtcctctttt

SEQ ID NO: 128645 - DNA, 1111 bp, Glycine max
  Clone ID: PAT_MRT3847_87170C.1
actatcccttcccgaaagagaaaaaaagagtcactttcccttctttttttttttctttttttccccagtttccaccttctccattttccaacaccgttctatcatggcacaccactcctcacaacgtcggaatctagcagctccagaatctaaccctacaaccccaaactcaaacccagatctcattcaaacatataaaccctctttcttggtaaaacacttgacaaaccttaacctgagtcaaacacacaaaacccgtccaccccacaaacactctcctcttattgacacccatttgcaggcaaaagccatggcaacctctgccatacaagagaaagagagtaccgtgcctgtgaagagaacccacaaagagaagccccaaaggcactgtttggaattggaaaggaggaaacttggtgatcctaatgacaagggtatggtggaggatgctaaggttgtaaaaggaaaacctaggaatcctcatttggagaaacatgatgttgttgttgctgctgctgagagaatgtccgtgtctttggctccgggtgggggtgggggtagaaggagatccttctgtgggacacaggctgatttaagagatgtctttgcaatcaatggtgcgaaaatggtttcggttgatatgccaccctttatgcagatccatgctgtggattgtgctagaaaggccatagatagcatggagaagttcacatccaagacccttgcactctccctcaagaaggaatttgatggggtgtatgggccggcatggcactgtattgtggggactagttttgggtcttttgtgacccattctgttggaggatttctatatttctccatggataaaaaattatacatcctcttatttaagaccgctgtacataaagcagcttgaagcagggtgaattctttattgctcagaacataagatttttgggatacatttttatcttagaaaaaaaaaaaaaaaagggcttagagtggcagcattcctctgcacattacctctgctttaaaaagggatcacccactttgtttcggtttaattctactacctaagtgggtctgaagatgctaatgcggtgtaacaaatggagttaattgaaga

SEQ ID NO: 128646 - DNA, 380 bp, Glycine max
  Clone ID: PAT_MRT3847_87171C.1
caggtattcagtgctgttttcagaaaatggaaggtatctcctgcaaaggcagaagaactttatgaggtcgatggtccacaatctgctataaaaggcagtagaaagattcggcacactgatgattttgagtaagcattgagattgctaattttctttttatacttggttgtattgaattagtacacctagttgataattgaaaatttgaaactttatatctgtgatttgtttattatattgggcagattcatggacaaggcagcaacaattaaagagactgaagagcatagtccaaagaatccatggaggctctgcactgtgactcaagtggaggaagccaaatgtgtgttaagaatgttaccagtttggctatgcaccat

SEQ ID NO: 128647 - DNA, 631 bp, Glycine max
  unsure (1)..(631): unsure at all n locations
  Clone ID: PAT_MRT3847_87172C.1
tgggcaaatcgcaggttcgtgcgtgaatctaatcaaagtttctcattaacttctgcgttagattcacgcacaaacttgtcatttcccttttcttaaccttttttttttccttttccgtcaaaactttgtttgttacattcgacttcgaattcagattcagatttctctgtttagtgctcctcaaaccgatgacgccgcggcttgttagcttctggctccgctacggaatatccttcggtcaacaacactgctagaaatggctaggcgagagtcatgggagtttgggtgttaaaaacatctctacttttaatgatgcgttgttagctaaatgaatgtgggccttgtttaaccaaagtcaatctctttgggtggatgttctagagtctagtgtgagggtaaagggatcttttgtgtgaggaaaataaacctaagaagtcttttaagtgaaagaatcagttaggtagtggtttttcacgtgtgtgaaggctttacagtctgaaattttggtatggctggctaaatttcatcacagttctaccacaatgccatatcatgcatttttgtcaacactcacgttatttagatgcatcanagggagaggggactgtgatggtggttngggctgccattg

SEQ ID NO: 128648 - DNA, 535 bp, Glycine max
  unsure (1)..(535): unsure at all n locations
  Clone ID: PAT_MRT3847_87173C.1
tgagggcagtgctcttgttggtagtatgtgctcttgctatagaggctgtttacggtgcgtgtagtttatcgagcccatgtgccagcaacctctgctgctctcaatatggatattgcggtagtaccaatgactattgtggcactggttgtgtatttggaccttgtgctggcaaagtctctccaacatcagctccgagcaacgcgtggccattcggtcctctgaaggctttatacgttgatgccaacatgaactggaacgaccccccctccactttcaaggccattgctgatgctgggtacaatttggttgtaatatctttccttgttcctgcagctgctgacggggctcaattatggggaagtatgagcgctgccactcaaaatgcgactgttaattacattcactcccgtaacgccaaaatcatcgtctctgcaggaggagcgacttataaaggatacacactcaacactggtgcacaatttggtactactgttgccacctgngcaaggaacaacaaacttgatggtgttttctt

SEQ ID NO: 128649 - DNA, 468 bp, Glycine max
  Clone ID: PAT_MRT3847_87174C.1
tatagaaatcaaactctttcttcaaatgatatgaaaagtgaatacaaaaattgtatctaaaaatattgaacttcacaacttaagatgctcttacaaaacatttaccccacaatacttggtcaaagtggaagaggtgctttcgtgcatggtatgtgtggatacagtagaggaatgcagctaatgtgactgctagaaaagatattgtagtcaacttccagaagtcccgtggatcagatattatgattcccataacataggccaataaatccatcaaagactgaagcgaattttgaacacctccaacaatcaaacgatcggattcagaaacaagatcctgcatttgttgaagtacagataagtcaaacatccacaatccaagccgcgatatggctacacttccctcaaaatatatgatgatagaaagccattttggatccatattgcagccacacatggaaggaggaaact

SEQ ID NO: 128650 - DNA, 591 bp, Glycine max
  unsure (1)..(591): unsure at all n locations
  Clone ID: PAT_MRT3847_87175C.1
gccagagtaccgtacactggtgtgggctggggtgtggttgtacggcgcgcgagctataacatatgataatttggcgcttgctaagtagaatggggccgcaggtgctgcgccagcgacccaataagcatgagtggtttatttggggtaacctgcaggatttgttggagcccacccatgggcggaattattaattgatgcccaccggggctaagcctaaaggactgatgcagggtatgctgcatataggcccgggtaacattgagctgttactagagtggactttatagctagtacccaaaaattgttggaggccactaaatgggctggtactgctagtgccggagcagcaaaagctgctgatgggcaagtatctcaggttcggcgtttaatacggcacggagggtaaccaagattaacctaactgccttaaccgactgcctacgaaaaaactacttgtaagtagtaaccagctcggcgagcgctgtacgctgccaactacgcatgngcgctaaaaggaggagcgtaagttggccagtaataaacgtgatatgttgcagtacgaggtcgttgatggcaagccggtaggtgtaa

SEQ ID NO: 128651 - DNA, 440 bp, Glycine max
  Clone ID: PAT_MRT3847_87176C.1
ggccaaaccccgaatgaaagggggggggtttttttatataaaaagcccccaacccttggggggggggattcttttcccttttaaagggaaaaaaaccttcggggtttcaaaaaggcccccgggctcccttttttaccgtttttttcccccccccttaacaaatttacaaaaaaaatcctccaaaaagggtatttaaactgttttggaaaagcccacttggaaatttccataaacaaagacggggggatttccccttatgaaaacctcgccaaaaatccccaagggcccctttggggggggaaccttaaaggcctttaccccccttggggggacttttggaaggcctttcccagtttttaaaaaataccgctttgggggggggacaaaaggtttttttccaattgggaacctaatgtttggctttttgaaaaaacttttac

SEQ ID NO: 128652 - DNA, 430 bp, Glycine max
  unsure (1)..(430): unsure at all n locations
  Clone ID: PAT_MRT3847_87177C.1
tggccacactatgcaaaacaacagtttcaatgataaatccaggtccaaaaccgaacaacacaccccattcaagtccttcacctataattttatatccattttcancaaatttcctcctcatctcatccaaaataaaaagaacacaagcacttaacatattcccatattcactaagcacatctctagtaaccttcatcttctcaagtttaaaacccaacttttactcaacttagtctaaaatcncgaacccaccagaatatgcaatccaaaagatgaagttgtaatcagaaatgttcaatagattgaaatcctcaaaaagtgccttatcgagtttctttgatacaatccgagtaacatgcgttgagaattgaaatatgagtgcaacttcacgaaagtatccatcaatagcacctggactagctaaagcgat

SEQ ID NO: 128653 - DNA, 260 bp, Glycine max
  Clone ID: PAT_MRT3847_87178C.1
gctcggaattctgcttcatttgtctagtgctggattcatcggaatgcgtgactcaaatacctcatggtattcatggtgccattacgggcgagctccagataaatgctttgatagtagtgtctgcttctggagccgtccatgctactggcttggtgtgcctcgacatcgaacacgcttcagatccccttggggctgatgcatcagctgacgctcatagtatcaatattctatcaggtcattcagatgcctgtcctccaacg

SEQ ID NO: 128654 - DNA, 462 bp, Glycine max
  Clone ID: PAT_MRT3847_87179C.1
tttttctaaaattctctgcgttttcttcggcggacaacccttctctgattcgggcttaatttttgtttctcttcttacaaaaccttaggtcttgctctgtcactcactgtgatccttttcctcaatttgttccatttaacgttgttgtcaattttgcataattaggttgttttttgtgctcatgaggttccagttttaagatctatatcttaaagtgtctctcttttttaaaaacataagaacatataatatacatatgccgagttttgctttactgctagctagggttttctttttgtgaattgatttgctggtttggtggggggttatgttttgatggaaagtttggaactttactgtgtagttggctgcaaaagctatttaagttaatgggtttgaaagtcgagtgatggattctgtgcttgagatagatttagatttttatgaggataatctgaattg

SEQ ID NO: 128655 - DNA, 418 bp, Glycine max
  Clone ID: PAT_MRT3847_8717C.1
aaggttgcaaacacaatactaactgttatttttctatatccaccagtatgcccatgaatccttgaactggctgtgcagtgaactcagtgacattctggagaaagatgccctggctggagaatgtgatctagagactataccaccttgtgcaatggctgcaaatctgcctaagagtaggctccataatggtgctgaaccagtgcgtgtctctacgtgggtgcacaaatatattcacggaattctcaccatctacaccacatgctagctatgagaatctgtgacaggcagggatgagactattgctgactgcagcattgataatgcacactagagctgaatgacaagcagctagatggactctaccttatccgagacattggatgctgctgaccaatttttacgtgacgagtgctgcagc

SEQ ID NO: 128656 - DNA, 381 bp, Glycine max
  Clone ID: PAT_MRT3847_87180C.1
caaaaaaaaaaccaaaaaatccaacatccccggaaaaaaaaaaaaacccaaaaattccaaatttaaaccccccccataaattaaattattttacatcaatccaaaaaattcgcaaacttaaaacaaaatacgggtttttggaaatgggcccataactggaaagaaatgtacacaccccccagaaccacttggccagttacctgaaaccttattttccacgcttgggaaaaaattaaacagattttagactaaacccgggggggaaccccaaaaacttccattggctaaaatcagcctaaaatttgtacaaaaatttccaaaaaaatccattgttttaattctgaaaaaacccctcgccttaagcaggaaaataagacctac

SEQ ID NO: 128657 - DNA, 452 bp, Glycine max
  Clone ID: PAT_MRT3847_87181C.1
cccacgcgtccgctttttgtacacacttttacctcgcacagacgattctttatgtctttatgtctgtttccccaatttgagagagctaccgccgaatcgattggatgggccttaagatgatctgaaatacccaattgacatggatagcgcgatgatgaagaaccctaacttcgaagacaccaactagccaatatgacgcaccgacgacatgcgcagagctgctcgctgctcgacaaccagattctgatgctccacgaggagtggcagaggaccattttgcaatgtggatcggcctggacaagagcagggcgaatcaggagaagactaagctcactaagcaggtgccctaactcgttggcagccatgggggggatatcggaaaggaacccgggggactaagctgaaggaacatggggcccaaatttgatcctgactcaccacaggaaggggaa

SEQ ID NO: 128658 - DNA, 149 bp, Glycine max
  Clone ID: PAT_MRT3847_87182C.1
catagtgtatcctcacttctatacactgcttggaaaacataaactgagcaagccgacaggggaagtcctaaacggcgattttctagaagaccagaaggctgagggctctagcgagatcggaagagacactgataggactaaagatcatg

SEQ ID NO: 128659 - DNA, 420 bp, Glycine max
  unsure (1)..(420): unsure at all n locations
  Clone ID: PAT_MRT3847_87183C.1
ttttaaaacacaccccatctaattttttatgacatttttaaaaacacataaacccacccaacnnncaacacnttaatctacccacaaatttcttacctttacctttatacttaccaacttttttctataataaatattattaaaacttttcataaatattttcaataatattttcttttttaaatttttatcctcttacaaatccacacaaaatactatctttaaacattaatatttaaaacctcttcttcctaataatatatctaactcacattaatttccttatactcaattcccccttttcaataataaaaacatttctttccatttacttttaataaataaatactaccacccctctaaaaaaaactattttctttattttctccccaaaatattaattttttttttttttactca

SEQ ID NO: 128660 - DNA, 426 bp, Glycine max
  Clone ID: PAT_MRT3847_87184C.1
gctccacgcgttcgcccacgcgttcggtctgagaggttgacatgcgttaagagaatgctgattatagttgatcacatgaggagcgcttactttcgtggagaaactggggacatggaaggagggcaccttgaaagtgaccgtgcgagagtaacacaagagggtactgagaaggatacgggtgatggaggagagcatttttctgactcactggctacagtgaaggggaaaagatcaaaattcttagcccctatttttactactgacccttactgcgtgacacatgcacgcacacactacgagtgaccatccttttgcttttcttttttcacacctaactaaagacgttcttatttacatgaagctagatgacagcgctctactcttgctggtaacagctttctggccggacgcgtgggcggacgcgtg

SEQ ID NO: 128661 - DNA, 933 bp, Glycine max
  Clone ID: PAT_MRT3847_87185C.1
tcacaaatgaggctgtctacgagaagataccttctggtgaactcctccgccttatggccgtactgaagaagtcgtaccacttcgctaagcgcttcaatgcgaatcgcgatctgcgatcacgtttgtttagggaaggtttcatgaagcaaccgccaaacctgctcaagcaggagagcggatcggcgtcggtgtacgttagcattctatttagaatgtaccacgacacatccaacgaccgcgccgcctcacgcgccgataccgaagccgccctgatcccgctctgcgaggacatcattgcctcctatgtcgatcttgacgaggaaacacaacaacgcaacatcgtcacttggcgccccgttgtcgtcaccgtgctggacggatacactggattgcccgacactgatttcgaaaagaacatcgacctctttgcgccgctcgtcgttgggcttctaggtacggaaatggcacccgatgtacaaagaagcgtgcaagcgcttgtcggacgcatctttgagaggaagctgggtatggagaagcagcccctcatgccggcaattagccggagtccacgaggcagctttgtgggcagccctagccagaggagggccagcaaaagtggacggtagagtgactcttcactgtgctcctgtagtttcttcctaaggttcgataactcgacacctgttgattcatattttgttcttttgggtctgactctgcaagccatggttacttgttggctcagcacctctctattctctttctggctctaaagcattgccgccgaggttaagctttcttcaaagggcgttggtaggcgcgaattttggttgtgttgtacagtagcacgatatcaaaaaccgcatcatcttctcaaatttcttccgtagttttacattagagcaagagaatcaaagtaaacagcatatttta

SEQ ID NO: 128662 - DNA, 436 bp, Glycine max
  unsure (1)..(436): unsure at all n locations
  Clone ID: PAT_MRT3847_87186C.1
ctgagcaggtcgaggagctggagtcgattgtgcagcaacacccggtcgtggctgagcaggtcgaggacctggagtcnattgtgcagcaacgaccgggtgtgaggggggttcgtcaacaggcacctgcaaaaccanctgctgcancagaaccacaagttgaggaacctccatctcctacctctagcacatcttcaagtcagctccagagggaggtagaagaggaattgggttcttctccacaagttcctaaagcacccacatctgtaacaggtttaagtaaccagaaaactcctgtagcaggtgtaagtactcagaagtctgctggagcaagtttaagtactcagaagtctactggagcaagtttgagtactcagaagtctaatgttgcacctgaaacaaccaaccaatctgcaccagcagaggcagagccaaaaca

SEQ ID NO: 128663 - DNA, 367 bp, Glycine max
  Clone ID: PAT_MRT3847_87187C.1
caagtatatcaatacatgttgtaacaaggcgcctttcattccttcctgactggttattaattaaactagttatcaaattttgaggaacataagcgaatctggttgatgctgctggaatgagacttagaatccgcccaatggcttgagaagttaaattggagatggtgcttggatgaccaatgttaagaacgtattttgacatgccaagtcgcagtgcacttgaagtcataggtgtttgagagaacatgcatgatgagctaacccatcagctgcatatttcctttccttgtagacatgatggatgttatatgtttgattgacaagacatgtatattaattttgatctattaatttgtatttcactcaa

SEQ ID NO: 128664 - DNA, 185 bp, Glycine max
  Clone ID: PAT_MRT3847_87188C.1
accacgcgtccgtagaaactttattttacatgttttgtttaggctgtgtaagcatggcggcgggcttgaacccgtggagctgaatgtccccattttaacagaaaatccgaacggtcgagtttgggtttttcccaccgagatcgaagttcgatcacgagtcactcttaaattcacacatatatatt

SEQ ID NO: 128665 - DNA, 278 bp, Glycine max
  Clone ID: PAT_MRT3847_87189C.1
atctaactcaaattattataaatctttttatattgtctttgattcatacagataataaaaaaaaggttgttgatggtttgatgtaatggggtttataaagctgttttctgttgcctctttcccggttatcaaggtcttattgattactgcacttggcttgtttcttgcactggataacatatcaatattgggagaagatgcaaggaagaaagtgaatcagcttgtgttttatgtgtttaatccatcgctggtgggtagcaatctggccaaaaccatta

SEQ ID NO: 128666 - DNA, 135 bp, Glycine max
  Clone ID: PAT_MRT3847_8718C.1
ctcgagccgaagcggctcgagaaggaacaaagcttctagttcattggcgtgcgcaccgtttcgccctcggccgtttgggcggtcgcatgccgactgttcggtaaccccccaacaaaactcaaagccttttttgtt

SEQ ID NO: 128667 - DNA, 474 bp, Glycine max
  Clone ID: PAT_MRT3847_87190C.1
ggctcgagctaacatggatgtcctggttgcactatgaacatacagcctccttatgactaattactgaatggtgactattctgtgtggagcccttacaggattctggtctccaacatactttgaaacaagctctaatgcttagtaacattggtatttgacgggcaaattcttttgaagttcattgccatgggaaagacctatgatgccataaacaagctagtggaactaacttgtgccacagctatattgcttgccacagataaaggccgttgaattgttaaagaaagggaaatggattccttgctcattcataatgatgacacattaaatgtacttcgtggtacaaacattcctggtgatggcattgatactaggggctcatgttatgagaatgatagcttggtgactggcgaatctatactcgaatcaaatgacgctaatgcatctggtattggaggtacgatcaattagcat

SEQ ID NO: 128668 - DNA, 350 bp, Glycine max
  unsure (1)..(350): unsure at all n locations
  Clone ID: PAT_MRT3847_87191C.1
aaattaaataaaagggaacgtgtagaaatagcgtttccaagaattggcgcaaanataaggaccgagagagattgatgttgtattttgcccttcttgccccncaaaattctgatatctctctttcaatacctttctctttcaagggattttttctccacgattaaattgcgatttctcccgggtcgtttttcccgaagatggaggcggtttccggaatataaaaataggggtggagatctttctttacattggatctttgggtacaataaggggggttctttataactcgattcaatttcaaatataattgcccccctttttgggggactcatttctattatgttagtggg

SEQ ID NO: 128669 - DNA, 293 bp, Glycine max
  Clone ID: PAT_MRT3847_87192C.1
aaaggtttggcgcattgctttctgtacatttaaatttaggttggttgggttgctgagtaaaaactaaaatgaaagtagatacaaattgctttttttttctttaaaacaaaaaaatccgcaaccatatattaaatgaacattagcatcataatgaatgaaaaaagctaatgagataaaaaaattatcaggattataaagaactaataaaaaaaatgggggtgcagcttccatttgtgcctgttaccttaaaaattaaatcttaacggcttcttaacaaagttccatttttattt

SEQ ID NO: 128670 - DNA, 428 bp, Glycine max
  Clone ID: PAT_MRT3847_87193C.1
gcggcctccacattggggaagggaataaagagaattatgcagattggaataacaataatctcaatatcatgaataataataacagcaacaataaggagctgcaggagatttcggaggagagtccaacgagcgtgattgagaataacaacgtggtggaagtggagaggttctcgctccctaagagcatttctgtgaggtccaatggctacttgaagacggctcagtccgctgctctcgcccccaataacatcaatgccactcgcaacaaatgcgccactcgcccacgcgccttcgccactccacctgaacccgttcaaaaggtatatgtgcgtggagggcagatagaggaagagcctcttgaaatgatagtgtataaccaagggatgttcaagactgagctgtgtaataagtggcaggaaactggaaca

SEQ ID NO: 128671 - DNA, 262 bp, Glycine max
  Clone ID: PAT_MRT3847_87194C.1
gaacttgtcagccttatccttttatagcaaatctggatcaaaatgaatggccatcatcaaatgtcgcaaacatggccaatcatgcttaccattcctcacactttagtaagcaactttctctaagtctcgcaacatcgacaaccgcgggaatgtgctcggaggtgagttgctctaatgtgaccccatgcatgaatggaaccatgtcagggttggagcaagcctcttgcagtagtagtagggaactttctatgaatttgggtgg

SEQ ID NO: 128672 - DNA, 313 bp, Glycine max
  Clone ID: PAT_MRT3847_87195C.1
tcgcccacgcgttttggcttttgccgcaaaacccaaggcgcgagcccgggcggagcggtcataggggcagatcttggtggcaatagcaaatattcaaaagagaaacattagccagaggatgagaactcctcaaacgcacacacaaaggtgatcttcattggaaggaagaatctgatgttgtaaacaggatgaataaggacatattgaaaatgaatagcaggcacggtgctgggaccatcacaaaaaagaaaaagaatgtggtgcttgaagagaacaaagatgaacctgattggactggaagccacttgattga

SEQ ID NO: 128673 - DNA, 940 bp, Glycine max
  Clone ID: PAT_MRT3847_87196C.1
cggctcgaggtttaatccaattcccgggatggacccttttgcccgatcccggttagacatctcaccgcagtcacaacgtcctggaatatcaggctttcggagccgcagagatagggttctccattttgtagttttccccaaggaaaaacagagagagagacagagaggtcaacgaatttttggtggtgagttgtgggctgagcctgcaaccgttgttataaactggagttatcgcaatgttgggtgtgaatcgtagtggctttaattacgggagcggtttaatccacctagctgaatggcatccattggaatagcaatgctaaacagggcttgaggcccttccgttcctctcatatcagctatttgcagggtcagcagagtgcagagaaaagagaagttagttattaggatattggctttggccgtttgaggtgcgtcagattgatgctgtgatgggagattataagagtttttcattttccaaaatgatgggctgctgtggttgctttggatttgtccaaaaaccaagaccgcgtcgggctaaacgtagcatcagtaatcttctctcccaggggctattattggatggagaaactgaaggtgaagagacatatagtggtgatgttactagtaactgcaccagtggagatgataatgaggtgcaagctgtacgcaaccgttcagaggatattttgaacttcagagctgagaatggcatggtttgcaggccgtttcctgttaaggagacttgcaaacttgatcgctcagaggatgaaaatgggaacgtgatgataaatgaatatgttcgagagtataaaattggtaacggaagctatggcaaagtggctctttatcgtagtagtgttgatggaaagcattatgccattaagtcccttcacaagtctcacttaccaaagctttcgagttgcaccatctgaga

SEQ ID NO: 128674 - DNA, 639 bp, Glycine max
  Clone ID: PAT_MRT3847_87197C.1
ctttccacccgtccgatcgatttcttccgcctagggtttttctgcattccgattacccatcccaccgcattcacaatcacaattgcaatagggttttcgtttccttcggcttgcttctgtggtaattgcagctttctcgattgaattttggatttagggttccgattccgagtcttacttctaaaagccgtcgattcgtcctggaatttcaggctctcggagccgcagagatagggttcttccattttgtcatgttccccaaggaaaaagagagagagaggggtcaacgaattttttggtggtgagttgtgggctgagcctgcaaccgttgttataaactggagttatcgcaatgttgggtgtgaatcgtactggctttaatttctgtagccgtttaatccacctagctgaatggcatccattagaatagcaatgctaaacagggcttgaggcccttccgttcctctcgtatcagctatttgcagggtcagcagagagaagagaagttagttattaggatatatattggctttggccgtttgagggtgagtcagattgatgctgtgatgggagattataagagtttttcattttccaaaatgatgggctgctgtgggtgcttcggatttggccaaaaac

SEQ ID NO: 128675 - DNA, 392 bp, Glycine max
  unsure (1)..(392): unsure at all n locations
  Clone ID: PAT_MRT3847_87198C.1
gcgagctggggtgttgggcacctgttgctgtttattgtccaccactttggatgcacatagatggcattggtttttggctatganctgggacagtgggaatgcaatttttgctagggcctgggatcaatgagaaatggcgctggtgctattcttctttgtccagtgctgaacccacgtgctctgaacagccctgtgaccaatcatctcccatctctcaagatgagaaacaaggagcgatgaatgaggaaaacgtagcatctcattcctcaaggtgtgacaaaggtacccaaatgagtctaggagaggcagagaatgattcacattcatctcctanatcttgtgccacttcagttgtggaacaacaagaatggcattctcctaaattagaggtc

SEQ ID NO: 128676 - DNA, 641 bp, Glycine max
  Clone ID: PAT_MRT3847_87199C.1
cctctatgactttcaaaataaacaaaaaaaaatctcagttttattttatttttaataaattttcacaaaagtcactatctcccactatatatgttgagtttaataattcattggccgcattatcttgactataggataattaatgaaaacgctttaaaagtcattattgttcacaaaactcatccatatctttggactttggtgaccgcacttgcacagatgagacgcatataatgggtatcctatgctacccaacttgttggctgtggtgtccaaaaattacttcaataaaaaaaaaatcaaattgagttggttttaaattgttttaatcaacttgattttatattaaaataattaaactaatttaaaaattgatttaaaattaaattgattttaaaaaattagttttaaactgaattgattttaatgagttttaaattaattttaagagtcagaaataattttgaattgattttgaattattttttttaagtaaaaaatatttaagtaaaattcatttaatcgaattgattttataaaatagtatatttccttttttcttgaattaatttaaaaaaatcaattttaatttaaattggattatagggcccgattaattcggattgatttttttaacccat

SEQ ID NO: 128677 - DNA, 141 bp, Glycine max
  Clone ID: PAT_MRT3847_8719C.1
ataggaaacagtgaagcaattaaaagaacttgtctatagtgtacataaaaaggcataaacacttataagacaagctcctgattttatgaagacacaagatctcaaccggaatttttaacacatatatgctttaaatagtcc

SEQ ID NO: 128678 - DNA, 224 bp, Glycine max
  Clone ID: PAT_MRT3847_871C.1
acctatacctttattaatggaattacggttcttgcgcatagtcgcatcgagcgtggacttaattcgcactccgatcctgtctacgttcatttcctacatccagcatcccgaattggtaataacggtcttgctcttcctcctcgtcgcgattttatcaagcctaagcctcacaacgcggataagtcctgttttcctcctgaaattgccaatcatcggggaaccta

SEQ ID NO: 128679 - DNA, 629 bp, Glycine max
  Clone ID: PAT_MRT3847_87200C.1
ccacgcgtccgcaggccctggcgagtccctcaggtttcttcggctatgttgaaaatgggaattcgcggtgtcactgtatctgatgtcaagggctttggttctcagggtggttcaaaagagagacagggaggctctgaattttctgaagacaattttgttgccaaagttaaaatggaaatagtagtgagaaaggaccaggttgaggcagtaattgacaaaattatcgaggaggcaaggactggggagattggtgatggcaaaattttctgtaagacctaaacctactttatctggtggtgaatagtgtggtcctttagcagctttctttattctgtatgtgttttgatcgttacgatatgtgtaatgtgtccattttagtcagttactctcattctctcgtaaaaatgtcattcttcttttctgtgctgagcaaaggttatccttgtgttgaaatgtagaagctcaatagctgttccattttcaataatgatttgttatttctttatgtaactgggcaagggataaaaagggtttatcaactgaaagaaaagaaaaaaaaaaactaaaatgaattatggctgtctgagataacaagttatgaaattatgtttttaagctaaaaatcttta

SEQ ID NO: 128680 - DNA, 462 bp, Glycine max
  unsure (1)..(462): unsure at all n locations
  Clone ID: PAT_MRT3847_87201C.1
ggcttggaacctttgggctgatgtatgtgcttgcatggtcgtgagaagatcatagaagggaacgtataagccattacggatcaaacgggaatggctagaaaagatacacgactagtcctagatggggaggaacgtccccgtcgtagcgtcccgaacccaacccccctcttctagtcgccagcactctcaacgaaaaacaccccacgaatacttaacgcgccacacgatatttagcgaaaaaggaaaaagagcaaaaacacacgcaccagaagccacaccacacgactcaacgggaggaaatagacaaagaaaaacaacaaaccgccaatgcagcgcccaaaaaaagcgagcgcttacgcaatctattctctacgcccagacccctctcacaccgcgcattaccggtacggaccacactcactcgncaaccaaccctcctctaacataagaagtatcgaccgg

SEQ ID NO: 128681 - DNA, 542 bp, Glycine max
  Clone ID: PAT_MRT3847_87202C.1
ggtttgtatctgtgttgttcaataacaatgagttcaccacctcaacgcaggaacgattctgagaaagagcatgatagcacatgcaatcatttgggctacacaaacaaacgtccttcccaaaatggttcgcgctctagccctccccaaaatggtgatgtcggcggtagtttgggctttcggcatgatcatccgcggagtacgggccctatgggttcccgaagcatgtgccttcgtaatcatgtctttgcgtcctgtttttctggttcactctttgggggatccctcgtgcgtgctgcaaggtatttctcccactgttcgccttggggtgattgtttgggggttttggtccaactggtcctgttttctgttctgttcaccattcagtttttgtgaaggtgtagtcccacggggtccttgtgtgccttttgtaagtctatatgtttatatgtaagtagggtgtataatttggattgacaagtctttcttcttttctacataaatttgtatttgatgatttattagaaaagtagcatattataatc

SEQ ID NO: 128682 - DNA, 495 bp, Glycine max
  unsure (1)..(495): unsure at all n locations
  Clone ID: PAT_MRT3847_87203C.1
ggggctgcttaaaactctctgacatcatccttggtgctgccctctcgaagatttttaagcctaacattattactcctcgcaaaaggacatctgagacctaaggatgataaacaccgacatgattctccaccccaaaatgctcctgggctgaaatttggggagggctcttggcactggcgtagcccttggccaacctgaacacccccgggcctgcagcaaagggcatttccctaagagtgccctgaacagggttcctcccangcgtgcggtgagggctggcagcatatctccccctcctgaaggccctggtactgagcctctcccttccacgggcctccaaagaggccaagccgctcagcccctgagccctcccctcgtgctggacgctctgctcgggaccctcgggcaaaacctcgcccctcatggaaggggctccaaaccctgttgcttcgggaacccccctggctgggggctcggtgatttctccccccgtga

SEQ ID NO: 128683 - DNA, 301 bp, Glycine max
  Clone ID: PAT_MRT3847_87204C.1
tggaacctttgggctgatttatgtgcttgcatatgtgcttgcatagtcgtgagaagatcataggagggggagtcgctccccgcgtttcggcacgctaacaacacggtcgaggaatatctaagtccatataacgacgccagctaacacgtcgcgtcacgacccgcaagtcccttaacgagatcggcccactcggaaacgaatcccaccagccggaactaaccaaccaacgaccaaatacaagccgcaattaaagaagtaaaaagtggttgccccaaaggacttaggcccaggcatttccgtc

SEQ ID NO: 128684 - DNA, 1495 bp, Glycine max
  Clone ID: PAT_MRT3847_87206C.1
tacggctgcgagaagacgacagaagggggagcaccaactacctacccctttctttgattttgtgtcccaccctgcatcttagcagagccactctgatcactaaaatgccattgttaacttcctctttgttcaacatggttcctctcttctctcttcttttgttctcactcatgattcgttatagtacttctcaggatccaccttcacctggttactaccctagttccaaaattagtcccgttagctttggtgagggatttagaaacctttggggacctcagcatcagaaactagaccaagactcattaacaatctggcttgactcttactcagggagtggattcaagtcacttcactcttatcggtctggatactttggtgctgcgattaagcttcaaccaggttacactgcaggagtcataacatctttatacctttcaaacaaccaagactacccaggacaccatgatgaaatagacattgagttccttggtaccacgccggataagccatatgtcttgcagacaaacgtatacgtcagaggaagtggagatgggaatattatagggagagagatgaggattcacctttggttcgacccaacacaagattttcacaactatgctattctgtgggaacccagtgagatcatatttttagtggatgatgtcccaataaggagctatcctaggaagagtgatgccacgttcccctcaagagaaatgtatgtgtacggatcaatatgggatgcatcttcatgggctacagagggaggaaaatacaaagctgattataattaccaacccttctttggtagatacaaaaacttcaaaatacaaggttgtaccactgaagcttcaacctcatgccagccaccatctccctcaccaccaggctatggcagcctaagccctcagcaactttctgcaatgcaatgggtccaaaacaactacttggtctatgactattgccatgatcctggaagagaccatacacttactccagaatgctaaggttttaagctatatttggattgaaattgggaaagtatatttttataaaattctatacacaattgcaaatacagaatgaaaaaggaataatttgttgctttgcaaataaaattacttttgagctttcccaattgaaatccaagcatgcacttaattagtttggttcaagagttggtgtgtttcaaagttatttgttatttttcacatattaccaaaacagtttattaagggggtggattttgtgatggtttgctaatgctaagtgtaattgcaacaacagtgagcgtccaagttcccctcaaaaaagattgaaatgttttcgttgtttatgtaattgtgttggtttgtttgtaccccacaaaagattgggatgcttttgttgtttgtgtaattgtgattgcactattactttagtccttttcctgttgaaataaatcaatctatttggattttggaagctaacctaataaaaaaaaaaaaaa

SEQ ID NO: 128685 - DNA, 719 bp, Glycine max
  Clone ID: PAT_MRT3847_87207C.1
caatgtggggatctcaacttctttgaatttccgaattcaaaatcataatctattgttggtggagactgaggggcattacacaactcaaacaaatttcaccagttttgatattcatgctggccagtcatactcttttctgctttccactgaccagaatgcaagtacagactactatattgttgcgagtgccaggttcgtgaatgaatcattgtgggagaaggttacaggtgttgcaattttacactattcaaattccaaggggccagcaactggtcctctgcctcccccacctagtgatttttatgacaagacagcttcaatgaaccaagcaagaagtgtcaggcaaaatacatctgctagtggtgctcgtcctaatcctcaagggtcctttcattatggctccatcaatataactgatacttatgtgtttaaggttacatccctggtgccaatcaatggtacaaatcgagctactattaatgggatctcatttctcaagcctgaggttccattccggcttgctgacaagcatcaattaagaggaacatataagcttgattttcccagcaagccaatgaacagaaccccagtaattgacagatcaatgatcaatgctacatataagggattcattgagattatattgcagaacaatgactcctctattcaaaactttcatctggatggctactccttttttgtagttgggatggattatg

SEQ ID NO: 128686 - DNA, 329 bp, Glycine max
  Clone ID: PAT_MRT3847_87208C.1
agctatctcgatcgaactgtccaaggtgctgtcacattacctctatcggatataaatgagtagccttatctaatactctgcttattgcgttgggagccccatctcggtctactgatgttcactcgctcacctattttcaatctggtctacaaaaactgtgcttttaaaacttgtacccagtccttccatattcatcattttgggcgagttcctcttaatgtttaagattgcacccagtgcgtcacatgtccagcagttgggcctgaccaactttccacgattctagacactgcatgtcgcattcaattgctcacaatgcctgcccatag

SEQ ID NO: 128687 - DNA, 317 bp, Glycine max
  Clone ID: PAT_MRT3847_87209C.1
gtgagtgagaccacttgcataagcttctctcacttatacatagatttgattttgtagctgtagctttcattttttttttaccatcattctgttaaaaccattttttccttctttgttttaaatgattaattattaattatgggtttttgtttctgaagtgatgtgtcgataatgtgggatgtactgcagtgtcaactctatttatgggtttttaaggcttttaacttttgatctgtcggttactcagtaaagtctatggctgggggactgtagaggtgggaattgtagctactttgctgattattgagggggaggag

SEQ ID NO: 128688 - DNA, 795 bp, Glycine max
  Clone ID: PAT_MRT3847_8720C.1
aattcttttgaagagttggagccagaatatgccaagggttacaaaaaagcaagaaatggaagagtttggtgcattggtcctgtttcactcagcaacaaggatgaactagacaaggctgagagagggaacaaggcttcaattgatgagcatttttgcttgaagtggcttgattcgcagaaaccaaagggtgtgatctatgtgtgccttggaagcatgtgtaacataacatcacttcagttaatagagcttggtttggccttggaagcctcaaaaagacccttcatttgggtcattagggaagggaatcaattgggggaattggagaagtggattaaggaagaggggtttgaggaaaggaccaaagatcgaagccttgtgattcatggttgggctcctcaggtactgattctttcacacccttcgattggagggtttttgacacactgtggttggaactcaactttggaagctgtatgtgctggtgtgcctttgattacatggcctctatttggagaccagtttttcaatgagaaacttgttgtgcaaatactaagagttggagtgaaggttggggtggaggttcctgtggagtggggtgaggaagatgagaatggtcttttggtgaagaaagaagatgttgggagagctattaatgagttgatggatgagagtagggatagtgaagaaatgaggggaagggttaatggacttgcagagatggctaaaagagctgttgaaaaaggtggatcttctcactccaatgtcacactcctttaccaagatgtcatgcaacaa

SEQ ID NO: 128689 - DNA, 546 bp, Glycine max
  Clone ID: PAT_MRT3847_87210C.1
cccacgcgtacgcccacgcgtccgtttatgcttaaacgacagcaagagagagtttctcacgcagcctcctcaaacattagcagagggagtcagacacaaacgtagcacaaaggaaaaaaaaaaaagagagggtctcactcgcgctcctaagttattgaatttcacataacaaacaggctgcagaggtagggattctgttagctgccactgccagattacttgcttctgagttttatgactctgttgggttttcattatgagtggtgcacctaagagatctcatgaagagtctgttcattcatcttcaaagcactcaaatgaagattcgggtacttattccaagttggtttcattgccagtctcaaatgagtaccatatgccttatgatataagtcaggactcccgggtggcaaaagtgcctcgaactgaatttcgtgatgcagatagaagatcccctcttaatccagtgtatcggatgtcgtcacctttgaatgattctcgtgcagataatcctattggtcctgagaataggatagaatcaaggga

SEQ ID NO: 128690 - DNA, 297 bp, Glycine max
  Clone ID: PAT_MRT3847_87211C.1
tggtccaaagatcgagacatacaattagatgctcaagacaaatactgatgaccgaggcgctaaattcgtgtgacatgatcccactaaaggagagtgcaacatcattatcagccattttagcatctacccgcttgtttaagatccaaacagtcggttaaatgatgactactaatggttggtccgtatgattcaaaacaggggatgacctctttagataaaatattttcagaacccctgttctggtttacaccttatcccgtttttttatctatgaaccgtcactgtattgccaatata

SEQ ID NO: 128691 - DNA, 294 bp, Glycine max
  Clone ID: PAT_MRT3847_87212C.1
tttttttttaattgacttgtttttgtttttttttttttttatctaaaacaaaccaagagatgagatctcattttttttttgcttgaacaatttttgtggttaacagaacactttttgtacttacaattccccggggtgttgtgggggcttttcctttaggaaaataatgtatacaatgttttggaaacgttgcccacggattaaactgtctggcccatcctgggggaacttaccttcggggcgttttatgtaatgagaccgtgcaacaggggctaatgctccggacagagtgtc

SEQ ID NO: 128692 - DNA, 287 bp, Glycine max
  Clone ID: PAT_MRT3847_87213C.1
gcgtattcttgggtctctttacggcgaggattggggtgtgatttgctgtattgcctcgctcgacttgcatataccctgggcaggcgagttgaattatgcctactagaggggatctccttgcaacttttctaattgttggccacactctaaataaccctcattcttcttccacgtgcgcgtggcgggagagaggtgcacagtccttcttcctcctgggcggaggtgaatcgaccaacgtgtgcacactggtactgctctctcctgacccctcgaacatggaacgttct

SEQ ID NO: 128693 - DNA, 196 bp, Glycine max
  Clone ID: PAT_MRT3847_87214C.1
tctcaagcgaattatcagtgatcgtcgccggaaaaattctccgtggaagccatatagcaccggaatatgccctcaatattctccaacccgagattctgattattcgggaaattttggagattctgatgaaacaaattcagaaatttcacatacggatgaggtaatcacaacattagagagaaacggtataagtttt

SEQ ID NO: 128694 - DNA, 573 bp, Glycine max
  Clone ID: PAT_MRT3847_87215C.1
cacaaaatattacagttcgattttgggttataaaaattgggataagtttatctaggcaacacttccaacagaagagagtctcgtcttgcccagattgcaaggggtaaggcataaaattttctccctcatatgccaataacctgtttgatgatcttggggctaagctaaaaaaggaatttgatgcaatcttactttgggatgaaatcttctgcttttgatctcctttggatgaataatttctttggtttggttgtggcaaaggactggcggaaagtaaaataaaattctcatgccatgagctcttatcaaaaccattttacaaatgaagaagtactcctcagaccatttgaacactaatgctagttacccttatgtgaattgcaatggaagatgagccttggatagatctgtcacaatgaaatagattaaataatcataaaaaaaaaacccactatgggttacctttgctttttttcttccaaaatagttggaaccgtactagagatagctaatggagattcatctaacatgcttagagaaatagcgagcttataaaactaacgtaccttagtc

SEQ ID NO: 128695 - DNA, 672 bp, Glycine max
  unsure (1)..(672): unsure at all n locations
  Clone ID: PAT_MRT3847_87216C.1
ccacgcgtccgctacttgcgaagtgtacggaaagacgattggagcctttctccctaaagatagtcctcttcgtaaggtggcctttttgaattttattcttgacccgtttcttttttaagagtgtttccagatctgtgcattctgagctgtggttttgcgttttgcattaatttggaatctgtcggtgacatgatgtggctaattggatttaggttgtgattaatgattgccttgttattatacgatgtcgactttggacattttcacttgcgtttggattgtttgttagaggaggttgacgtgttgtgattttgttcttttgatgaatttggagttggatttaggttgtggttgcattccttattggaattttttttttctggttttgtattgggagcaagggttggttggttgtttgttgtttctttcttctgatgggattgagctgatatgtgttgtttgtttgcaatttgtgttaggatccggcatactatgttcttaaagaagacgagtctccttgcattnttggttctattgaaaaacagagggtggtcttatgcctgtgcgaaacagttgattgagaggctngatttatggtgagttntgatttgtttttgtttaggggggtgttttttttttttttctttttcaattttggtaattctcactgat

SEQ ID NO: 128696 - DNA, 308 bp, Glycine max
  Clone ID: PAT_MRT3847_87217C.1
gcctcgatgtgaaattcctgaacaaccacagcctggtaaaggacgcccaggagaaggccaacgccgccctgctggaccacaccttgtgtcagtacccaccctgcggggacaatttcccgcagttgctattgtgcctggtggaggtgcgggcactgagcatgcaggccaaggagtatctgtaccataagcatttgggcaacgagatgccccgcaacaaccttctcattgagatgctgcaggccaagcagacttgagcctgggtgccaggcagcgggcagtaggcagggatgccactgcctccaaaagac

SEQ ID NO: 128697 - DNA, 253 bp, Glycine max
  Clone ID: PAT_MRT3847_87218C.1
aatcgtcgagaatccaaccttgatgatgtcaagcatgacaggtcagcctcttggagtcaccatggcagagtgaggagtcattcatgcaaatcatctaactgcggactccggtgacccgaaatattctgctttgaaacatcctagatgaaggagtttccacaacctccaaaggctggtggaaagaaagctcaacctttggcaaaaatgaaggaattggctagtcatggccaaaagtttgtgctcccctaaagaa

SEQ ID NO: 128698 - DNA, 416 bp, Glycine max
  Clone ID: PAT_MRT3847_87219C.1
aaaaaaaaatggggtcccgttttcctttcttttaggaaacattcaagcccttggcccaaaagccccccttttttcaaattttacaaaaagacccccccccgttccaaaaagcgggggggggatttttgttttttaagggcccgatcccttacctttttttttggcgcgattggatttttcccaaagcaacccgctttgtttttttgtaaaccccacgcgttttttttccaggttatacttaaccttaaaccctttgttgtgtatttcccgggtggggccccgggcccccacctaaaattctttaatcccccaccgtttataataataaaccccccaccttttttttcctttggttcataccaccggcagaacttttaaaatttttttttctggggcccccccctttttttttttcc

SEQ ID NO: 128699 - DNA, 710 bp, Glycine max
  unsure (1)..(710): unsure at all n locations
  Clone ID: PAT_MRT3847_8721C.1
ccacgcgtccggtttatttcgttggggccgtgtgcgaagagcgtgatcccaaagcattcttcaactggatgagatgataaatagtagcagcataattgagatgacacagttgaaatagtagtagtgtttacatttcagcgcgcatcactttctctctccgaaatgaagcagtctcttctgctgagaggcgaaagcagtgaccagagttaccagtcgcggggaatattccggcgctccgatgctatcgcctacggctccaactacgagaaagccgctgcgttcatcgatctggctgaagatggtgttggtctccctgaggaaattctcgactcaccaaacttccaaaattacataagaattttattttatattcactaaatgcaatctaatctggtctcttagttattttgctttgatagtcctgaatttcctggagaagcctctatggtgtaaaaagcttaccacaaattcctgcaacgatagagagtattttctttttgngacaattgccatatctaactgatgcagaatgtcttatttatgagggaataactcttgttttgctaatcatacatacgttcttcccattgtcatacgaaggatcccgcatatattggaaaaatactattaatcaattgaaaggttttctctctattagtgctagntgctgatgtgatgctctatgcccttttcttgtctcactggctttt

SEQ ID NO: 128700 - DNA, 301 bp, Glycine max
  Clone ID: PAT_MRT3847_87220C.1
gacccaaaaaaaaaaggattcccttttgaactaaaccaaaagggacccgaaaatgaaagggggactccaacaatgaaaaaaaagaagaacgtatacacagaagctcagggaatgcccgggaacgggatacccaaacccccaaccccgaaaggggaatctaaacccaaaacaaatctccaagcccagagggaaggggccctgagcccgagcccaagcaggcgccaccatgactgcgaaggcaagggcctaattttggggcacctaaaccaaaacaacgggccggggctgaaaaacgtacggg

SEQ ID NO: 128701 - DNA, 120 bp, Glycine max
  unsure (1)..(120): unsure at all n locations
  Clone ID: PAT_MRT3847_87221C.1
tcaagacacanggcaacatagcatagnaagantaancgcgggtccgacccgananctcanctttcgncgtagtgctcgttttcagngttacaaaggaatgacccnaagtgattanaaaag

SEQ ID NO: 128702 - DNA, 301 bp, Glycine max
  Clone ID: PAT_MRT3847_87222C.1
caggtagtggtggaggacaaggagggggtgtaggatatggtggtgatcatggagctggatatggtggcggtggtggtggtggtccaggttatggtggcactctccaccatcgtaacgcaggtggatttcgccatagctaatgtcgggtctcatcttaattgaaatagttccattttagcacttgttgtatggtcttttctaggtaatattcctgaaacaattttccaatctcatatatttcctaactacaactcccttcctcaaaaagttttcttttctcccttcatcaatcctcctattc

SEQ ID NO: 128703 - DNA, 414 bp, Glycine max
  Clone ID: PAT_MRT3847_87223C.1
ggtaaactggggggcttacacttgttcttacgcttgtttttactttgtaaaaacccaggggggacccccgggggccaccccggcccaaacccgaaaaaaaaaaacggggaccaaaaaggaaaacaaaattccccaaaggaaaaaggaaaaacgcccgcgataaaaaagaacaaaaaagccccaaggaaaaaaaggaaaccccggcgaaactacagacaaaaaaaaaacccaaaaacaaagaggcacaccccggcggccccaaagagggaaaaacccaccggaaagcgcgccgaagcaacaggccccctcccaaaaaaaaaaaccgcgagccccgagccacaaagaagaagccccaaccaccgggaaaaggggcaaagaaaagggcccccaacgggctctcccttacaaaggaaa

SEQ ID NO: 128704 - DNA, 361 bp, Glycine max
  Clone ID: PAT_MRT3847_87224C.1
aaactggtcaatcattccaaaatccaatcccaatcacaatacaccaaatttcttgaaccttccgcttcaatataaaatccctagtttcaaaatatctcccaaactaaaccaattcaaatttcctaaaccatacacactatttccagaccctccttcataagggagttttaaacctgtcactaaccaaaaccacactcgaagtccgcactttacaaatacggcttgcatagagagagccaaaaacaccttgcaagccgttccgaatgcacaacttgaaaataaacctcccacacacaatatttctaaatttctgcttgggaatggaaaatgctaaatacccttgatcaacaaaccgtagaaa

SEQ ID NO: 128705 - DNA, 330 bp, Glycine max
  unsure (1)..(330): unsure at all n locations
  Clone ID: PAT_MRT3847_87225C.1
catgcgccggcgaagctcgaattcgctcgaggctgcattaactgattttcttttttgctgaatactaacccagatgcgaatattgcaaaggagccgggaccttntcatttaagttcaaaaagccttctagaatgttacacacccattgtagttcctgtatactgttgaccttagtataaaagataaaatataggcaatagcaaattcatattgagccagttgtgtttattactcacaacatgctgagaagcacattgagatttttaccaagcaacgattttcaggtctttcaatatgcattgctaatactcagtattctttcttatacaa

SEQ ID NO: 128706 - DNA, 354 bp, Glycine max
  unsure (1)..(354): unsure at all n locations
  Clone ID: PAT_MRT3847_87226C.1
cttggattcggggagcggccgccctttttctctttgtttgttttttttttttttttnnnnggccgccccccctttgggccccgggttgtggtgggggcggccgcggccgttttttgccccccttttctttgggtttggccgccccggcccnctattgccctcctcttttgggnggttgccctttggtgggccggggcggcgcggcgcggcggggtcctgggtctcgctgcgctgtccggtgtgccctcgggggttccggcccgcgctcggcttgngcccctggtggggtgccgcggttttgccgccgtcggtccggccccccgttctgggcgccgcgggggcgggggggggggg

SEQ ID NO: 128707 - DNA, 894 bp, Glycine max
  unsure (1)..(894): unsure at all n locations
  Clone ID: PAT_MRT3847_87227C.1
ctatggctgtctatagctgtgtctccactcttgtattctcattcaatccncagatcctgtccctagtccctgaattagttaatctttttgctctagtggtggtatcacctgtggagacgcctgaagttaaagctgtagtaggcagagctttttctcatctaatttcattatatgggcaacaaattcaacctcttctgagcaatctcccacctgcacatgcaaatgcattatctgcatttgctcaacggagttgatcgtgcaaacaatgagcaaattgaaaattttatgcaattattttacttgttttacttatcaagtatgtttttgaagaaatgtcctgttacacagttttaagtggagctgtttgggtcggccagaagtccattgcctttaccaggtatgctacttttggaaaatgttaccaattggttgacatgttattccaatgtaggaactgatttggtaggtagagttttccttgcaagacaaaatttccctgtgttttcctgacaaccttggctaaattattgccttgtgattgtattatcctttcaatcaaaaatgctgttgaagttcaatcaactacttacttttgagttttgattcttttctttctgcaggatgctgagtgccttctcgtttttttttttgggagacactttccccccattttttaattaattatttcttgtgttattctttagtttttaaaggatattaattttcctttcttccatattatgaaattttgtttggtgcgctttcgcactggcttggaggggtgagtgagagttgtgtcntgttgaagtttatgtaccgagaaactataagttcttccaaaggtatttgtgatatattctacagttttgtgatatgctaattgtttttattttc

SEQ ID NO: 128708 - DNA, 2573 bp, Glycine max
  Clone ID: PAT_MRT3847_87228C.1
acccacgcgtcagcaaaatgtaagtttgtccaatacctccttgttttaacttcacattcttactttttcatagatggacttctttttatttaatcattttgttcttagtcccattcccatcttctgtttgattttaacaccacaattgacactggctttgtttttcaggaaggggctgctaaagcaaaagaacttcttgatactgtgatgaatatttacatcaagactatggttgaagatgatgacaaggaagtggttgctcaagcatgcactagtgtggctgacatcattagagattttggttatgcaactcttgagccgtacttgtcccagcttgttgatgcaacttcattgttgcttcaggagaaatcttcttgtcagcagatagagtcagacagtgaaattgatgatgttgatagtgcacacgatgaagtgcttatggatgcaggttcagatcttctccctgcatttgcaaagaccattggtgctcaatttgctcccatttttgcacagctatttgaacctctaatgaaatttgcaaaatcttctcgtcctcctcaagataggactatggtagttgcctgccttgctgttgctacagaacatgggttttcctattgcaagctatgttgatagggtgatgcccttggtacttaaagaactagcatcatccgaggcaactaatagaaggaatgctgcattttgtgttggagagttgtgcaaaaatggtcatgaaccagctttgaaatactatgacaatattttacgtggactttatcccttgtttggtgagtctgagcctgatgatgcagtgagagataatgccgctggtgccgtggcaaggatgatcatggtacaccctgaatctatcccattaaaccaggttcttcctgttttcttgagagttcttccattaaaagaagaccacgaggagtctatggctgtctatagttgtgtcttctctcttgtattctcatccaatccccagatcctctccctagtccctgaattagttaatctttttgctcaagtggtggtatcacctgtggagacgcctgaagttaaagctgtagtaggcagagctttttctcatctaatttcattatatgggcaacaaatgcaacctcttctgagcaatctcccacctgcacatgcaaacgcattatctgcatttgctcaacggagttgatcgtgcaaacaatgagcaaatcgataattttatgcaattttttacttgttttacttatcaagtatgtttttgaagaaatgtcttgttacacagttttaagtggagctgttcgggtcgggcagaagttcattgcctttaccaggatgctgatgcttctcagagccttctcgttttttttgggagacacgtttccccccattttttaattaattatttcttgtgttattctttagtttttaaagtatattaattttcctttcttccatattatgaaattttgtttggtgtgttttcacactgggttggaggggtgagagttgtgtcgtgttgaggtttatgtactgagaatctataggttcttcaaaagttatttgtcatatattctacagttctgtgaaatgctagttgtttttattttcaaacatcatccactgtaattgaatcgtttttgggtcaaacaccataacttattgaatagtattgagcaatctcccacctgcacatgcaaatgcattatctgcatttgctcaacggagttgatcgtgcaaacaatgagcaaattgaaaattttatgcaattattttacttgttttacttatcaagtatgtttttgaagaaatgtcctgttacacagttttaagtggagctgtttgggtcggccagaagtccattgcctttaccaggatgctgagtgccttctcgtttttttttttgggagacactttccccccattttttaattaattatttcttgtgttattctttagtttttaaagtatattaattttcctttcttccatattatgaaattttgtttggtgcgctttcgcactggcttggaggggtgagtgagagttgtgtcgtgttgaggtttatgtaccgagaaactataggttcttccaaaggtatttgtgatatattctacagttttgtgatatgctagttgtttttattttcaaacaccatccactgtaattgactggtttgtgggccaaacactgtgactgattgaatactgaatagtattgtatcttccgaaagccctcgaacatgaggggagattgtttttttgcgttaattgcaccacctcttgtccttcaaaaataatccctgtaggaacaagaaaagtgagcctggcacgaaccataattttacaacgtcgtgaccggcaaaaacctaacgctacaaaacataaaagcagtgcaacaaataaacctcacgacagctggcgttttagcgttgaggcccgctccgatcgcccttcccaacagttgcgcagcctgaatggcgaatgggacgcgccctgtagcggcgcattaagcgcggcgggtgtggtggttacgcgccacgtgaccgctacacttgccagcgccctaacgcccgc

SEQ ID NO: 128709 - DNA, 487 bp, Glycine max
  Clone ID: PAT_MRT3847_87229C.1
ggaattcggcacgaggccaaggtgaagcaaacgatggaaatgtttttcctttgaatacaaagagaatagtatatataaagcccaaaacaaatcaattggttgcaacatcaaattcttatgatgtttctgtctctactgatgacaatctccaaactgccttctctgatggctactacaagagaagaaaaaatcaattggttaggactacaatcgaaagccatatcaaccagacagttgcaatgcccaataacacggcaaattctgatggacaaggaactagtaatgctctttgcaacaggaggtttagtaagaagcggacacataagggtatgcatgaacaacttattatgttgcctaatttgtctatctttcttggttacctgtgcatatgaatttaatgctgagtcgcgtcaggattagacaggatgcagcttaaaaaggctgtgctgtttttttatttgaggttcaagtagatatattcagttga

SEQ ID NO: 128710 - DNA, 258 bp, Glycine max
  Clone ID: PAT_MRT3847_8722C.1
attctctaaagattcttttagggggtggggcagaattactagtacaccagttgccaattattaaaaatacttttatagtttatttgtaacaatttgattataaaaaagtacttttttttttaaaatgaaaaaaagtgagagcatcttagctattttccacaaaggcggttatcttctttataacacttagcattaatttgggatactttcattttcatatttcttcaagtttcattctaaacttttttccttctaata

SEQ ID NO: 128711 - DNA, 134 bp, Glycine max
  Clone ID: PAT_MRT3847_87230C.1
tcgcccacgcgtgcggggtgctgacagagatcaacattatgctgagttcactcactatttctcgcttgcaaccttcctttgctctgcgagcattttccgcttgggccgaagaatttgtgaagggctctgttcat

SEQ ID NO: 128712 - DNA, 447 bp, Glycine max
  Clone ID: PAT_MRT3847_87231C.1
cactctcacaacctaagcgatgtatacctctttaaatagtggcctataataaaaaatcaacagcccgttgaaatatcgaagtgatcatttggtagaacaatctaatgcgcgctacctgaggaaaaatagtatatatttcttggtcattacacctggctgagagactagtgagcagtgatcagtatcccttctgaggtaaccatcaacaggagagctaatgggcactcaccctttacccattctttgaacacaagttaatgagcagtttctattcaaaaaatcagctaatttcttttttactatacacagcgtaatgtaacataaaaaaatagtttgaagcaaaaacgtaaacgtataacccagcagatgaaaatcataagggttcaggaaacattgccaagaaaaaaagataaagaccgcacatcacgttcaaagtcaacttacatc

SEQ ID NO: 128713 - DNA, 472 bp, Glycine max
  Clone ID: PAT_MRT3847_87232C.1
tctgttttctatttttacataaagtttctttcttctctctatttcgtttccattttagtgagggcatgttcctaatttttagttaggaaacaaagtaacaatcatatagggtgtttgttagggaagtagttttttcattataaaaaaatatgattcttaaaaatatacttgattagttttattatatttcttaaaaattaaaatttatgtaaaatatgtaagtaaaattgtggaaaatgatttttatattaattacataccagcacgagagttacaaattttcaccttaggattcatgaatttcctaacattattatatgagcaacaccaccctatggcattgtgcctagctatataaacgagttagagatgcaacctagaattgcttcagatccccctttgaatatggctttctggcaacttgaaaacgacaaagccaatgccatgagaaggttccaaagaaaacgaactc

SEQ ID NO: 128714 - DNA, 326 bp, Glycine max
  Clone ID: PAT_MRT3847_87233C.1
attagtcctttttagaataaaatgtgaaaaataaagatgaaaacgataaaaatgaataattttttacagtgttagactagtaagaaattcttacagtatcatataccgaggtttactgccaagtgcaaaatctaggtatgtgccatttgatgatttggtttgtacatgtaattatatattatgatctaatctcaaattatcatttgaattacgttaagatagttatttaaaaaatcaatcacgctttcatacataataagttatgattggatgtttgagtaaaaaatcacactttatcacggcatgtctatgttgaatgcaattta

SEQ ID NO: 128715 - DNA, 253 bp, Glycine max
  unsure (1)..(253): unsure at all n locations
  Clone ID: PAT_MRT3847_87234C.1
cggtggccttgatccatttgatatcttcagttcattgtttgggggaagaccgtttgggtcaggtggtagcaataaaggacttatgcacacgcggggagaagatgtggttcatctcctgaacgtctctcaaaaagatcttttcctcttaacttcaaagaagctctctctttcacgaaaagtggggggctcaaantgcgttgggaattactcttagtctggggcttcgatgacctgngntggataccaaaatact

SEQ ID NO: 128716 - DNA, 536 bp, Glycine max
  Clone ID: PAT_MRT3847_87235C.1
ggtagacaaattggaatattcactctatatttaagtattattcagcattggaaaaacaaatgaatgcgcgaattttgttctcagatactgagcaatgggaaatacaagagcgttgttcatcgagctgtggtgaacacgaaaggcattaggttttccgttggtatagcacacgggcccgagcttgacaccattgtggggcccgccccggagcttgttggtgatgatgatcctgctgcataccgggccatcaaatatagagattacatgcagcttcagcaaaaccatgaactcgacggtaagtcatgcttggatcgtattcgaatttgaatcaaattaagctcctaccatcgcttaattagttaggtatagccccatgcatttcttgtatttgaaccaagcctgtgtttcatgtatcatttaatttcaatttgaatgttgatctacttggaatgtaatttccacgtgtgtaattgaaaatgcttaaatgcatgcacgaatctgcctgccatggaaaattaataaattgacttcgtgtg

SEQ ID NO: 128717 - DNA, 190 bp, Glycine max
  Clone ID: PAT_MRT3847_87236C.1
gcgtggtaaccaaatataaatttatccagtgaagatttggagtaggagagtggtaacataaagtagatgttactgaaaccaagcaacacagaattcaaaatgcgtggtaataaaattataatttaaagataacatagtcgaagaagtgaaggataacaatattcaaaaggccatgcattgacaattgggt

SEQ ID NO: 128718 - DNA, 799 bp, Glycine max
  Clone ID: PAT_MRT3847_87238C.1
gaaggaattggaacagcaatgtgagggttctggttctggggttgttgttagtttcggggagattgaggtttttgtaggggaagatgttgatgttgatgttgtaaggttcgttgtttcgggtttaacgaggttgttggagattcgtggtgagaaggtttcgttgctgggcgtggcggaaacttctcatgcttattccaagttcttgggattgtttcccaatgtagaaaatgattgggatcttcatttgctcactgtcacttctgccactccttccatggaaggactctactcaacttacagcttgatggggtcctttgttccatttggtgggttcttttctacacctgaaatcagaagtcccgtaagctgtacaaatgcaccttttacccgttgtgacacatgcaataaaaaatgtgaacaagaagttgcagatcttctgaaggtaggtccttcatctagtaactcaacgagctcaccctggttacaaaaggttgttaatgtggagacgcatagagggtcggatgcggcaaagactaatgaagaaaacacaagtttgaatgataagatcttgggatttcaaaagaaatggaatgatatttgtcagcgtcttcatcacacaagttcactacctcaatttgatatttctcaaacaaggtcccaagctccaacacttgaggtttcacgctttggtctggcttttaggaaagcagcagtaaagacccatcacacagtgaattccaatattctagtcaaatttcctacatgcccaaagagttgcatagtatttttccttcgaagc

SEQ ID NO: 128719 - DNA, 454 bp, Glycine max
  Clone ID: PAT_MRT3847_87239C.1
ggggggcccgcccccaaagaaacctttgccctcaaaaaagggaaaagttaacaaaagccgcccggggaaataaaataatggccccaccccccgtttaaaaacctaaaaaagggaaaaaaaatatggtctaaaggggggggctcaaaccaaggaaacccaatctttggcctaagaaaaaaaaaaaaaccgtttttacaaaaatttcaaaaaaaaatatttttggttggaccaacccccaaaattaaaagggtgcctggaaaaatctaaaaaatttccacccccaacaaccggaaggttcccttccccggaaacaaaaaaagccctttgcccccgcagatttttcttagcataagggggccccaaaggtttttttttttttcttggaaccttgttatttcttgggtccaattttaaaagaacgttaactgtaaaaccaaaaaaaaaaccctggttt

SEQ ID NO: 128720 - DNA, 292 bp, Glycine max
  unsure (1)..(292): unsure at all n locations
  Clone ID: PAT_MRT3847_8723C.1
aaaagaagagagagaatcatccttccttttccgagaaagaggaagaaaacnccgagaaaacacagaaaccgntttcgccatacatcccatcaaagattccacaaattcattcattccattcagcnatcccaattccattnntctgccaaaatgggttttngatgttgaagcgggggnggattgacaatttncgatgganggganaattggagagaacacatcaacagcaatagcatgggattatacgataggtttgtgtgtgntagacaaggcgaagacccgcangcttctt

SEQ ID NO: 128721 - DNA, 400 bp, Glycine max
  Clone ID: PAT_MRT3847_87240C.1
ttgctttgtggggttacaggctaatgctcctggcaactcaatgcaacatgtgcagtattatggaaaagataccggattggagccaccacaatgtaactcgtacaccgaaattgctattctattaggagtcaacatcgattcatctggaattctgttcctctacaactgtgccgcgttatactactgcatcaatggatagtgacagcatgaacagtgtcattaggagagtctggatcccagtctcctttatatccttgaggacaagagatcatcagattgggtgcaacttgtacggcatgacagaccctcaaaaccagacacgaacatctgtaaaggtttacaaattaaggtcagttgggctctcacttgacatctctcggatcaacaattatcatgagct

SEQ ID NO: 128722 - DNA, 267 bp, Glycine max
  Clone ID: PAT_MRT3847_87241C.1
ctttggaacagaaagggaaaaaacagtcttatcctgacaggagcggtctatactagtgcagatttcaacacttttttttaacgttttaattactatagtgttatgtagagatttgattgagcagctaatgtttctgaactttacttactaattttcagtgtccttaagggttctgtagtgttatcaaagcaaaagaaaatgctgcataaaaataccaaacttcagcaactgttaatactcagatcatatacctcttaataaatagca

SEQ ID NO: 128723 - DNA, 885 bp, Glycine max
  unsure (1)..(885): unsure at all n locations
  Clone ID: PAT_MRT3847_87242C.1
ttcggcacgagccagcaccctccttttacaataaccctcttgaattgattttctctcctttaccttaatagtgtatttggatgaagcaatttaataggagaattcattttttcaaggcaatttaaaatgattcatgataaaatagcttgtttagatagagtatttgaaaagagatttaatttttgatatttttatgaatcattttgattgactgaaacataggaatttcaaattctctaaaaaaatatagaatttgaaattctgttttcagagatgctcactctaactcacattcttgctcacgattctttctcgttcaatactcacaactacgggtgaccaaagtttttacggtcgatattgacataagttgtttttcactgacgttggcagaggttttttgagttanaattttttttatgatgtcaaccaaagctatttttttgtcaatatcggctaaaaaaattttaaatgatgttggttagggttattttctcactgacgtcagtcatgaaaaaatttttgctaacgttggccaatgattttttggtcnttgtcatctaggttttttcagttgatgttgaacaatgatttttttggttgacgttggttaaattttttcctactaacatcggtcatgactaactttttgaatttaaccccggttaggattttccatcnacttcgctaggtttttccnccnacatcncccaaagctatctttacccatatcggntagggttatttttaccnanttactagggtgttttggcgantcactaaattcctatcaactccnttaggatttttgcnganacnacagggtttctgaangactcnccnaactttctacccttaccagttttggtgaattggcaggtttcc

SEQ ID NO: 128724 - DNA, 496 bp, Glycine max
  Clone ID: PAT_MRT3847_87243C.1
aaatcataagtgataaaacagtttgcagataacacttataacataacagatttgcagaaaatgatttgaatttgtggttgagtgcctgggttcaaaagttactatgcaatgcatttctgggtttgcataaaaattggttatatgttgaattgctggatacaaatgtgctgctttcttgagtcatagcttgctgggtcaagaatttgttgcagctatgagcagaaacagtgtaggtgtttcatctgcattttgtgtttttagttgcagaacagtgctttgaaggggacaaccaaagcatggttgttttggacaatttgggatcaggtatgtattaaaagaacaggctaattaactcagttgtggctcaaaattctgtaagtgtgaaatagcttaaccgagtttactcaattctactgagagatgcatttgagagtgagccaactctatttttctacatagaatcctaaacttgttgattttatggcaatgtgtatta

SEQ ID NO: 128725 - DNA, 1148 bp, Glycine max
  Clone ID: PAT_MRT3847_87244C.1
gaataatgatcttctctttattaaaatgagaaacaatatagactgaccgctcaaaagactggccaattgttctttaagtctttcaacttaattttaaaaaaaaatatagacactttttcaccccaaaaaaacaatgtcacctttttatatccatgactaacaaatatcaatttattcaccgaattatcagcagctacgcaagagaagaaatctgactggacagatctaagcttccaacgttcttaaccaaaccattcagttctatcactttcctccggtgaatgaaaattttcctcactgcttacgcagggatgaaactctatattatcacggacagctagatagttctatggtactgcaaaatttgtataatcaactgctgatacaaagcaaccggcatgctgaatgatgcttattcgtacttagtttctagaatattgaattacttcccatataagtgactacaacgggatgggatggacattatacggatatcaaaatggcaccacagacagcaaatgagtctctgactatagctgagatgatgcagtatcactttcttcaatctcatcaaattccactggtttcccacaaacaagcttcctttgagatataaaattctcctcagacagtgccttatccagcctctcttcaaatggggttgcatgccattttactttctggtcctctttgtacttagttgttgaattcgggatgccattgtcataccaccacttaaatgacataggcgaatgctcctcgatggttgatacaggacttattctagaagacaaatttgatttgatctcatcattttcatttgaaaatctcttggaccctttttctggggtaggagttccattttgagctttctcaaccaaatcactcagctcacttgaatcttcttcagggttaaaatctctctccttgagtattttgcaccggaggacattatcacctggtttgttagttggatagacaaactgggaccgaacttgagccctacctgtatgtaactcttctaatgatgcaggatacacagttcctggtgtttgcatctcatcaaataacttcaacggggtaggataaggagacggtttatatgcactttggttatttggtgaccctcgtgccgattcggcacgagg

SEQ ID NO: 128726 - DNA, 680 bp, Glycine max
  Clone ID: PAT_MRT3847_87245C.1
tctcttcagtccaaatccatggtcctctggtgcctttgaaaactggaccgtcataaaggacatgctgaatgtgccagttgtctatattattggagcctgtagtccagcaacaatgattgctgtgctttattattttgaccatagtgtggcatctcagcttgctcagcagaaagagttcaacttaagaaagcccccttccttccattatgatttgcttctattgggatttatggttataatatgtggtctaattggaattcctccgtcaaatggtgtcattccacaatctccagtgcataccaaaagtttagctacattgaagcaccagcacgaagttctatgaaaaagctagaaagcttgggacaagtatatggaagtatgcaagattcttactggcagatgcaaacccctctagttcaccaggaaccttccgcgaagggacttaaagagttgaaagagtcaactattcatttggcgtcaagcatggggagtataaatgccccagttgatgagtcagtatttgacattgtgaaggaaattgatgacttattgcctgttgaggtcaaagaagaacgtgtgagcaacctgctccaatctttctgatggtaggaggatgtgtagcagcaatgcctttcctgaaaattattccaacttctgtactttggggctattttgctttg

SEQ ID NO: 128727 - DNA, 361 bp, Glycine max
  Clone ID: PAT_MRT3847_87246C.1
tctattgctggtagaagaccacagacggggggggggactttcagtggtagttattgtatcctaggggaccctatcttctaacaccctcatactatattacataacctagcattggattgcatgcccttctagatgggatgatctattggggtgagcctgtgtgtcaggagaatggatggattgtaacgtactggtccttgctcaccacaaagaggaaatcgattcagaacagtactaaaccaatcaaccctacaagacttcaaggggggattgaatgcgtgtggagcagttatatggggcagaacagaagggctttaagcgtgctcaaccatgatctggtccaggaaggcagaccctaccc

SEQ ID NO: 128728 - DNA, 296 bp, Glycine max
  Clone ID: PAT_MRT3847_87247C.1
aacattgcaaaatatcggttgtatttatacataacatgccaaaataaaaaaaattttttgaaaattatttgtttcacttctcaatagttttacaatggtcggcaaatttatatcatgtgtaaacctattttttcaagtaagccctaaaatatgacacccttggatatgttttacatgaaaactatgggcacttgtaaatctgcctttctttttgggaactttcgtttgaaaatgctttttctaggttctttaccaggggttatcttttcaaattaggctatacatggtttgggaaa

SEQ ID NO: 128729 - DNA, 488 bp, Glycine max
  unsure (1)..(488): unsure at all n locations
  Clone ID: PAT_MRT3847_87248C.1
tgaggttgtgactgcgttttatagccaaggattatgctgagtaccaacaagttattgcattggtttgagtgtgatattaggtttggctcctaaatctcgcgcttaaatcttgtgaatagaaaatactgattaagagaagatatttcactaaagatactagtcaatatcttccaaggaagattagtttgttggaatatttttaatctttattttgtatactgaagctaaaaattcacaggtctatcatttagaacaattcataaaaaaatttaggattttcaacatgtttgattattaaaaattagatgaaatacctgaattcgtagttggttcctaatcttagtattttttcaacatttgttgtaagatctttgtgattatcataatcatgaataatgacattatggttattcctgannaaaaaaaaaaaaaaaaaaaaaaaaaaaaaaaaaaaaaaaaaaaaaaaaaaaaaaaaaaaaaaaaanaaa

SEQ ID NO: 128730 - DNA, 763 bp, Glycine max
  unsure (1)..(763): unsure at all n locations
  Clone ID: PAT_MRT3847_87249C.1
cctctccctgtcaccttagggttttcatgcaacaatttcctcctctctctgtacactatattgggaattttcctttgatttagggttttcgccgattttaatttaatacatttaatctgagatgcaagggattaatccaatcgatcgatctaggataggtgagacaaattgaagggtgattctgggttttgtatggaaactcgtagtcgtaagcgggcggaggcttcctcagctgccccttcatcatcctcgtccaccaccaccaccaccgcctctcgttccgccaagtgctctcgtctttcttcttcttcttcttccatcccaaacacaactactgctaatacacgttctcgttccgccaggaacaacaacaacaactccgtttctcccatggaccccaccaatgaatcctccggttccagacgtgatcgccgcggcaagaatttcgatagggacaattcggacaaagggaaggagaaagaacatgatgttaggattagggatgcggagcgggagcgagccttggcgttgaacttggaggctgaagatgttggggatgacgacgatgataatgatagtgagggcggtgtcggaattctgcaccagaatttgatttctgccagtaccttttcgagggcttcttcggaaacttggtgctggtttggatgatttgcttcctgctacggctatgggcgggntctgtgccctcttctcaccagactggcggactcaagcagatattgtctggnttgcgtgccgatgg

SEQ ID NO: 128731 - DNA, 544 bp, Glycine max
  Clone ID: PAT_MRT3847_8724C.1
ccaagttcggcgtctatgtcaccgttcccatcattctcatgtacactttcgccaacaatcccagcaacctccgcaagttcatgggacataggtcatacattgaatatcccccagaggcagaaaagccaccatcaccggaggaacttagggaaatggcacgggagatggctcgtaaaaggaacagttcttgatgctccacgtgattgttttggctgcaccacagtggttgtgtaacagtatcactgattatgcagtatatatgtttattgttttgttgtgtaataataaataatgatttataaactacactactgaaaaaataaatgtttttatttttcaaaagcttagatagtttggtgcaatagactgccaaaacttttctctgttgattaactggtaccttaaatccaaagaaaaaaaaatgctagtggcgatcctgttatagaaaaaaaaaaaaaaaaaaaagataaaacccaaaaaataaaaacaagaaactagaaaagagaaaaaaaaaaaaaaaaaaaaaaaaaagaaaaaaaaaata
